United States Patent Application Publication US 2018/0126003 A1 - sequence listing, part 30

SEQ ID NO: 48979 - DNA, 6291 bp, Artificial Sequence
  derived and/or modified sequence
atgctgcgcgtgttcatcctgtacgccgagaacgtgcacacccccgacaccgacatcagcgacgcctactgcagcgccgtgttcgccggcgtgaagaagcgcaccaaggtgatcaagaacagcgtgaaccccgtgtggaacgagggcttcgagtgggacctgaagggcatccccctggaccagggcagcgagctgcacgtggtggtgaaggaccacgagaccatgggccgcaaccgcttcctgggcgaggccaaggtgcccctgcgcgaggtgctggccacccccagcctgagcgccagcttcaacgcccccctgctggacaccaagaagcagcccaccggcgccagcctggtgctgcaggtgagctacacccccctgcccggcgccgtgcccctgttccccccccccacccccctggagcccagccccaccctgcccgacctggacgtggtggccggcggcggccagagccgcgccgagacctggagcctgctgagcgacagcaccatggacacccgctacagcggcaagaagtggcccgcccccaccgacaccggcggcgaggaggacaccgaggaccagggcctgaccggcgacgaggccgagcccttcctggaccagagcggcggccccggcgcccccaccaccccccgcaagctgcccagccgcccccccccccactaccccggcatcaagcgcaagcgcagcgcccccaccagccgcaagctgctgagcgacaagccccaggacttccagatccgcgtgcaggtgatcgagggccgccagctgcccggcgtgaacatcaagcccgtggtgaaggtgaccgccgccggccagaccaagcgcacccgcatccacaagggcaacagccccctgttcaacgagaccctgttcttcaacctgttcgacagccccggcgagctgttcgacgagcccatcttcatcaccgtggtggacagccgcagcctgcgcaccgacgccctgctgggcgagttccgcatggacgtgggcaccatctaccgcgagccccgccacgcctacctgcgcaagtggctgctgctgagcgaccccgacgacttcagcgccggcgcccgcggctacctgaagaccagcctgtgcgtgctgggccccggcgacgaggcccccctggagcgcaaggaccccagcgaggacaaggaggacatcgagagcaacctgctgcgccccaccggcgtggccctgcgcggcgcccacttctgcctgaaggtgttccgcgccgaggacctgccccagatggacgacgccgtgatggacaacgtgaagcagatcttcggcttcgagagcaacaagaagaacctggtggaccccttcgtggaggtgagcttcgccggcaagatgctgtgcagcaagatcctggagaagaccgccaacccccagtggaaccagaacatcaccctgcccgccatgttccccagcatgtgcgagaagatgcgcatccgcatcatcgactgggaccgcctgacccacaacgacatcgtggccaccacctacctgagcatgagcaagatcagcgcccccggcggcgagatcgaggtggacgactacctgggcttcctgcccaccttcggcccctgctacatcaacctgtacggcagcccccgcgagttcaccggcttccccgacccctacaccgagctgaacaccggcaagggcgagggcgtggcctaccgcggccgcctgctgctgagcctggagaccaagctggtggagcacagcgagcagaaggtggaggacctgcccgccgacgacatcctgcgcgtggagaagtacctgcgccgccgcaagtacagcctgttcgccgccttctacagcgccaccatgctgcaggacgtggacgacgccatccagttcgaggtgagcatcggcaactacggcaacaagttcgacatgacctgcctgcccctggccagcaccacccagtacagccgcgccgtgttcgacggctgccactactactacctgccctggggcaacgtgaagcccgtggtggtgctgagcagctactgggaggacatcagccaccgcatcgagacccagaaccagctgctgggcatcgccgaccgcctggaggccggcctggagcaggtgcacctggccctgaaggcccagtgcagcaccgaggacgtggacagcctggtggcccagctgaccgacgagctgatcgccggctgcagccagcccctgggcgacatccacgagacccccagcgccacccacctggaccagtacctgtaccagctgcgcacccaccacctgagccagatcaccgaggccgccctggccctgaagctgggccacagcgagctgcccgccgccctggagcaggccgaggactggctgctgcgcctgcgcgccctggccgaggagccccagaacagcctgcccgacatcgtgatctggatgctgcagggcgacaagcgcgtggcctaccagcgcgtgcccgcccaccaggtgctgttcagccgccgcggcgccaactactgcggcaagaactgcggcaagctgcagaccatcttcctgaagtaccccatggagaaggtgcccggcgcccgcatgcccgtgcagatccgcgtgaagctgtggttcggcctgagcgtggacgagaaggagttcaaccagttcgccgagggcaagctgagcgtgttcgccgagacctacgagaacgagaccaagctggccctggtgggcaactggggcaccaccggcctgacctaccccaagttcagcgacgtgaccggcaagatcaagctgcccaaggacagcttccgccccagcgccggctggacctgggccggcgactggttcgtgtgccccgagaagaccctgctgcacgacatggacgccggccacctgagcttcgtggaggaggtgttcgagaaccagacccgcctgcccggcggccagtggatctacatgagcgacaactacaccgacgtgaacggcgagaaggtgctgcccaaggacgacatcgagtgccccctgggctggaagtgggaggacgaggagtggagcaccgacctgaaccgcgccgtggacgagcagggctgggagtacagcatcaccatcccccccgagcgcaagcccaagcactgggtgcccgccgagaagatgtactacacccaccgccgccgccgctgggtgcgcctgcgccgccgcgacctgagccagatggaggccctgaagcgccaccgccaggccgaggccgagggcgagggctgggagtacgccagcctgttcggctggaagttccacctggagtaccgcaagaccgacgccttccgccgccgccgctggcgccgccgcatggagcccctggagaagaccggccccgccgccgtgttcgccctggagggcgccctgggcggcgtgatggacgacaagagcgaggacagcatgagcgtgagcaccctgagcttcggcgtgaaccgccccaccatcagctgcatcttcgactacggcaaccgctaccacctgcgctgctacatgtaccaggcccgcgacctggccgccatggacaaggacagcttcagcgacccctacgccatcgtgagcttcctgcaccagagccagaagaccgtggtggtgaagaacaccctgaaccccacctgggaccagaccctgatcttctacgagatcgagatcttcggcgagcccgccaccgtggccgagcagccccccagcatcgtggtggagctgtacgaccacgacacctacggcgccgacgagttcatgggccgctgcatctgccagcccagcctggagcgcatgccccgcctggcctggttccccctgacccgcggcagccagcccagcggcgagctgctggccagcttcgagctgatccagcgcgagaagcccgccatccaccacatccccggcttcgaggtgcaggagaccagccgcatcctggacgagagcgaggacaccgacctgccctacccccccccccagcgcgaggccaacatctacatggtgccccagaacatcaagcccgccctgcagcgcaccgccatcgagatcctggcctggggcctgcgcaacatgaagagctaccagctggccaacatcagcagccccagcctggtggtggagtgcggcggccagaccgtgcagagctgcgtgatccgcaacctgcgcaagaaccccaacttcgacatctgcaccctgttcatggaggtgatgctgccccgcgaggagctgtactgcccccccatcaccgtgaaggtgatcgacaaccgccagttcggccgccgccccgtggtgggccagtgcaccatccgcagcctggagagcttcctgtgcgacccctacagcgccgagagccccagcccccagggcggccccgacgacgtgagcctgctgagccccggcgaggacgtgctgatcgacatcgacgacaaggagcccctgatccccatccaggaggaggagttcatcgactggtggagcaagttcttcgccagcatcggcgagcgcgagaagtgcggcagctacctggagaaggacttcgacaccctgaaggtgtacgacacccagctggagaacgtggaggccttcgagggcctgagcgacttctgcaacaccttcaagctgtaccgcggcaagacccaggaggagaccgaggaccccagcgtgatcggcgagttcaagggcctgttcaagatctaccccctgcccgaggaccccgccatccccatgcccccccgccagttccaccagctggccgcccagggcccccaggagtgcctggtgcgcatctacatcgtgcgcgccttcggcctgcagcccaaggaccccaacggcaagtgcgacccctacatcaagatcagcatcggcaagaagagcgtgagcgaccaggacaactacatcccctgcaccctggagcccgtgttcggcaagatgttcgagctgacctgcaccctgcccctggagaaggacctgaagatcaccctgtacgactacgacctgctgagcaaggacgagaagatcggcgagaccgtggtggacctggagaaccgcctgctgagcaagttcggcgcccgctgcggcctgccccagacctactgcgtgagcggccccaaccagtggcgcgaccagctgcgccccagccagctgctgcacctgttctgccagcagcaccgcgtgaaggcccccgtgtaccgcaccgaccgcgtgatgttccaggacaaggagtacagcatcgaggagatcgaggccggccgcatccccaacccccacctgggccccgtggaggagcgcctggccctgcacgtgctgcagcagcagggcctggtgcccgagcacgtggagagccgccccctgtacagccccctgcagcccgacatcgagcagggcaagctgcagatgtgggtggacctgttccccaaggccctgggccgccccggcccccccttcaacatcaccccccgccgcgcccgccgcttcttcctgcgctgcatcatctggaacacccgcgacgtgatcctggacgacctgagcctgaccggcgagaagatgagcgacatctacgtgaagggctggatgatcggcttcgaggagcacaagcagaagaccgacgtgcactaccgcagcctgggcggcgagggcaacttcaactggcgcttcatcttccccttcgactacctgcccgccgagcaggtgtgcaccatcgccaagaaggacgccttctggcgcctggacaagaccgagagcaagatccccgcccgcgtggtgttccagatctgggacaacgacaagttcagcttcgacgacttcctgggcagcctgcagctggacctgaaccgcatgcccaagcccgccaagaccgccaagaagtgcagcctggaccagctggacgacgccttccaccccgagtggttcgtgagcctgttcgagcagaagaccgtgaagggctggtggccctgcgtggccgaggagggcgagaagaagatcctggccggcaagctggagatgaccctggagatcgtggccgagagcgagcacgaggagcgccccgccggccagggccgcgacgagcccaacatgaaccccaagctggaggacccccgccgccccgacaccagcttcctgtggttcaccagcccctacaagaccatgaagttcatcctgtggcgccgcttccgctgggccatcatcctgttcatcatcctgttcatcctgctgctgttcctggccatcttcatctacgccttccccaactacgccgccatgaagctggtgaagcccttcagc

SEQ ID NO: 48980 - DNA, 6294 bp, Artificial Sequence
  derived and/or modified sequence
atgctgagagtgttcatcctgtacgccgagaacgtgcacacccccgacaccgacatcagcgacgcctactgcagcgccgtgttcgccggcgtgaagaagagaaccaaggtgatcaagaacagcgtgaaccccgtgtggaacgagggcttcgagtgggacctgaagggcatccccctggaccagggcagcgagctgcacgtggtggtgaaggaccacgagaccatgggcagaaacagattcctgggcgaggccaaggtgcccctgagagaggtgctggccacccccagcctgagcgccagcttcaacgcccccctgctggacaccaagaagcagcccaccggcgccagcctggtgctgcaggtgagctacacccccctgcccggcgccgtgcccctgttccccccccccacccccctggagcccagccccaccctgcccgacctggacgtggtggccggcggcggccagagcagagccgagacctggagcctgctgagcgacagcaccatggacaccagatacagcggcaagaagtggcccgcccccaccgacaccggcggcgaggaggacaccgaggaccagggcctgaccggcgacgaggccgagcccttcctggaccagagcggcggccccggcgcccccaccacccccagaaagctgcccagcagaccccccccccactaccccggcatcaagagaaagagaagcgcccccaccagcagaaagctgctgagcgacaagccccaggacttccagatcagagtgcaggtgatcgagggcagacagctgcccggcgtgaacatcaagcccgtggtgaaggtgaccgccgccggccagaccaagagaaccagaatccacaagggcaacagccccctgttcaacgagaccctgttcttcaacctgttcgacagccccggcgagctgttcgacgagcccatcttcatcaccgtggtggacagcagaagcctgagaaccgacgccctgctgggcgagttcagaatggacgtgggcaccatctacagagagcccagacacgcctacctgagaaagtggctgctgctgagcgaccccgacgacttcagcgccggcgccagaggctacctgaagaccagcctgtgcgtgctgggccccggcgacgaggcccccctggagagaaaggaccccagcgaggacaaggaggacatcgagagcaacctgctgagacccaccggcgtggccctgagaggcgcccacttctgcctgaaggtgttcagagccgaggacctgccccagatggacgacgccgtgatggacaacgtgaagcagatcttcggcttcgagagcaacaagaagaacctggtggaccccttcgtggaggtgagcttcgccggcaagatgctgtgcagcaagatcctggagaagaccgccaacccccagtggaaccagaacatcaccctgcccgccatgttccccagcatgtgcgagaagatgagaatcagaatcatcgactgggacagactgacccacaacgacatcgtggccaccacctacctgagcatgagcaagatcagcgcccccggcggcgagatcgaggtggacgactacctgggcttcctgcccaccttcggcccctgctacatcaacctgtacggcagccccagagagttcaccggcttccccgacccctacaccgagctgaacaccggcaagggcgagggcgtggcctacagaggcagactgctgctgagcctggagaccaagctggtggagcacagcgagcagaaggtggaggacctgcccgccgacgacatcctgagagtggagaagtacctgagaagaagaaagtacagcctgttcgccgccttctacagcgccaccatgctgcaggacgtggacgacgccatccagttcgaggtgagcatcggcaactacggcaacaagttcgacatgacctgcctgcccctggccagcaccacccagtacagcagagccgtgttcgacggctgccactactactacctgccctggggcaacgtgaagcccgtggtggtgctgagcagctactgggaggacatcagccacagaatcgagacccagaaccagctgctgggcatcgccgacagactggaggccggcctggagcaggtgcacctggccctgaaggcccagtgcagcaccgaggacgtggacagcctggtggcccagctgaccgacgagctgatcgccggctgcagccagcccctgggcgacatccacgagacccccagcgccacccacctggaccagtacctgtaccagctgagaacccaccacctgagccagatcaccgaggccgccctggccctgaagctgggccacagcgagctgcccgccgccctggagcaggccgaggactggctgctgagactgagagccctggccgaggagccccagaacagcctgcccgacatcgtgatctggatgctgcagggcgacaagagagtggcctaccagagagtgcccgcccaccaggtgctgttcagcagaagaggcgccaactactgcggcaagaactgcggcaagctgcagaccatcttcctgaagtaccccatggagaaggtgcccggcgccagaatgcccgtgcagatcagagtgaagctgtggttcggcctgagcgtggacgagaaggagttcaaccagttcgccgagggcaagctgagcgtgttcgccgagacctacgagaacgagaccaagctggccctggtgggcaactggggcaccaccggcctgacctaccccaagttcagcgacgtgaccggcaagatcaagctgcccaaggacagcttcagacccagcgccggctggacctgggccggcgactggttcgtgtgccccgagaagaccctgctgcacgacatggacgccggccacctgagcttcgtggaggaggtgttcgagaaccagaccagactgcccggcggccagtggatctacatgagcgacaactacaccgacgtgaacggcgagaaggtgctgcccaaggacgacatcgagtgccccctgggctggaagtgggaggacgaggagtggagcaccgacctgaacagagccgtggacgagcagggctgggagtacagcatcaccatcccccccgagagaaagcccaagcactgggtgcccgccgagaagatgtactacacccacagaagaagaagatgggtgagactgagaagaagagacctgagccagatggaggccctgaagagacacagacaggccgaggccgagggcgagggctgggagtacgccagcctgttcggctggaagttccacctggagtacagaaagaccgacgccttcagaagaagaagatggagaagaagaatggagcccctggagaagaccggccccgccgccgtgttcgccctggagggcgccctgggcggcgtgatggacgacaagagcgaggacagcatgagcgtgagcaccctgagcttcggcgtgaacagacccaccatcagctgcatcttcgactacggcaacagataccacctgagatgctacatgtaccaggccagagacctggccgccatggacaaggacagcttcagcgacccctacgccatcgtgagcttcctgcaccagagccagaagaccgtggtggtgaagaacaccctgaaccccacctgggaccagaccctgatcttctacgagatcgagatcttcggcgagcccgccaccgtggccgagcagccccccagcatcgtggtggagctgtacgaccacgacacctacggcgccgacgagttcatgggcagatgcatctgccagcccagcctggagagaatgcccagactggcctggttccccctgaccagaggcagccagcccagcggcgagctgctggccagcttcgagctgatccagagagagaagcccgccatccaccacatccccggcttcgaggtgcaggagaccagcagaatcctggacgagagcgaggacaccgacctgccctacccccccccccagagagaggccaacatctacatggtgccccagaacatcaagcccgccctgcagagaaccgccatcgagatcctggcctggggcctgagaaacatgaagagctaccagctggccaacatcagcagccccagcctggtggtggagtgcggcggccagaccgtgcagagctgcgtgatcagaaacctgagaaagaaccccaacttcgacatctgcaccctgttcatggaggtgatgctgcccagagaggagctgtactgcccccccatcaccgtgaaggtgatcgacaacagacagttcggcagaagacccgtggtgggccagtgcaccatcagaagcctggagagcttcctgtgcgacccctacagcgccgagagccccagcccccagggcggccccgacgacgtgagcctgctgagccccggcgaggacgtgctgatcgacatcgacgacaaggagcccctgatccccatccaggaggaggagttcatcgactggtggagcaagttcttcgccagcatcggcgagagagagaagtgcggcagctacctggagaaggacttcgacaccctgaaggtgtacgacacccagctggagaacgtggaggccttcgagggcctgagcgacttctgcaacaccttcaagctgtacagaggcaagacccaggaggagaccgaggaccccagcgtgatcggcgagttcaagggcctgttcaagatctaccccctgcccgaggaccccgccatccccatgccccccagacagttccaccagctggccgcccagggcccccaggagtgcctggtgagaatctacatcgtgagagccttcggcctgcagcccaaggaccccaacggcaagtgcgacccctacatcaagatcagcatcggcaagaagagcgtgagcgaccaggacaactacatcccctgcaccctggagcccgtgttcggcaagatgttcgagctgacctgcaccctgcccctggagaaggacctgaagatcaccctgtacgactacgacctgctgagcaaggacgagaagatcggcgagaccgtggtggacctggagaacagactgctgagcaagttcggcgccagatgcggcctgccccagacctactgcgtgagcggccccaaccagtggagagaccagctgagacccagccagctgctgcacctgttctgccagcagcacagagtgaaggcccccgtgtacagaaccgacagagtgatgttccaggacaaggagtacagcatcgaggagatcgaggccggcagaatccccaacccccacctgggccccgtggaggagagactggccctgcacgtgctgcagcagcagggcctggtgcccgagcacgtggagagcagacccctgtacagccccctgcagcccgacatcgagcagggcaagctgcagatgtgggtggacctgttccccaaggccctgggcagacccggcccccccttcaacatcacccccagaagagccagaagattcttcctgagatgcatcatctggaacaccagagacgtgatcctggacgacctgagcctgaccggcgagaagatgagcgacatctacgtgaagggctggatgatcggcttcgaggagcacaagcagaagaccgacgtgcactacagaagcctgggcggcgagggcaacttcaactggagattcatcttccccttcgactacctgcccgccgagcaggtgtgcaccatcgccaagaaggacgccttctggagactggacaagaccgagagcaagatccccgccagagtggtgttccagatctgggacaacgacaagttcagcttcgacgacttcctgggcagcctgcagctggacctgaacagaatgcccaagcccgccaagaccgccaagaagtgcagcctggaccagctggacgacgccttccaccccgagtggttcgtgagcctgttcgagcagaagaccgtgaagggctggtggccctgcgtggccgaggagggcgagaagaagatcctggccggcaagctggagatgaccctggagatcgtggccgagagcgagcacgaggagagacccgccggccagggcagagacgagcccaacatgaaccccaagctggaggaccccagaagacccgacaccagcttcctgtggttcaccagcccctacaagaccatgaagttcatcctgtggagaagattcagatgggccatcatcctgttcatcatcctgttcatcctgctgctgttcctggccatcttcatctacgccttccccaactacgccgccatgaagctggtgaagcccttcagctag

SEQ ID NO: 48981 - DNA, 6294 bp, Artificial Sequence
  derived and/or modified sequence
atgctacgagtgttcatcctgtatgctgagaacgtccatacccccgacacagatatttccgatgcctattgttcagctgtgtttgctggggtcaagaaacggacaaaagttattaagaactcggtgaatcccgtctggaacgaggggtttgaatgggacctgaaagggatcccacttgatcagggcagcgaactgcacgtagtcgttaaggatcacgaaactatggggaggaacagattcctgggggaagcaaaagtgcctctgagggaggtgctcgctaccccttccctatctgcctcctttaacgccccgctgttggataccaagaagcagccaacaggagcctcccttgtgcttcaggtgagctacaccccattgcccggcgctgtcccactgttccctcctcctaccccattggagccatctccaactctgccggatctggacgtggtggcagggggcggacagtccagggccgagacttggtccctgctgagtgattccaccatggacactcgatacagtggcaagaaatggcccgcccctacggacaccggtggggaagaggacacagaagatcagggattaacgggggatgaggcggaaccctttcttgaccagagcggtggccccggtgcaccgacaaccccaaggaagttgccgtcaaggccccctccgcattatcccggtattaagaggaagaggagcgcacccacctcccgtaagctcctttctgataagccacaggatttccaaattagggtccaggtgattgaaggtagacagctcccaggtgtgaacattaaacctgtggtgaaggtcaccgcagctggccagacaaaaagaacaaggatccacaaaggaaactctccactgttcaacgaaactctattttttaatctcttcgatagcccaggcgaacttttcgacgagccaattttcattacagtggtggatagccgctcacttagaacggacgcccttctcggagaattcagaatggacgttgggacgatctacagggaacccaggcatgcatacctgcgaaagtggcttttacttagcgacccggatgattttagcgccggcgcaaggggttaccttaagacatctctatgcgtgctggggcccggggacgaggcacctctggagcgcaaagatccatccgaagataaggaagacatagaaagcaatctgctgagacccactggcgtggctctgagaggtgcccatttctgcctgaaggtcttcagagcagaagatctgccccaaatggatgatgctgtgatggacaacgtgaaacagatcttcgggtttgagagcaacaaaaaaaacttggtggaccctttcgtagaagttagcttcgcagggaagatgctctgctccaaaattctggaaaagactgccaacccacagtggaaccagaatattaccctacccgcgatgtttccctcaatgtgtgaaaaaatgagaattagaatcatagactgggataggcttacccacaacgatatcgtggctacgacctacctgtctatgagcaaaatatctgcccctggaggagaaatcgaggtcgacgattatctaggcttcctgccaacgtttgggccctgctatatcaatctgtatggcagcccccgtgaattcactggcttcccggatccctacactgagctaaataccgggaaaggtgagggcgtggcctatagggggaggctcttattgtcgctggagaccaagttggtagagcactccgagcagaaggtcgaagatctgcccgccgacgatatattgcgcgtagaaaaatacttaaggagaagaaaatactcactctttgctgccttctattccgcaaccatgctacaggatgttgatgacgctattcagtttgaagtgtccatcgggaattacggaaataagtttgatatgacatgtctgcccctggcatcaacaacccaatactcccgcgccgtgttcgacggatgccattattactatctcccttgggggaatgtgaagccagtggtggtactaagttcctactgggaggacatttctcaccgcatcgaaacacagaatcagctgctgggcatcgcagacaggctggaggctggactcgaacaggtccaccttgctctgaaagcccagtgctctacagaagatgttgactctctggttgctcagcttacagatgagctgatcgccggttgttcacagcccttgggagacattcacgagaccccttcagcaactcatctagatcaatatctctatcagttacggacacaccatctctctcagatcacggaggctgctttggcgctcaaattaggtcatagcgagctgccagccgcgcttgaacaagccgaagactggctgctgagattaagggccctggccgaggagccacagaactctttgccagacatcgtcatatggatgttacagggggacaaacgtgtagcttaccaacgggtgcccgcccaccaagtgttgttttccagacggggggccaactactgtggcaagaactgcgggaaactgcagacgattttccttaaataccctatggagaaggttcctggcgcccggatgcccgtccagatacgagttaagttgtggtttgggttgtctgtggacgaaaaggagttcaaccagttcgctgagggaaagctgtctgtgttcgcagaaacttacgaaaatgagactaagttggctctcgtgggaaactggggtactacaggactcacctacccgaagttcagcgacgttaccggtaagatcaagctgccaaaagacagcttccgtccctctgccgggtggacatgggctggtgattggttcgtctgccctgagaagactctgctgcacgatatggacgctggccacctctccttcgtcgaagaggtttttgaaaatcagactcgcctccccggcggccagtggatatacatgagtgacaattataccgacgttaatggggaaaaagttctgcccaaagatgatatcgagtgtccattgggttggaagtgggaagacgaagagtggagtactgatcttaacagggcggtggacgaacaaggatgggagtattctatcaccatccctcccgagcgcaagcccaagcattgggtccccgcggaaaagatgtactacacacacaggaggcgtcgttgggtccggttgagacgacgggatctatcacaaatggaagctctgaaacgccacaggcaagcggaggccgagggggaagggtgggaatacgcgtccttatttggctggaagtttcacctggaatatcgcaagactgatgccttccgcagacgcaggtggcggcggcggatggaaccactggaaaagacgggacctgccgccgtgttcgcactagaaggtgctctgggtggcgttatggatgataagtccgaggactcgatgagcgtgagcacccttagttttggcgtgaataggccaacaattagttgcatcttcgactatgggaatcggtaccacttgcggtgctacatgtatcaggcacgagacctcgctgcgatggacaaagactcattttcagatccatacgccatcgtgagctttcttcaccagtcacagaaaaccgtagtggtcaagaatactctgaacccgacatgggaccagaccctcattttttacgaaatcgagatttttggggaacctgccacagtggctgagcagccaccctccatcgtggtagagttgtacgatcacgatacttatggtgccgacgagtttatgggacggtgtatatgtcagcccagtcttgagcggatgccccggctggcatggtttcctcttacgaggggcagccagccatcaggtgagctgcttgcctccttcgagctaatacagcgggagaagccggcaatccaccatataccaggcttcgaagttcaggagacgtcccggatcctggacgagtctgaggataccgatctaccctatcccccaccacagagggaagccaatatctacatggtgccacagaacataaaacccgcccttcagcggacagcgatcgagatccttgcctggggactgaggaacatgaaaagctaccagttagccaatatttcctctccaagccttgtggtggagtgcgggggacaaacagtgcagtcctgcgttattcgtaatttgcgtaaaaatccaaatttcgatatttgtactctgtttatggaagtgatgcttccacgagaggagctgtactgtccaccaatcactgtcaaggtgatcgacaatagacagtttggtcgtcgccctgtagttggacagtgtaccattcggtctctggaaagcttcttgtgtgacccatactcagccgagtcgccttccccccagggcggccctgacgatgtgagtctactgtcaccgggggaggatgtgctaatcgatatagacgacaaggagccactgatcccaatccaagaggaggagtttattgattggtggtcgaagttctttgcatctataggtgaacgtgagaagtgtggctcatacctcgaaaaggatttcgacactctgaaggtctacgacacccagctcgagaatgtggaagcatttgaaggccttagcgatttctgcaacacatttaaactctacaggggaaaaacccaagaggagaccgaggacccctccgtcatcggcgagtttaagggactatttaaaatctacccgttgcctgaagaccccgcaatccccatgcccccacgccagttccaccaactggccgctcaaggcccacaggaatgtctggtaagaatttatatagtgcgagcattcggcctccagcctaaggaccccaacggaaagtgtgacccttatattaagatcagcataggtaaaaagtctgtgtctgaccaggacaactatattccttgtacgctggagcctgtcttcggaaagatgtttgaactgacttgcactcttcctctcgagaaggacctcaagatcaccttgtatgattatgatctgctgagcaaagatgagaaaatcggggagaccgtggtggatttggagaaccggctgctttcaaagtttggcgctcgatgtggcttgcctcagacctattgcgtgtctggacccaatcagtggcgagatcagctcaggccaagccagctcctgcatctgttttgtcagcagcaccgcgtgaaggccccagtctacaggaccgatcgtgtgatgttccaggataaagaatattccattgaagagattgaagctggacggatccctaatccccacttaggccccgtggaggagaggctggctctacacgtgctccaacagcagggactggttcctgaacacgttgagtcccggccactatactccccgctgcagcctgacattgagcaaggaaaattgcaaatgtgggtggatttgttcccaaaggctctgggacgccctggaccgccatttaacataaccccccggagagcccgacgattttttttacgctgcattatctggaataccagagatgtgattctcgatgatctctctttgacaggggaaaaaatgtctgacatatacgtgaaaggctggatgattggatttgaggagcacaaacagaagacggatgtacattacagatctcttggcggcgaaggcaattttaactggaggtttatctttccctttgactacctgcctgccgaacaagtgtgcacaatcgctaagaaggacgcattctggagactggacaaaaccgagtcaaaaattccagccagagtggtgttccagatctgggacaacgataaattttcctttgatgatttcttaggcagcttgcagcttgatctgaatagaatgccaaaacccgccaagactgccaagaagtgcagtctcgatcaactggacgacgccttccatcccgagtggttcgttagcttgtttgaacagaaaacagtcaaaggatggtggccctgcgtggcggaagagggtgaaaaaaagatcctggctggcaaattagaaatgaccctggagatcgttgccgagagcgaacacgaagagcgccctgcagggcagggtagggacgagcccaatatgaatcctaagcttgaggatcccaggcggccagacacctcgttcctgtggttcacgtccccctataaaaccatgaagttcatcttgtggagacgttttagatgggctattatactgttcattattctctttatcttgctgttgttcctggcaatatttatttacgcatttcctaactacgctgccatgaagttagtgaaaccgttctcttag

SEQ ID NO: 48982 - DNA, 6294 bp, Artificial Sequence
  derived and/or modified sequence
atgctgcgggtcttcatcctgtatgcagaaaatgtgcacaccccagacacagacatcagtgatgcctactgcagcgctgtgtttgctggggtgaagaagaggaccaaggtgatcaagaacagcgtgaaccctgtgtggaatgaaggatttgagtgggacctgaagggcatccccctggaccagggcagcgagctgcacgtggtggtgaaggaccacgagaccatgggcaggaaccgcttcctgggggaggccaaggtgcccctgcgggaggtgctggccacccccagcctgagcgccagcttcaatgcccccctgctggacaccaagaagcagcccactggagccagcctggtgctgcaggtgtcctacacccccctgcctggagctgtgcccctcttccccccacccacccccctggagcccagccccaccctgcctgacctggatgtggtggccggcggcggccagagcagagctgagacctggagcctgctgagtgacagcaccatggacacccgctacagcggcaagaagtggccagcccccacagacacaggaggagaggaggacacagaggaccagggcctgactggagatgaagctgagcccttcctggaccagagcggcggccctggggcccccaccacccccaggaagctgcccagccggcccccaccccactacccaggcatcaagaggaagaggtctgcccccaccagcaggaagctgctgagtgacaagccccaggacttccagatccgggtgcaggtgattgagggccggcagctgcccggggtgaacatcaagcctgtggtgaaggtgacagctgctggccagaccaagaggacccgcatccacaagggcaacagccccctcttcaatgagaccctcttcttcaacctgtttgacagccctggagagctgtttgatgagcccatcttcatcaccgtggtggacagccgcagcctgaggacagatgccctgctgggggagttcaggatggatgtgggcaccatctaccgggagcccaggcatgcctacctgaggaagtggctgctgctgagtgaccctgatgacttctctgctggggcccggggctacctgaagaccagcctgtgtgtgctgggccctggagatgaggcccccctggagaggaaggaccccagcgaggacaaggaggacatcgagagcaacctgctgcggcccactggagtggccctgcggggggcccacttctgcctgaaggtgttccgggcagaggacctgccccagatggatgatgctgtgatggacaacgtgaagcagatctttggatttgagagcaacaagaagaacctggtggacccctttgtggaggtgtcctttgctgggaagatgctgtgcagcaagatcctggagaagacagccaacccccagtggaaccagaacatcaccctgcctgccatgttccccagcatgtgtgagaagatgaggatccgcatcatcgactgggaccggctgacccacaatgacatcgtggccaccacctacctgtccatgagcaagatcagcgcccctggaggagaaattgaggtggatgactacctgggcttcctgcccaccttcggcccctgctacatcaacctgtatggcagcccccgggagttcaccggcttcccagacccctacacagagctgaacacaggaaaaggagagggcgtggcctaccggggccgcctgctgctgagcctggagaccaagctggtggagcacagcgagcagaaggtggaggacctgcctgcagatgacatcctgcgggtggagaagtacctgcggcggaggaagtacagcctgtttgctgccttctacagcgccaccatgctgcaggatgtggatgatgccatccagtttgaggtgtccatcggcaactacggcaacaagtttgacatgacctgcctgcccctggccagcaccacccagtacagcagagctgtgtttgatggctgccactactactacctgccctggggcaatgtgaagcctgtggtggtgctgagcagctactgggaggacatcagccacagaattgagacccagaaccagctgctgggcattgctgaccggctggaggccggcctggagcaggtgcacctggccctgaaggcccagtgcagcacagaagatgtggacagcctggtggcccagctgacagatgagctgattgctggctgcagccagcccctgggggacatccacgagaccccatctgccacccacctggaccagtacctgtaccagctgcggacccaccacctgagccagatcacagaagctgccctggccctgaagctgggccacagcgagctgcctgctgccctggagcaggccgaggactggctgctgcggctgcgggccctggccgaggagccccagaacagcctgcctgacatcgtcatctggatgctgcagggcgacaagagggtggcctaccagagggtgcctgcccaccaggtgctcttcagcagaagaggagccaactactgcggcaagaactgtgggaagctgcagaccatcttcctgaagtaccccatggagaaggtgcctggggccaggatgcctgtgcagatccgggtgaagctgtggtttggcctgtctgtggatgagaaggagttcaaccagtttgctgagggcaagctgtctgtgtttgctgagacctatgaaaatgagaccaagctggccctggtgggcaactggggcaccaccggcctgacctaccccaagttcagtgatgtgacaggcaagatcaagctgcccaaggacagcttccggcccagcgctggctggacctgggccggggactggtttgtgtgcccagagaagaccctgctgcatgacatggatgctggccacctgagctttgtggaggaggtgtttgagaaccagacccggctgcccggcggccagtggatctacatgtctgacaactacacagatgtgaatggagagaaggtgctgcccaaggatgacatcgagtgccccctgggctggaagtgggaggatgaggagtggagcacagacctgaacagagctgtggatgagcagggctgggagtacagcatcaccatccccccagagaggaagcccaagcactgggtgcctgctgagaagatgtactacacccacagaagaagacgctgggtgcggctgcggcggcgggacctgagccagatggaggccctgaagaggcaccggcaggccgaggccgagggggagggctgggagtatgccagcctgtttggctggaagttccacctggagtacaggaagacagatgccttcagaagaagacgctggaggaggaggatggagcccctggagaagacaggccctgctgctgtgtttgccctggagggcgccctgggcggcgtgatggatgacaagtctgaggacagcatgtctgtgtccaccctgagctttggagtgaaccggcccaccatcagctgcatctttgattatggcaaccgctaccacctgcgctgctacatgtaccaggcccgggacctggccgccatggacaaggacagcttcagtgacccctatgccatcgtgtccttcctgcaccagagccagaagacagtggtggtgaagaacaccctgaaccccacctgggaccagaccctcatcttctatgaaattgagatctttggagagcccgccaccgtggccgagcagccccccagcatcgtggtggagctgtatgaccatgacacctatggagcagatgagttcatgggccgctgcatctgccagcccagcctggagaggatgccccggctggcctggttccccctgacccggggcagccagcccagcggggagctgctggccagctttgagctgatccagcgggagaagccagccatccaccacatccctggctttgaggtgcaggagaccagccgcatcctggatgaaagtgaggacacagacctgccctaccccccaccccagcgggaggccaacatctacatggtgccccagaacatcaagccagccctgcagaggacagccatcgagatcctggcctggggcctgaggaacatgaagagctaccagctggccaacatcagcagccccagcctggtggtggagtgtggcggccagacagtgcagagctgtgtgatccggaacctgaggaagaaccccaactttgacatctgcaccctcttcatggaggtgatgctgccccgggaggagctgtactgcccccccatcaccgtgaaggtgattgacaaccggcagtttggccggcggcctgtggtgggccagtgcaccatccgcagcctggagagcttcctgtgtgacccctacagcgctgagagccccagcccccagggcggcccagatgatgtgtccctgctgagccctggagaagatgtgctgattgatattgatgacaaggagcccctcatccccatccaggaggaggagttcatcgactggtggagcaagttctttgccagcatcggggagcgggagaagtgtggcagctacctggagaaggactttgacaccctgaaggtgtatgacacccagctggagaatgtggaggcctttgagggcctgagtgacttctgcaacaccttcaagctgtaccggggcaagacccaggaggagacagaggaccccagcgtgattggagagttcaagggcctcttcaagatctaccccctgcctgaagatcctgccatccccatgccaccccggcagttccaccagctggccgcccagggcccccaggagtgcctggtgcgcatctacatcgtgcgggccttcggcctgcagcccaaggaccccaatggaaaatgtgacccctacatcaagatcagcatcggcaagaagtctgtgtctgaccaggacaactacatcccctgcaccctggagcctgtgtttgggaagatgtttgagctgacctgcaccctgcccctggagaaggacctgaagatcaccctgtatgactatgacctgctgagcaaggatgagaagatcggggagaccgtggtggacctggagaaccggctgctgagcaagtttggagcccgctgtggcctgccccagacctactgtgtgtctggccccaaccagtggagggaccagctgcggcccagccagctgctgcacctgttctgccagcagcaccgggtgaaggcccctgtgtacagaacagacagagtgatgttccaggacaaggagtacagcattgaggagattgaggccggccgcatccccaacccccacctgggccctgtggaggagcggctggccctgcacgtgctgcagcagcagggcctggtgcctgagcacgtggagagccggcccctgtacagccccctgcagcctgacatcgagcagggcaagctgcagatgtgggtggacctcttccccaaggccctgggccggcccggcccccccttcaacatcaccccaagaagagcccggcgcttcttcctgcgctgcatcatctggaacaccagagatgtgatcctggatgacctgagcctgaccggggagaagatgtctgacatctacgtgaagggctggatgattggatttgaggagcacaagcagaagacagatgtgcactaccgcagcctgggcggggagggcaacttcaactggaggttcatcttcccctttgactacctgcctgctgagcaggtgtgcaccatcgccaagaaggatgccttctggaggctggacaagacagagagcaagatcccagcccgggtggtgttccagatctgggacaatgacaagttctcctttgatgacttcctgggcagcctgcagctggacctgaacaggatgcccaagccagccaagacagccaagaagtgcagcctggaccagctggatgatgccttccaccctgagtggtttgtgtccctgtttgagcagaagacagtgaagggctggtggccctgtgtggccgaggagggggagaagaagatcctggccggcaagctggagatgaccctggagatcgtggccgagagcgagcacgaggagaggcctgctggccagggcagagatgagcccaacatgaaccccaagctggaggacccccggcggccagacaccagcttcctgtggttcaccagcccctacaagaccatgaagttcatcctgtggaggcgcttccgctgggccatcatcctcttcatcatcctcttcatcctgctgctcttcctggccatcttcatctatgccttccccaactatgctgccatgaagctggtgaagcccttctcctag

SEQ ID NO: 48983 - DNA, 6727 bp, Artificial Sequence
  derived and/or modified sequence
gggtggaagatgagcagaagcccctgttctcggaacgccggctgacaagcggggtgagcgcagccggggcggggacccagcctagcccactggagcagccgggggtggcccgttcccctttaagagcaactgctctaagccaggagccagagattcgagccggcctcgcccagccagccctctccagcgaggggacccacaagcggcgcctcggccctcccgacctttccgagccctctttgcgccctgggcgcacggggccctacacgcgccaagcatgctgagggtcttcatcctctatgccgagaacgtccacacacccgacaccgacatcagcgatgcctactgctccgcggtgtttgcaggggtgaagaagagaaccaaagtcatcaagaacagcgtgaaccctgtatggaatgagggatttgaatgggacctcaagggcatccccctggaccagggctctgagcttcatgtggtggtcaaagaccatgagacgatggggaggaacaggttcctgggggaagccaaggtcccactccgagaggtcctcgccacccctagtctgtccgccagcttcaatgcccccctgctggacaccaagaagcagcccacaggggcctcgctggtcctgcaggtgtcctacacaccgctgcctggagctgtgcccctgttcccgccccctactcctctggagccctccccgactctgcctgacctggatgtagtggcaggcgggggacagagccgggccgagacttggtccctgctcagtgacagcaccatggacacgagatactctggaaagaagtggccggcccccacggacacaggaggagaggaagacacagaggaccagggactcactggagatgaggcggagccattcctggatcaaagcggaggcccgggggctcccaccaccccaaggaaactaccttcacgtcctccgccccactaccccgggatcaaaagaaagcgaagtgcgcctacatctagaaagctgctgtcagacaaaccgcaggatttccagatcagggtccaggtgatcgaggggcgccagctgccgggggtgaacatcaagcctgtggtcaaggttaccgctgcagggcagaccaagcggacgcggatccacaagggaaacagcccactcttcaatgagactcttttcttcaacttgtttgactctcctggggagctgtttgatgagcccatctttatcacggtggtagactctcgttctctcaggacagatgctctcctcggggagttccggatggacgtgggcaccatttacagagagccccggcacgcctatctcaggaagtggctgctgctctcagaccctgatgacttctctgctggggccagaggctacctgaaaacaagcctttgtgtgctggggcctggggacgaagcgcctctggagagaaaagacccctctgaagacaaggaggacattgaaagcaacctgctccggcccacaggcgtagccctgcgaggagcccacttctgcctgaaggtcttccgggccgaggacttgccgcagatggacgatgccgtgatggacaacgtgaaacagatctttggcttcgagagtaacaagaagaacttggtggacccctttgtggaggtcagctttgcggggaaaatgctgtgcagcaagatcttggagaagacggccaaccctcagtggaaccagaacatcacactgcctgccatgtttccctccatgtgcgaaaaaatgaggattcgtatcatagactgggaccgcctgactcacaatgacatcgtggctaccacctacctgagtatgtcgaaaatctctgcccctggaggagaaatagaagtggatgactacctgggcttcctccccacttttgggccctgctacatcaacctctatggcagtcccagagagttcacaggcttcccagacccctacacagagctcaacacaggcaagggggaaggtgtggcttatcgtggccggcttctgctctccctggagaccaagctggtggagcacagtgaacagaaggtggaggaccttcctgcggatgacatcctccgggtggagaagtaccttaggaggcgcaagtactccctgtttgcggccttctactcagccaccatgctgcaggatgtggatgatgccatccagtttgaggtcagcatcgggaactacgggaacaagttcgacatgacctgcctgccgctggcctccaccactcagtacagccgtgcagtctttgacgggtgccactactactacctaccctggggtaacgtgaaacctgtggtggtgctgtcatcctactgggaggacatcagccatagaatcgagactcagaaccagctgcttgggattgctgaccggctggaagctggcctggagcaggtccacctggccctgaaggcgcagtgctccacggaggacgtggactcgctggtggctcagctgacggatgagctcatcgcaggctgcagccagcctctgggtgacatccatgagacaccctctgccacccacctggaccagtacctgtaccagctgcgcacccatcacctgagccaaatcactgaggctgccctggccctgaagctcggccacagtgagctccctgcagctctggagcaggcggaggactggctcctgcgtctgcgtgccctggcagaggagccccagaacagcctgccggacatcgtcatctggatgctgcagggagacaagcgtgtggcataccagcgggtgcccgcccaccaagtcctcttctcccggcggggtgccaactactgtggcaagaattgtgggaagctacagacaatctttctgaaatatccgatggagaaggtgcctggcgcccggatgccagtgcagatacgggtcaagctgtggtttgggctctcagtggatgagaaggagttcaaccagtttgctgaggggaagctgtctgtctttgctgaaacctatgagaacgagactaagttggcccttgttgggaactggggcacaacgggcctcacctaccccaagttttctgacgtcacgggcaagatcaagctacccaaggacagcttccgcccctcggccggctggacctgggctggagattggttcgtgtgtccggagaagactctgctccatgacatggacgccggtcacctgagcttcgtggaagaggtgtttgagaaccagacccggcttcccggaggccagtggatctacatgagtgacaactacaccgatgtgaacggggagaaggtgcttcccaaggatgacattgagtgcccactgggctggaagtgggaagatgaggaatggtccacagacctcaaccgggctgtcgatgagcaaggctgggagtatagcatcaccatccccccggagcggaagccgaagcactgggtccctgctgagaagatgtactacacacaccgacggcggcgctgggtgcgcctgcgcaggagggatctcagccaaatggaagcactgaaaaggcacaggcaggcggaggcggagggcgagggctgggagtacgcctctctttttggctggaagttccacctcgagtaccgcaagacagatgccttccgccgccgccgctggcgccgtcgcatggagccactggagaagacggggcctgcagctgtgtttgcccttgagggggccctgggcggcgtgatggatgacaagagtgaagattccatgtccgtctccaccttgagcttcggtgtgaacagacccacgatttcctgcatattcgactatgggaaccgctaccatctacgctgctacatgtaccaggcccgggacctggctgcgatggacaaggactctttttctgatccctatgccatcgtctccttcctgcaccagagccagaagacggtggtggtgaagaacacccttaaccccacctgggaccagacgctcatcttctacgagatcgagatctttggcgagccggccacagttgctgagcaaccgcccagcattgtggtggagctgtacgaccatgacacttatggtgcagacgagtttatgggtcgctgcatctgtcaaccgagtctggaacggatgccacggctggcctggttcccactgacgaggggcagccagccgtcgggggagctgctggcctcttttgagctcatccagagagagaagccggccatccaccatattcctggttttgaggtgcaggagacatcaaggatcctggatgagtctgaggacacagacctgccctacccaccaccccagagggaggccaacatctacatggttcctcagaacatcaagccagcgctccagcgtaccgccatcgagatcctggcatggggcctgcggaacatgaagagttaccagctggccaacatctcctcccccagcctcgtggtagagtgtgggggccagacggtgcagtcctgtgtcatcaggaacctccggaagaaccccaactttgacatctgcaccctcttcatggaagtgatgctgcccagggaggagctctactgcccccccatcaccgtcaaggtcatcgataaccgccagtttggccgccggcctgtggtgggccagtgtaccatccgctccctggagagcttcctgtgtgacccctactcggcggagagtccatccccacagggtggcccagacgatgtgagcctactcagtcctggggaagacgtgctcatcgacattgatgacaaggagcccctcatccccatccaggaggaagagttcatcgattggtggagcaaattctttgcctccataggggagagggaaaagtgcggctcctacctggagaaggattttgacaccctgaaggtctatgacacacagctggagaatgtggaggcctttgagggcctgtctgacttttgtaacaccttcaagctgtaccggggcaagacgcaggaggagacagaagatccatctgtgattggtgaatttaagggcctcttcaaaatttatcccctcccagaagacccagccatccccatgcccccaagacagttccaccagctggccgcccagggaccccaggagtgcttggtccgtatctacattgtccgagcatttggcctgcagcccaaggaccccaatggaaagtgtgatccttacatcaagatctccatagggaagaaatcagtgagtgaccaggataactacatcccctgcacgctggagcccgtatttggaaagatgttcgagctgacctgcactctgcctctggagaaggacctaaagatcactctctatgactatgacctcctctccaaggacgaaaagatcggtgagacggtcgtcgacctggagaacaggctgctgtccaagtttggggctcgctgtggactcccacagacctactgtgtctctggaccgaaccagtggcgggaccagctccgcccctcccagctcctccacctcttctgccagcagcatagagtcaaggcacctgtgtaccggacagaccgtgtaatgtttcaggataaagaatattccattgaagagatagaggctggcaggatcccaaacccacacctgggcccagtggaggagcgtctggctctgcatgtgcttcagcagcagggcctggtcccggagcacgtggagtcacggcccctctacagccccctgcagccagacatcgagcaggggaagctgcagatgtgggtcgacctatttccgaaggccctggggcggcctggacctcccttcaacatcaccccacggagagccagaaggtttttcctgcgttgtattatctggaataccagagatgtgatcctggatgacctgagcctcacgggggagaagatgagcgacatttatgtgaaaggttggatgattggctttgaagaacacaagcaaaagacagacgtgcattatcgttccctgggaggtgaaggcaacttcaactggaggttcattttccccttcgactacctgccagctgagcaagtctgtaccattgccaagaaggatgccttctggaggctggacaagactgagagcaaaatcccagcacgagtggtgttccagatctgggacaatgacaagttctcctttgatgattttctgggctccctgcagctcgatctcaaccgcatgcccaagccagccaagacagccaagaagtgctccttggaccagctggatgatgctttccacccagaatggtttgtgtccctttttgagcagaaaacagtgaagggctggtggccctgtgtagcagaagagggtgagaagaaaatactggcgggcaagctggaaatgaccttggagattgtagcagagagtgagcatgaggagcggcctgctggccagggccgggatgagcccaacatgaaccctaagcttgaggacccaaggcgccccgacacctccttcctgtggtttacctccccatacaagaccatgaagttcatcctgtggcggcgtttccggtgggccatcatcctcttcatcatcctcttcatcctgctgctgttcctggccatcttcatctacgccttcccgaactatgctgccatgaagctggtgaagcccttcagctgaggactctcctgccctgtagaaggggccgtggggtcccctccagcatgggactggcctgcctcctccgcccagctcggcgagctcctccagacctcctaggcctgattgtcctgccagggtgggcagacagacagatggaccggcccacactcccag

SEQ ID NO: 48984 - DNA, 6294 bp, Artificial Sequence
  derived and/or modified sequence
atgctgcgggtgttcatcctgtacgccgagaacgtgcacacccccgacacggacatctccgacgcctattgtagcgccgtctttgccggtgtgaagaagcggactaaggtaattaagaactcagtcaatccagtgtggaacgaagggtttgagtgggacctgaagggaattcccttggaccaggggtctgagctgcacgtggtcgtcaaggatcatgagaccatgggtagaaatcgatttttgggcgaagccaaggtgccactccgggaggtgctggcaactcccagcctgtcagctagcttcaacgcacccctattagacaccaagaagcagcctaccggcgccagtctcgtgcttcaggtctcttatacacccttgcccggggcggtgcctctgtttccccctcctacacctctggaaccatctccaaccctgccagatcttgatgtcgttgccggcggcggccaatctagggcggaaacgtggtcgctcctctccgacagcacaatggatacgcggtattccggcaaaaagtggcctgcccccacagataccggaggggaggaggataccgaagaccaaggattaacaggggacgaggctgaaccatttttggatcagtcaggcggccccggggcccccaccactcctcgaaagctgcccagccggccccctccccactaccccgggatcaaacgcaagcgcagcgcaccgacctcaagaaagttgctgtcggataagccacaggacttccagataagagtgcaggtaatcgaagggaggcagctgcctggcgttaacatcaagccggtggtaaaggtcacagctgctgggcaaactaagcgcacgagaatccacaaaggaaacagccctctgttcaacgaaacccttttctttaaccttttcgacagtcccggcgaactgtttgacgagccaatcttcattacggttgtggactccagatccttgcgcaccgacgcattgcttggcgagttccgcatggatgtggggactatataccgagagccaaggcatgcctatctccgtaagtggctcctgttatccgaccctgacgattttagcgccggcgccagaggttaccttaaaacttcactgtgtgtactgggacctggtgacgaagctccgctggaaagaaaggatccctccgaggataaagaagacattgagtccaatctcttacgtccaacaggcgttgctctgcggggagcacacttctgtctaaaggttttcagagctgaggatctgcctcagatggatgacgccgtgatggataatgttaagcagatcttcggttttgagagcaacaaaaagaaccttgtagaccctttcgtggaagtgagcttcgcgggcaaaatgctctgcagcaaaattctcgaaaagacggccaacccccaatggaaccagaatattacactaccagccatgttcccgtcaatgtgtgagaaaatgcggattcgaatcattgactgggaccgactcactcataatgacattgtggccactacctacttgagtatgtctaagatctctgcccctggaggcgagatagaggttgatgattacttgggcttcctgccaacgtttggcccttgttatattaacctgtacgggtcacccagggagtttaccggcttcccagatccctacacggagttgaacaccgggaaaggggagggtgttgcatatagaggaaggcttctgctatctttggagaccaaactggtagaacatagcgaacaaaaagtcgaggacctccccgctgatgacatcctgagggtcgaaaagtatctgaggaggcgaaagtattccctcttcgcagctttttattctgccaccatgctccaggatgttgatgacgcgatccagtttgaagtctcaattggcaattacggaaacaagtttgatatgacttgcttgccccttgcttcgacgacgcagtattcgagggccgtgttcgatggctgtcattattactacctgccatgggggaacgtgaagcctgtcgtggtattatcctcttactgggaagatatctcccataggatcgagactcagaatcagctacttgggattgccgaccggcttgaggccggactggagcaggtgcacctagccctgaaagcccagtgcagcacagaggacgtggattccttggtagcccaactaacagacgagttaatcgcgggctgctctcagcctctcggggacattcacgagactcctagtgcgacccatctggaccaatacctgtatcaactgcgtacccaccacctttcgcagattaccgaggcagcgctggccctcaagctgggccactcggagctaccagcagccctggagcaagcggaagactggcttctgcgccttagggccctggccgaggaaccgcagaattcactgcccgatattgtgatttggatgctccagggcgataaacgggttgcgtaccagcgggtgccagctcatcaagtgctgttcagtcgccggggagctaactattgtggtaagaactgcgggaagctccagactatttttctcaaatatcctatggaaaaagtcccgggagcaaggatgccggtgcagatcagagtgaagctttggttcgggctgtcggtggacgagaaagaatttaaccagtttgcagaaggaaagctgagcgtcttcgctgaaacatacgaaaacgaaacgaaactggccctggtcgggaattggggaaccacaggactcacgtaccctaaattttccgatgtgaccgggaaaattaagctgcccaaggactccttccgcccttctgctggctggacttgggcaggagattggttcgtctgccctgaaaaaacactcttgcacgacatggatgcaggtcacttatcattcgtggaggaagtgttcgagaaccagacaagactcccgggaggacaatggatatacatgtcagacaactacaccgacgtgaatggcgagaaagtccttcccaaagatgacattgagtgccctctcggatggaaatgggaggatgaggagtggtcaactgacttgaaccgcgcagtagacgaacagggctgggaatactccattacaattccacctgagagaaagccgaaacactgggtgcctgccgagaaaatgtactatacccaccgaaggagacgctgggttaggctgaggcggcgcgatctgagtcagatggaggccctcaaacgccacaggcaggccgaagctgagggggaaggttgggagtatgctagtctgttcggatggaaatttcatttggagtacaggaaaaccgatgcatttcggagacgccggtggcgccgccgaatggagcctctggagaagaccgggcccgctgctgtatttgccctggaaggcgctctcggtggagttatggacgacaagtccgaagactcaatgtcagtgtcgacactgagttttggcgttaacagacctacaattagctgcatttttgactacggtaatagatatcatctcagatgttacatgtaccaggccagagatcttgcagcaatggataaagattccttttcagatccttatgctattgtgagtttcctccaccaatctcagaaaactgtcgtcgtcaaaaataccctaaacccaacttgggaccagacactgatcttctatgagatcgaaatttttggggaaccagcgaccgttgctgaacaaccaccatcaatcgtggtagagctgtatgatcacgacacatatggtgctgacgaattcatggggcggtgtatatgtcaacccagcctagagcgaatgcctaggctggcgtggttccccttaactcgggggtcgcagccttctggggagctgctggccagtttcgaactgatccagcgggaaaagcctgcaattcatcatatccccgggttcgaggtgcaggaaacgtctcgaattctggacgaatcggaggacacggatctcccataccctccgcctcaaagagaagcaaacatctatatggtaccccagaacatcaagcccgccctccagcgaacggcaattgagatcctggcctgggggctgagaaacatgaaatcttatcagctggcaaacattagcagtcctagcctcgtggtggagtgtgggggacagaccgttcagagttgcgtgatccgcaacctgagaaaaaacccgaattttgacatatgcactctgtttatggaggtgatgctgccaagagaggagctctactgtccgcctatcaccgtgaaagtgattgacaatcggcagttcggacgcagacccgtggtaggccagtgcacaatcaggtcactggaatccttcctctgtgatccatacagcgccgaatccccttctccccagggaggtcccgacgatgtttctttacttagtccaggagaagatgtgcttattgatatcgatgacaaggaacccctgatcccaatacaggaagaggagtttatagattggtggtccaaattcttcgcctctatcggcgagcgcgagaagtgcggatcatacttagaaaaggacttcgatacattgaaagtttacgacactcagttagagaacgttgaagcctttgaggggctctcagatttttgtaatactttcaaactataccggggcaaaactcaggaagaaactgaggatccctctgtgattggtgaatttaaaggtctcttcaaaatttacccgctgcctgaagatcccgccatcccaatgccccccagacagtttcaccagcttgccgcacagggcccccaggagtgtctggtccgcatctatattgtgagagcatttgggttacaacccaaagatccgaatggaaaatgtgacccctacatcaagattagcatcggaaaaaaaagcgttagtgatcaagacaactacattccctgcactctcgagcccgtgtttgggaagatgttcgaacttacctgcaccctgccactcgaaaaagacttaaagatcacactttatgactacgacctactcagtaaggatgagaaaatcggggaaaccgtggtggatttggagaaccgcctccttagtaaattcggagcgcgctgcgggcttccacagacatactgcgtttcaggccccaaccagtggcgagatcagcttaggccgtcccaacttctgcacctcttttgccagcagcaccgggtgaaagctcccgtgtatcgtacagaccgcgttatgttccaggataaagagtacagtatagaagaaattgaggcaggtaggatccctaacccacacctgggacccgtggaagagcggttggccttgcacgttttgcagcagcagggactggtccccgagcacgtcgagtccagaccactatactccccactacagcctgatatagaacaaggcaagctgcagatgtgggtcgacctgttcccaaaagctctgggccgccctggcccaccatttaacataactccaagacgtgcaagacggttcttcttacgctgtattatatggaacaccagagacgtcatactcgacgatttgagcctcaccggggaaaagatgagcgacatttatgttaagggatggatgatcggattcgaggaacacaaacagaaaaccgatgtgcactaccgctccttggggggggaggggaattttaactggcggtttatcttcccatttgactatctacctgcagaacaggtgtgcacaatcgcgaaaaaagacgctttttggcggctcgataaaacagaaagtaagattcccgcgagggtggtcttccagatttgggacaatgacaaattcagctttgatgatttcctggggtcccttcagctggaccttaataggatgccaaagccagctaagaccgcaaaaaagtgttcactggaccagcttgatgacgccttccatcccgaatggtttgtgagcctgttcgaacagaaaacggtgaagggatggtggccctgcgtggcagaggaaggcgagaagaaaatcctagcaggtaaacttgagatgactctcgagatcgtcgcagagagtgagcacgaggagagacccgccggtcagggtagggacgagcccaatatgaatccaaagctggaggatccccgcagacctgacacttcctttctatggtttaccagtccttataagactatgaaattcattctgtggaggcgcttcagatgggctattatcttgtttataatactgtttatactgctgctgtttctggcaattttcatttacgccttcccaaactatgccgccatgaagcttgtaaaacccttcagctag

SEQ ID NO: 48985 - DNA, 6294 bp, Artificial Sequence
  derived and/or modified sequence
atgcttcgggtctttatcctatatgccgaaaacgtccacacccctgataccgatatctctgacgcctactgcagtgcggtgttcgccggagtcaagaagcggacaaaagtgatcaagaatagtgttaatcctgtttggaatgagggttttgagtgggatcttaaagggattccactcgatcaaggctcagagctgcatgtggttgtaaaggatcacgaaactatggggcgaaatcggttcctgggagaagccaaggttcctctgcgcgaagtgttagcaacaccctccctgagcgcatccttcaacgcccctctcctagatacaaagaaacagcccaccggcgcttccttagtcttgcaggtttcctatactccactccctggcgcagtgccactcttccccccaccgacacctctggagccatcacctaccttgcctgacctggatgtggtcgccggtggagggcagagccgcgctgagacatggtctctgttgtcagactccactatggataccagatatagcggtaagaagtggcctgctcctacagacaccgggggagaggaggacacagaggatcaagggttaacaggagacgaggccgagccctttctagatcaaagtggcggacccggtgcacccaccacaccaagaaaactgccctccagacctccaccccattatccgggaatcaagcgtaagaggagcgcccctacaagtcgcaagcttctgagcgataagccacaagattttcagattcgggtgcaggtgatcgagggtaggcagctcccaggtgtgaatatcaagcccgtggtcaaagtgacagcagctggccaaactaaaagaaccaggatccacaagggcaattcgccgctcttcaacgaaaccctctttttcaatctctttgactcgccaggggaactgtttgacgaaccaattttcatcactgtggtagactcgagaagcttacgcacggacgctctgcttggtgagttcaggatggatgtgggtaccatctaccgcgagcccagacatgcctatttgcgcaagtggctgcttctctccgatcccgacgattttagcgccggagctcgaggctacttaaagacctctttgtgcgtgttaggacctggcgacgaagctccactcgagaggaaggacccctctgaggataaagaggacattgaatctaacttgctgcgccctaccggagtcgccctcagaggtgcacatttttgtcttaaggtcttccgcgctgaggacttgccacagatggacgacgctgtgatggacaacgtgaagcagatctttggcttcgaaagcaacaaaaaaaatctggtggaccctttcgtagaagtgtccttcgcaggaaagatgttgtgtagcaaaattcttgagaaaaccgcaaaccctcagtggaaccagaatatcaccctgccagctatgtttccctcaatgtgtgaaaagatgcgaatccgcattatcgattgggacaggctgactcataatgatatcgttgcgaccacctatctgtccatgtcaaaaatttcagccccaggcggagaaattgaagtcgacgattacttgggatttctccccactttcgggccttgttatataaacctgtatgggtctccgagagagttcacgggctttccagacccatacaccgagctgaatacagggaaaggtgagggggttgcataccggggacggctccttctcagcctggaaacaaaactcgttgagcactctgaacaaaaagtggaggaccttcctgccgacgatatcttgagagtcgagaaatacctccgtcgtcgcaagtatagcctttttgccgctttttactcagcaaccatgcttcaagatgtggatgatgccattcagtttgaggtgtccataggcaactatggtaataaatttgacatgacttgtctgccgttagcgagcaccacccaatacagccgcgctgttttcgatggctgccactattactatttgccatgggggaacgtcaaacccgtggtggtattaagctcttactgggaggacatcagtcatcggatagagactcagaatcaactcctgggaatcgccgacaggctggaagccggactcgaacaggtccacctcgctctgaaagcccagtgctccacggaggatgtggattcgctggtggcccaactgacggacgaattaattgcaggatgctcccagcccctgggagacatccacgagaccccttccgcgacccacctggaccagtatctgtatcagctgagaacccaccacctttctcaaatcactgaggctgccttggctcttaagctggggcattctgagctccccgctgctttggagcaagccgaggactggcttttacggctccgtgctctcgccgaagagccacagaattcgctgccagatatcgttatctggatgcttcaaggagataaacgcgtggcttaccaacgcgtgcccgctcaccaggtcctgttctcgagacggggagctaactattgtggcaagaactgtggcaagctgcaaaccatctttctgaagtacccaatggagaaggtgcccggagctagaatgccagtccagattagagtcaaattgtggtttgggctgtctgtggacgagaaagaatttaaccaattcgcggagggcaaattaagcgtgttcgctgaaacctatgagaacgagacgaagctagcattagtcgggaactggggtacaacaggcctgacgtacccaaaattctccgacgttactggcaaaataaagctgccgaaggactcatttagaccttcggccggttggacctgggcaggggattggtttgtgtgcccagaaaagacactcctacatgacatggatgcaggccacctgtcttttgtggaggaggtttttgaaaaccagactaggctgcctggtgggcagtggatctacatgagtgataactatactgatgtcaatggcgaaaaggtcctcccgaaggacgacatcgaatgcccgctcgggtggaaatgggaggatgaagagtggtctacagatttgaatagggctgtggacgaacagggttgggagtacagtatcacaattcctcctgaaaggaagccaaaacactgggtgcccgctgagaagatgtattacacacaccgcaggaggaggtgggtgagattgcggcgacgggacttgtcacagatggaggctcttaaacgccaccgccaagcggaagctgagggagagggttgggagtacgcctccctgtttggttggaagttccaccttgaataccggaaaacggatgcgtttcgtcgccgtaggtggcgacgccgaatggaacccctggaaaaaaccggtcctgccgcagtgttcgcgttggagggcgctctcggtggggtgatggatgacaaaagtgaagattccatgtccgtctctacactttccttcggcgtcaaccgcccaactatctcctgtatattcgactacggcaatcgctaccatctgcggtgttatatgtaccaggcccgagatcttgccgcaatggacaaggatagcttctctgacccctatgccattgtgtcattcctccaccagtctcagaaaacagtggtcgttaagaatacattgaatcctacctgggaccagaccttgatcttttatgaaatagaaattttcggggaaccagctaccgttgcggaacaacccccaagtattgtggtggagctgtatgatcatgatacttacggcgctgatgagttcatgggcagatgtatctgccaacctagcttggagcgcatgcctagactggcttggtttcccttaactaggggaagccagccttcaggggaattgctcgcatcattcgaactgatccaaagagagaagcccgctatccatcacataccagggtttgaggtgcaggagacgtcccggatcctcgatgaatccgaggacacagatctcccctaccctccacctcagcgcgaagctaacatctatatggtcccccagaatattaagcccgcacttcagagaactgcaatagagattctggcgtggggtctgaggaatatgaaatcctaccaactggccaacatcagcagcccaagcctggtggtggagtgcggcggacagaccgtgcagtcctgcgtgattagaaatctgcggaagaaccccaattttgacatatgtaccctgttcatggaagtgatgctcccccgtgaggagctttattgtccgcctatcacagtgaaagtcattgataacaggcagtttggcaggcgcccagtcgttggacaatgtacaatccgcagccttgagtcattcctgtgcgacccatatagcgcagaaagcccttccccccagggcggacccgatgatgtgtcactgctatccccgggagaagacgtgctgatcgatatcgacgataaggagcccctgatacccatacaggaggaggaatttattgactggtggagtaaattcttcgcctctatcggcgagagggagaagtgtggcagttacctcgagaaggattttgacaccctgaaggtgtacgacacacaattggagaacgtcgaggcgtttgaagggctgtcagacttttgcaatacctttaaattataccgtgggaagactcaagaagaaaccgaggatcccagcgtgatcggcgaattcaagggactctttaagatctatcctctgcccgaagatcctgctatccctatgcctccccgtcaatttcaccagctggccgctcagggaccccaagagtgcctggttaggatctacattgtgcgcgcatttggcttacagcctaaagaccccaatgggaaatgtgacccatacatcaaaattagtatcggaaaaaaaagtgtgtccgatcaagacaactacattccctgtaccctggaacccgtatttgggaagatgttcgagctcacctgtactctcccactcgaaaaagacctaaagattactctctacgattacgacctgttgagcaaggatgaaaagatcggcgaaacggtggtggacttagagaaccggctgctcagcaaatttggagcccgatgtggattgccacagacttactgcgtgagcggaccaaatcaatggcgggatcagctgaggccaagtcaactcctccacttattctgccaacaacaccgagttaaggccccagtctacaggactgatcgagtgatgttccaagacaaggaatatagcattgaagagatagaggctgggaggatccccaacccccatctgggaccagttgaggaaaggctggcattacacgtgctccagcagcagggtctggtccctgagcacgtcgagagccgtcccttatatagtccactgcagccagatatagaacaagggaaacttcagatgtgggtggacttattccctaaagccctgggccgacccggaccaccgttcaacataacaccgaggcgcgctagacggttcttcctgcgctgtataatctggaacaccagagacgtgattctagacgacctttctctgactggggagaagatgagtgatatttacgtgaaggggtggatgatcggtttcgaagagcacaaacagaagaccgatgttcactataggagtctcggtggcgaaggaaactttaactggcgctttattttcccttttgactacctgcctgcagaacaggtatgcaccattgccaagaaagacgctttttggaggctcgataagactgagagtaaaatcccagcacgagtggtctttcagatttgggataatgacaaatttagcttcgacgacttcctcgggtccctgcaacttgatttgaacaggatgcctaagccagccaagaccgcaaagaaatgcagtctcgaccaattagatgacgctttccatcccgaatggttcgtgtccctcttcgaacagaagaccgtcaaaggctggtggccttgcgttgccgaagagggcgagaaaaagatactcgcagggaaactggagatgacccttgagattgtagcagagtctgagcacgaggaaagacctgcaggtcagggacgagatgagcctaatatgaatccaaagctagaggaccccagacgtcccgacaccagcttcctgtggtttacctcaccttataaaaccatgaagtttatactgtggcgcagattccggtgggcaataattctcttcattatcctctttatactcttgttatttctcgcaatcttcatatacgcctttcccaactatgccgcaatgaaactggtaaagccgttcagctaa

SEQ ID NO: 48986 - DNA, 6294 bp, Artificial Sequence
  derived and/or modified sequence
atgctaagggtgttcatactatatgccgagaacgtacatactccggacaccgacatctccgatgcctattgctcagcggtttttgctggtgtgaaaaagaggaccaaagtgataaaaaactcagtcaatcctgtgtggaatgagggtttcgagtgggatctcaagggtatacccctggaccagggctccgaactgcatgtggtggtgaaggaccacgaaacaatgggacgaaaccgattcctcggtgaagctaaagtgccccttagagaagtcttggccaccccctctttgagcgcctcattcaacgcccccctgctggacaccaaaaaacagccaacaggagcctccctagtgctgcaggtttcctatacaccattacccggcgccgttcccctatttccccctcctacacccctggagccaagcccgaccctcccagacctcgacgtggtggccggcggaggacagagtagggccgaaacctggagcttgctgagcgactcaaccatggatactcggtactccggcaagaaatggcctgctccgacagacacaggcggtgaagaagataccgaggaccagggcttgactggcgatgaagccgagccctttctggatcagagcggaggacccggggcccctactactcccagaaagctgccttcccgccccccccctcactaccccgggatcaaaaggaaaaggagcgctcccaccagccgtaaactgctgagcgacaagcctcaggatttccagatccgagtgcaggtcatcgaaggaaggcagctgccaggagtcaacattaaacccgttgtgaaagtgacagctgcaggacaaaccaagcgcactaggatccataaagggaattcaccactcttcaacgagacacttttttttaatctgtttgactcacctggcgagctatttgatgagcctatttttataacagtcgtggatagccgaagcttgcggaccgatgctctacttggggaattccgcatggacgtcgggacaatttaccgcgaaccacgtcatgcctatcttagaaaatggttgctgctctctgatccagatgatttctctgccggagctagggggtacttgaagacaagcctctgtgtgcttgggccaggcgacgaggcgcccttagagcgaaaggacccgtcggaagataaagaagatatcgaatctaatctgctgcgcccaactggggtcgccttacgaggggcccacttttgcctgaaggtatttagggctgaggacctacctcagatggacgatgctgtgatggataatgtcaaacagatctttggatttgaaagcaacaaaaagaacctggtggatcctttcgtagaggtttcctttgccggcaagatgctctgctcaaagatattggaaaagacggccaatcctcaatggaaccagaatatcaccctcccagccatgtttccttcaatgtgcgagaaaatgcgaatcaggatcattgattgggatagactaactcacaacgatattgtcgccactacttatctgagcatgtctaagatctccgcgcccgggggagaaattgaagtggacgattatttgggctttctgcccacgttcgggccttgctatatcaatctttacggcagccccagggagttcacaggcttccccgacccttacaccgagctcaatactggcaagggggagggggtggcgtatcgggggcgcttgcttctgtctttggagactaagctggtggagcatagtgagcagaaagtcgaggacctcccagcggacgatatcctaagagtggaaaagtacctgcggcgacggaaatatagcctgttcgccgcattttacagcgcaacgatgttgcaagacgtggacgatgctatacagtttgaggtttccataggcaattatggaaacaagttcgatatgacctgcttgccattagcatccaccactcagtactcgagggcagtgttcgacgggtgccactattattatctgccatggggaaatgtaaagccagttgtggtcctgagcagttactgggaggacatctcccatcggattgaaacccaaaaccagctcttaggcattgccgacaggttagaagccggtctggaacaggtgcacctggctctgaaagcccagtgtagtacagaggatgtggattccctggtagcccagctgactgacgagcttattgccggttgcagccaacccctcggtgacattcatgagactccatccgcgactcatctggaccaatatttgtaccagctcaggactcaccatctctcgcaaatcaccgaagcagccttggccttgaagttgggccactcagaattaccagcagcacttgaacaggccgaggattggcttctccgtctcagggctctcgccgaggagcctcaaaacagccttcctgacattgtgatctggatgctgcagggcgataagagggtcgcctatcaaagagttccagcgcaccaagttctgttttctcgccgaggtgctaactattgcggcaagaattgcggaaagttacaaactatattcctcaagtatcctatggaaaaggttcccggcgcaagaatgccagtccagattcgggtgaagctttggttcgggctgtccgtagatgaaaaggaattcaaccaattcgctgaaggtaagctgtccgtttttgctgagacatacgaaaacgagacaaaactggcactcgtggggaactggggcacaactggactgacctatcccaaattttcggacgtcacaggtaaaattaagcttccaaaggactcctttcgtccttcagcagggtggacctgggcaggagactggttcgtgtgcccagagaaaaccctactacatgacatggatgcgggccacttaagtttcgtcgaagaggtgtttgaaaaccagacgagacttcctggtggccaatggatctacatgtctgacaattacactgatgttaatggcgagaaggtgctgccaaaagacgacattgagtgccctttgggctggaaatgggaggacgaagaatggagcacagacctgaatcgggctgtagatgaacagggatgggaatattccattactataccccccgaaaggaagcctaagcactgggttcctgctgagaaaatgtactacactcatcgcaggagacgctgggtacggttgcgtcgaagagatttatcccaaatggaggcgctcaaacgtcataggcaagcagaggccgagggcgagggctgggaatatgcctccctattcggttggaagttccacctagagtatagaaagaccgacgcatttagacggaggagatggaggcggcgaatggagcccctggaaaaaactgggccggccgccgtcttcgctctggaaggcgctctaggtggggtgatggacgacaaaagtgaggactccatgtcagtatcaaccctgtcctttggagtcaataggcctaccatctcgtgtatctttgattacggaaaccgctatcatctccgctgttacatgtaccaggcgagggacctggcagcgatggataaagatagcttctccgacccttacgcaatagtgtccttcctgcaccagtctcagaaaaccgttgtggtgaaaaataccttgaaccccacctgggaccagacactcatcttttacgaaatagaaatcttcggcgaacctgcaacagtggccgaacagcccccctctatcgtcgtggagctgtacgaccacgatacctatggtgcagatgaattcatgggtcggtgtatctgtcagccctccctcgagagaatgcctcgtttggcttggttcccgctaacgagagggtcacagccaagcggcgaactgctggccagtttcgaattgattcaaagagagaagcccgccatccaccacatcccaggatttgaggtccaggaaactagcagaatcctcgatgaatcagaagacacggatctaccttatcctcccccccagagggaagccaatatatatatggtaccacaaaacatcaaacccgctttgcagcgcacagccattgaaattctcgcttggggcctccgtaacatgaagtcctaccaactcgccaatatttcctctccttccttagtcgtggagtgcggcggccagacagttcagagttgtgtgattcggaacctgcgaaaaaatcccaactttgatatctgcactttgtttatggaagttatgctgcccagagaagaattatattgcccacccatcacagtcaaagtgattgacaaccggcaatttgggcgaaggcccgtggtcggacagtgcacaattcgatctctcgagagtttcttgtgcgatccctacagcgcagaatcaccctcacctcagggcgggccagatgatgtatccttattatctcctggcgaggatgtcctaattgatatagacgataaagaacctctgattcctatccaagaggaggaattcatcgactggtggtcaaagttcttcgcttccatcggggaacgggagaagtgcgggagctatctggaaaaagattttgacactctgaaagtttacgatacccaattggaaaacgttgaagcattcgaaggactgagtgacttttgcaacacctttaagctctaccgaggtaagactcaagaagagaccgaagatcccagcgtgataggcgagttcaaagggttgtttaaaatttaccccctgcctgaggatcccgccatccccatgccaccccgccagtttcaccagctcgctgcccaaggaccgcaggaatgcctggtgagaatctatatcgtgcgcgcttttggacttcagcccaaggatcctaatggcaaatgtgatccttatatcaaaatatccattggtaaaaagtccgtctccgaccaggacaactatatcccatgtactctggaacctgtgtttggtaaaatgttcgaacttacatgcaccctgcctctcgaaaaagacctgaagatcaccctgtacgactatgaccttctatccaaggacgagaaaatcggcgagactgttgttgatcttgaaaatcggctactgtcgaaatttggagctcgctgtggcttaccacagacttattgcgttagtgggcccaaccagtggcgggatcaactacgaccgtcacagcttctccatttgttctgccagcagcatcgagttaaggcccctgtatacagaacagaccgcgtaatgtttcaggacaaagaatattctatcgaagagattgaggcaggtagaattccgaacccacacctcggacccgtggaagagagactggcgctgcacgttctgcaacaacagggcttagtcccagagcacgttgagtctcgaccactgtatagcccactgcagcccgatatagaacaggggaaacttcaaatgtgggtcgacctttttccaaaggctttgggcagaccgggccccccctttaacataactccgcgccgggccaggcgcttttttctgagatgcataatctggaatacacgagacgtgattctagatgatctgtctctgacaggtgagaagatgagtgatatttacgtaaaagggtggatgattgggttcgaggagcacaagcagaagaccgatgtgcactatcgctccttaggtggggagggaaatttcaattggaggtttattttcccctttgattatcttcctgcagagcaggtgtgtacgatagccaaaaaggatgccttttggagactggacaaaacagagtctaaaattccggcaagagttgtgtttcagatatgggacaacgataagttttccttcgacgacttccttggttccttgcagctggacttgaaccgtatgcctaagcctgccaagacagcgaaaaagtgctctctcgatcaactggacgatgccttccaccctgaatggtttgtgagtctgttcgagcagaagactgtgaagggatggtggccatgtgtagcagaagagggggagaaaaaaattctcgctgggaaactggaaatgacacttgaaatcgtagccgaatcagaacatgaggaacgtcccgcgggacaaggcagggatgaaccgaacatgaatcccaagttagaagacccgcgcaggccagatacctcattcctgtggttcacgtctccgtataagacgatgaaattcattctctggaggaggtttagatgggcgattatactgtttattatactgttcatcttgcttctgtttctggcaatcttcatttacgctttccccaattatgcagcgatgaagctggttaagccattctcttag

SEQ ID NO: 48987 - DNA, 6294 bp, Artificial Sequence
  derived and/or modified sequence
atgcttcgggttttcatactttatgccgaaaatgtacatacacccgacactgacatttcggacgcgtactgcagcgccgtgtttgccggagttaagaaaaggaccaaagttataaagaatagtgtgaaccctgtatggaatgagggcttcgaatgggacctcaagggcatcccactggaccagggctcagagctgcacgttgttgttaaggatcacgagactatgggccggaacagatttcttggcgaggccaaagtgccactcagagaggttttagccacaccaagtctatcagcaagctttaatgcccccctgctcgatactaaaaagcaacctacgggagcttccctcgtgttacaggtgagttatacccccctacctggcgctgttcctctctttccaccacctacccccctcgaacccagccctacgctgccagatttggatgtagtagccggaggcgggcaaagtagggcagaaacctggagcctgctaagcgattcgacgatggacacgagatactcaggcaagaaatggcccgcccccaccgatactggaggcgaagaagacacagaggaccagggcctgactggcgatgaagctgaacccttccttgatcagtccggtggcccgggggctcctactacaccacgcaaattacctagcagaccacctccccactatcccggcattaagcgaaaacggtcggcccccacctcccgaaagctgttgagcgataaaccacaggactttcaaattcgagtccaagtaatcgagggccgccagctacccggtgtaaacataaagccagtcgtcaaagtgaccgccgcgggccagacaaagcgcacccgaattcataagggcaattctcccttatttaatgaaactctgttttttaatttgtttgattcccctggtgagcttttcgacgagcccattttcatcactgtcgtggattctagatccctgcgcactgatgctctcctcggcgagtttaggatggacgttgggacgatctatagagaacctcgccatgcatacctaaggaaatggctactcctctcagacccagacgactttagcgcgggcgcacggggttatctgaaaacttcactgtgtgtgttaggacccggtgatgaggcccccctagaacgcaaagatccatccgaggacaaagaagacattgaatctaatctgctcagacctactggagtggctctgcggggcgcccacttctgtctgaaagtgttccgcgcggaagatctaccccagatggacgacgcggtaatggataacgtgaagcagattttcgggttcgagtcaaacaagaagaatttagtggatcctttcgtagaggtgagctttgctgggaagatgctgtgcagcaagatcctggaaaaaacagctaatccacagtggaaccagaatattacactgcctgctatgtttccatcaatgtgtgaaaaaatgagaattagaattatcgattgggacagactaacgcacaacgatatcgtcgcaaccacttatctctcaatgtctaagattagcgcgccaggaggagagatcgaagtggatgactatcttggcttcctacccacattcggaccatgctacatcaatctatacggatctcccagggaattcacaggttttcctgatccatacacagaactcaacaccggtaaaggcgaaggcgtcgcttacagaggtcgtcttctcctgagcttggagaccaaactcgtagagcacagtgaacaaaaagtggaggacctgcctgccgatgacattttacgagttgagaagtacctccggcgccgaaagtactccttgtttgccgccttttactcagccactatgctacaagatgtcgatgatgcaattcaatttgaagtgagcatcggaaattatggtaataagtttgatatgacatgcctccctctagccagtaccacgcagtattcacgcgcagtgtttgatgggtgtcactattactatcttccctggggaaatgtcaagccagtggtagttctgtcatcatattgggaagatatctcccacagaattgagacccaaaaccagctccttggcatcgctgataggctcgaagctggcctcgaacaggtccatctcgctctgaaggcccagtgttcgactgaggatgttgattctttggtggctcaacttaccgatgagctgattgctgggtgttcgcagccactcggcgatatccacgagaccccatcagctactcatctcgatcagtacctctatcagctcaggactcaccatctttcccaaataactgaggctgccctggcacttaagctcggacactcagaattacctgcagcccttgaacaagccgaggattggttgcttagattgcgggctctcgctgaagaacctcaaaactctcttccggacatcgtcatttggatgctgcaaggggataagcgagtggcctatcagcgtgtaccagcccatcaagtactcttttcaagacgaggagccaactactgtgggaagaattgcggcaaactccagactatcttcctcaagtatcctatggaaaaggtccctggtgcgaggatgcccgtccagatccgcgtgaaactttggttcgggctcagcgttgacgaaaaggagtttaatcaattcgccgagggaaagctatctgtcttcgcagaaacgtatgagaatgagactaagctcgcactggtcgggaactggggcacgaccggcttaacatacccaaagttcagtgacgttactggcaagataaagctgccaaaggattcatttaggcccagcgctggttggacatgggccggggattggtttgtgtgcccagaaaaaacactgcttcatgacatggacgctggacatttatcatttgtcgaggaggtgttcgaaaatcaaacaagattacctggcggccagtggatctacatgtccgataattatacagatgtcaatggagaaaaagttctgcccaaagacgacatcgaatgtccactgggctggaaatgggaggacgaagaatggagcaccgatctaaacagagcagtcgacgagcaaggatgggaatattcgataactattcctccggaacgtaagccgaagcactgggtgccagccgagaaaatgtattacacccatcgcagaagacgttgggtgcgcctgagacgccgcgatcttagtcagatggaggcattaaaaagacaccggcaggcagaagctgagggtgaaggatgggaatatgccagcttatttggatggaagttccacttggaatatcgaaagaccgacgccttcaggagacgccggtggagacggcggatggagcccctggagaaaacaggtccagctgcggtattcgctcttgagggtgcattaggcggagttatggatgacaagagtgaagatagtatgtcagtgagtactttaagcttcggcgttaaccgccctacaatctcctgcatattcgactacggtaatcggtatcaccttcgctgctatatgtaccaggctcgggaccttgctgccatggacaaagatagcttttccgatccttatgccatcgtctcgttcctacaccagagtcaaaagactgtcgttgtgaagaatacattgaacccaacttgggaccagaccctgatattctatgagattgagatcttcggtgagcccgccaccgtagcagaacaacctcctagcatagtcgtggaattgtatgatcacgatacctatggagcagacgagtttatgggaaggtgcatatgccagccatccttggaacgtatgccacgattagcctggtttcctctgactcgcgggtcccaaccttccggggagcttttggcctcctttgaattaattcagcgcgagaagcccgccatccatcatatacccggcttcgaagtacaagaaaccagtagaatcctcgacgagtccgaggacactgacttgccttacccacccccccagcgggaggccaacatttacatggttcctcaaaacattaagccagccttacaaagaaccgcgatcgagattctcgcctggggtctcagaaatatgaagtcctaccaacttgccaacatttcttccccatcgctcgtagtagaatgcgggggccagaccgtccaatcgtgtgtgattcgaaatctgagaaagaatcctaacttcgatatatgcacattgttcatggaagttatgctcccccgggaagagctatattgcccacctattaccgtaaaggtaatagataatcgtcagtttggaagaaggcctgtggtaggtcagtgtacaatccggagcctcgagtcttttctttgtgatccatacagcgcagagtcaccatcacctcagggagggcccgacgacgtttccctcttgtccccaggcgaagacgtgctgattgatatcgatgataaggagcctctcatcccaatccaagaggaggaattcatagactggtggtcaaaatttttcgcttccattggagaacgcgagaaatgcggatcctacctcgaaaaggacttcgataccctaaaagtatacgacacccaacttgaaaatgtggaggctttcgaaggcctctcagacttctgcaatacatttaaattgtatcgcggaaaaacccaggaggagacagaagacccaagcgtgattggggaattcaagggcctttttaagatttatccacttcccgaggaccctgccatccctatgcccccacgtcagttccaccaactcgctgcccaaggtccccaggaatgtctagtacgcatatatatcgttagagccttcggtctgcagcctaaagatccaaacggcaaatgtgacccctacataaagataagcatcggtaaaaaatcagtgtctgaccaagataattatatcccctgtaccttagagcccgtctttggcaagatgtttgagctgacatgcacactaccactcgaaaaggatttgaagatcaccttgtacgattacgacctgttgtcaaaggatgagaagattggcgagacagtggtggatcttgagaaccggttactttccaagttcggtgcacgttgtggtctgccccaaacttattgcgtctctggacctaatcagtggagagaccagctccggccctctcagttgctgcacctattttgtcagcagcatcgcgttaaagcgccagtgtatagaaccgaccgagtgatgttccaggacaaggagtattctattgaagaaatcgaggccggcagaatccctaatccacacctgggccctgtggaagagcggcttgccttacacgttctccagcagcaaggtctcgttccagaacacgttgagtctcggcccctttacagcccattgcagcccgatattgagcagggaaagctccagatgtgggttgatctctttcccaaagcgctaggcaggcccggtcccccttttaatattactcctagacgcgcacgcagatttttcctaagatgtataatctggaatacacgggatgttatcctcgacgacctgagtcttacaggtgaaaagatgtctgacatatacgtgaaaggatggatgattggatttgaagaacataagcagaagaccgacgtgcattatagaagtttgggtggcgaaggcaattttaactggcgcttcatctttcctttcgactatctgcccgccgaacaggtgtgtactatcgcaaagaaagatgcattctggcgccttgacaagactgaatccaaaattcccgcaagagtggttttccaaatttgggataatgacaagttttcctttgatgatttcctgggaagtctccagctagacctgaacaggatgcctaaacccgccaaaactgccaaaaaatgttctttagaccagctggacgatgcctttcaccctgaatggttcgtttcattatttgagcaaaagaccgtgaagggttggtggccatgtgtagccgaagaaggcgagaagaagattttagccgggaaactggaaatgacattggaaatagtggcagagagcgaacacgaagaacggccagcagggcagggtcgggacgagcccaatatgaaccctaaattggaagaccctaggagacctgatacgtcctttttgtggtttacaagtccatacaagacaatgaaatttattctctggcgtcggttccgatgggcaataattctgtttatcatactttttatcctcctcttattcctcgccatctttatttacgcctttccaaactacgcagccatgaagttagttaaacccttctcttag

SEQ ID NO: 48988 - RNA, 6294 nt, Artificial Sequence
  derived and/or modified sequence
augcuaaggguguucauacuauaugccgagaacguacauacuccggacaccgacaucuccgaugccuauugcucagcgguuuuugcuggugugaaaaagaggaccaaagugauaaaaaacucagucaauccuguguggaaugaggguuucgagugggaucucaaggguauaccccuggaccagggcuccgaacugcaugugguggugaaggaccacgaaacaaugggacgaaaccgauuccucggugaagcuaaagugccccuuagagaagucuuggccacccccucuuugagcgccucauucaacgccccccugcuggacaccaaaaaacagccaacaggagccucccuagugcugcagguuuccuauacaccauuacccggcgccguuccccuauuucccccuccuacaccccuggagccaagcccgacccucccagaccucgacgugguggccggcggaggacagaguagggccgaaaccuggagcuugcugagcgacucaaccauggauacucgguacuccggcaagaaauggccugcuccgacagacacaggcggugaagaagauaccgaggaccagggcuugacuggcgaugaagccgagcccuuucuggaucagagcggaggacccggggccccuacuacucccagaaagcugccuucccgcccccccccucacuaccccgggaucaaaaggaaaaggagcgcucccaccagccguaaacugcugagcgacaagccucaggauuuccagauccgagugcaggucaucgaaggaaggcagcugccaggagucaacauuaaacccguugugaaagugacagcugcaggacaaaccaagcgcacuaggauccauaaagggaauucaccacucuucaacgagacacuuuuuuuuaaucuguuugacucaccuggcgagcuauuugaugagccuauuuuuauaacagucguggauagccgaagcuugcggaccgaugcucuacuuggggaauuccgcauggacgucgggacaauuuaccgcgaaccacgucaugccuaucuuagaaaaugguugcugcucucugauccagaugauuucucugccggagcuaggggguacuugaagacaagccucugugugcuugggccaggcgacgaggcgcccuuagagcgaaaggacccgucggaagauaaagaagauaucgaaucuaaucugcugcgcccaacuggggucgccuuacgaggggcccacuuuugccugaagguauuuagggcugaggaccuaccucagauggacgaugcugugauggauaaugucaaacagaucuuuggauuugaaagcaacaaaaagaaccugguggauccuuucguagagguuuccuuugccggcaagaugcucugcucaaagauauuggaaaagacggccaauccucaauggaaccagaauaucacccucccagccauguuuccuucaaugugcgagaaaaugcgaaucaggaucauugauugggauagacuaacucacaacgauauugucgccacuacuuaucugagcaugucuaagaucuccgcgcccgggggagaaauugaaguggacgauuauuugggcuuucugcccacguucgggccuugcuauaucaaucuuuacggcagccccagggaguucacaggcuuccccgacccuuacaccgagcucaauacuggcaagggggaggggguggcguaucgggggcgcuugcuucugucuuuggagacuaagcugguggagcauagugagcagaaagucgaggaccucccagcggacgauauccuaagaguggaaaaguaccugcggcgacggaaauauagccuguucgccgcauuuuacagcgcaacgauguugcaagacguggacgaugcuauacaguuugagguuuccauaggcaauuauggaaacaaguucgauaugaccugcuugccauuagcauccaccacucaguacucgagggcaguguucgacgggugccacuauuauuaucugccauggggaaauguaaagccaguugugguccugagcaguuacugggaggacaucucccaucggauugaaacccaaaaccagcucuuaggcauugccgacagguuagaagccggucuggaacaggugcaccuggcucugaaagcccaguguaguacagaggauguggauucccugguagcccagcugacugacgagcuuauugccgguugcagccaaccccucggugacauucaugagacuccauccgcgacucaucuggaccaauauuuguaccagcucaggacucaccaucucucgcaaaucaccgaagcagccuuggccuugaaguugggccacucagaauuaccagcagcacuugaacaggccgaggauuggcuucuccgucucagggcucucgccgaggagccucaaaacagccuuccugacauugugaucuggaugcugcagggcgauaagagggucgccuaucaaagaguuccagcgcaccaaguucuguuuucucgccgaggugcuaacuauugcggcaagaauugcggaaaguuacaaacuauauuccucaaguauccuauggaaaagguucccggcgcaagaaugccaguccagauucgggugaagcuuugguucgggcuguccguagaugaaaaggaauucaaccaauucgcugaagguaagcuguccguuuuugcugagacauacgaaaacgagacaaaacuggcacucguggggaacuggggcacaacuggacugaccuaucccaaauuuucggacgucacagguaaaauuaagcuuccaaaggacuccuuucguccuucagcaggguggaccugggcaggagacugguucgugugcccagagaaaacccuacuacaugacauggaugcgggccacuuaaguuucgucgaagagguguuugaaaaccagacgagacuuccugguggccaauggaucuacaugucugacaauuacacugauguuaauggcgagaaggugcugccaaaagacgacauugagugcccuuugggcuggaaaugggaggacgaagaauggagcacagaccugaaucgggcuguagaugaacagggaugggaauauuccauuacuauaccccccgaaaggaagccuaagcacuggguuccugcugagaaaauguacuacacucaucgcaggagacgcuggguacgguugcgucgaagagauuuaucccaaauggaggcgcucaaacgucauaggcaagcagaggccgagggcgagggcugggaauaugccucccuauucgguuggaaguuccaccuagaguauagaaagaccgacgcauuuagacggaggagauggaggcggcgaauggagccccuggaaaaaacugggccggccgccgucuucgcucuggaaggcgcucuagguggggugauggacgacaaaagugaggacuccaugucaguaucaacccuguccuuuggagucaauaggccuaccaucucguguaucuuugauuacggaaaccgcuaucaucuccgcuguuacauguaccaggcgagggaccuggcagcgauggauaaagauagcuucuccgacccuuacgcaauaguguccuuccugcaccagucucagaaaaccguuguggugaaaaauaccuugaaccccaccugggaccagacacucaucuuuuacgaaauagaaaucuucggcgaaccugcaacaguggccgaacagccccccucuaucgucguggagcuguacgaccacgauaccuauggugcagaugaauucaugggucgguguaucugucagcccucccucgagagaaugccucguuuggcuugguucccgcuaacgagagggucacagccaagcggcgaacugcuggccaguuucgaauugauucaaagagagaagcccgccauccaccacaucccaggauuugagguccaggaaacuagcagaauccucgaugaaucagaagacacggaucuaccuuauccucccccccagagggaagccaauauauauaugguaccacaaaacaucaaacccgcuuugcagcgcacagccauugaaauucucgcuuggggccuccguaacaugaaguccuaccaacucgccaauauuuccucuccuuccuuagucguggagugcggcggccagacaguucagaguugugugauucggaaccugcgaaaaaaucccaacuuugauaucugcacuuuguuuauggaaguuaugcugcccagagaagaauuauauugcccacccaucacagucaaagugauugacaaccggcaauuugggcgaaggcccguggucggacagugcacaauucgaucucucgagaguuucuugugcgaucccuacagcgcagaaucacccucaccucagggcgggccagaugauguauccuuauuaucuccuggcgaggauguccuaauugauauagacgauaaagaaccucugauuccuauccaagaggaggaauucaucgacugguggucaaaguucuucgcuuccaucggggaacgggagaagugcgggagcuaucuggaaaaagauuuugacacucugaaaguuuacgauacccaauuggaaaacguugaagcauucgaaggacugagugacuuuugcaacaccuuuaagcucuaccgagguaagacucaagaagagaccgaagaucccagcgugauaggcgaguucaaaggguuguuuaaaauuuacccccugccugaggaucccgccauccccaugccaccccgccaguuucaccagcucgcugcccaaggaccgcaggaaugccuggugagaaucuauaucgugcgcgcuuuuggacuucagcccaaggauccuaauggcaaaugugauccuuauaucaaaauauccauugguaaaaaguccgucuccgaccaggacaacuauaucccauguacucuggaaccuguguuugguaaaauguucgaacuuacaugcacccugccucucgaaaaagaccugaagaucacccuguacgacuaugaccuucuauccaaggacgagaaaaucggcgagacuguuguugaucuugaaaaucggcuacugucgaaauuuggagcucgcuguggcuuaccacagacuuauugcguuagugggcccaaccaguggcgggaucaacuacgaccgucacagcuucuccauuuguucugccagcagcaucgaguuaaggccccuguauacagaacagaccgcguaauguuucaggacaaagaauauucuaucgaagagauugaggcagguagaauuccgaacccacaccucggacccguggaagagagacuggcgcugcacguucugcaacaacagggcuuagucccagagcacguugagucucgaccacuguauagcccacugcagcccgauauagaacaggggaaacuucaaaugugggucgaccuuuuuccaaaggcuuugggcagaccgggcccccccuuuaacauaacuccgcgccgggccaggcgcuuuuuucugagaugcauaaucuggaauacacgagacgugauucuagaugaucugucucugacaggugagaagaugagugauauuuacguaaaaggguggaugauuggguucgaggagcacaagcagaagaccgaugugcacuaucgcuccuuagguggggagggaaauuucaauuggagguuuauuuuccccuuugauuaucuuccugcagagcagguguguacgauagccaaaaaggaugccuuuuggagacuggacaaaacagagucuaaaauuccggcaagaguuguguuucagauaugggacaacgauaaguuuuccuucgacgacuuccuugguuccuugcagcuggacuugaaccguaugccuaagccugccaagacagcgaaaaagugcucucucgaucaacuggacgaugccuuccacccugaaugguuugugagucuguucgagcagaagacugugaagggaugguggccauguguagcagaagagggggagaaaaaaauucucgcugggaaacuggaaaugacacuugaaaucguagccgaaucagaacaugaggaacgucccgcgggacaaggcagggaugaaccgaacaugaaucccaaguuagaagacccgcgcaggccagauaccucauuccugugguucacgucuccguauaagacgaugaaauucauucucuggaggagguuuagaugggcgauuauacuguuuauuauacuguucaucuugcuucuguuucuggcaaucuucauuuacgcuuuccccaauuaugcagcgaugaagcugguuaagccauucucuuag

SEQ ID NO: 48989 - RNA, 6294 nt, Artificial Sequence
  derived and/or modified sequence
augcuucggguuuucauacuuuaugccgaaaauguacauacacccgacacugacauuucggacgcguacugcagcgccguguuugccggaguuaagaaaaggaccaaaguuauaaagaauagugugaacccuguauggaaugagggcuucgaaugggaccucaagggcaucccacuggaccagggcucagagcugcacguuguuguuaaggaucacgagacuaugggccggaacagauuucuuggcgaggccaaagugccacucagagagguuuuagccacaccaagucuaucagcaagcuuuaaugccccccugcucgauacuaaaaagcaaccuacgggagcuucccucguguuacaggugaguuauaccccccuaccuggcgcuguuccucucuuuccaccaccuaccccccucgaacccagcccuacgcugccagauuuggauguaguagccggaggcgggcaaaguagggcagaaaccuggagccugcuaagcgauucgacgauggacacgagauacucaggcaagaaauggcccgcccccaccgauacuggaggcgaagaagacacagaggaccagggccugacuggcgaugaagcugaacccuuccuugaucaguccgguggcccgggggcuccuacuacaccacgcaaauuaccuagcagaccaccuccccacuaucccggcauuaagcgaaaacggucggcccccaccucccgaaagcuguugagcgauaaaccacaggacuuucaaauucgaguccaaguaaucgagggccgccagcuacccgguguaaacauaaagccagucgucaaagugaccgccgcgggccagacaaagcgcacccgaauucauaagggcaauucucccuuauuuaaugaaacucuguuuuuuaauuuguuugauuccccuggugagcuuuucgacgagcccauuuucaucacugucguggauucuagaucccugcgcacugaugcucuccucggcgaguuuaggauggacguugggacgaucuauagagaaccucgccaugcauaccuaaggaaauggcuacuccucucagacccagacgacuuuagcgcgggcgcacgggguuaucugaaaacuucacuguguguguuaggacccggugaugaggccccccuagaacgcaaagauccauccgaggacaaagaagacauugaaucuaaucugcucagaccuacuggaguggcucugcggggcgcccacuucugucugaaaguguuccgcgcggaagaucuaccccagauggacgacgcgguaauggauaacgugaagcagauuuucggguucgagucaaacaagaagaauuuaguggauccuuucguagaggugagcuuugcugggaagaugcugugcagcaagauccuggaaaaaacagcuaauccacaguggaaccagaauauuacacugccugcuauguuuccaucaaugugugaaaaaaugagaauuagaauuaucgauugggacagacuaacgcacaacgauaucgucgcaaccacuuaucucucaaugucuaagauuagcgcgccaggaggagagaucgaaguggaugacuaucuuggcuuccuacccacauucggaccaugcuacaucaaucuauacggaucucccagggaauucacagguuuuccugauccauacacagaacucaacaccgguaaaggcgaaggcgucgcuuacagaggucgucuucuccugagcuuggagaccaaacucguagagcacagugaacaaaaaguggaggaccugccugccgaugacauuuuacgaguugagaaguaccuccggcgccgaaaguacuccuuguuugccgccuuuuacucagccacuaugcuacaagaugucgaugaugcaauucaauuugaagugagcaucggaaauuaugguaauaaguuugauaugacaugccucccucuagccaguaccacgcaguauucacgcgcaguguuugaugggugucacuauuacuaucuucccuggggaaaugucaagccagugguaguucugucaucauauugggaagauaucucccacagaauugagacccaaaaccagcuccuuggcaucgcugauaggcucgaagcuggccucgaacagguccaucucgcucugaaggcccaguguucgacugaggauguugauucuuugguggcucaacuuaccgaugagcugauugcuggguguucgcagccacucggcgauauccacgagaccccaucagcuacucaucucgaucaguaccucuaucagcucaggacucaccaucuuucccaaauaacugaggcugcccuggcacuuaagcucggacacucagaauuaccugcagcccuugaacaagccgaggauugguugcuuagauugcgggcucucgcugaagaaccucaaaacucucuuccggacaucgucauuuggaugcugcaaggggauaagcgaguggccuaucagcguguaccagcccaucaaguacucuuuucaagacgaggagccaacuacugugggaagaauugcggcaaacuccagacuaucuuccucaaguauccuauggaaaaggucccuggugcgaggaugcccguccagauccgcgugaaacuuugguucgggcucagcguugacgaaaaggaguuuaaucaauucgccgagggaaagcuaucugucuucgcagaaacguaugagaaugagacuaagcucgcacuggucgggaacuggggcacgaccggcuuaacauacccaaaguucagugacguuacuggcaagauaaagcugccaaaggauucauuuaggcccagcgcugguuggacaugggccggggauugguuugugugcccagaaaaaacacugcuucaugacauggacgcuggacauuuaucauuugucgaggagguguucgaaaaucaaacaagauuaccuggcggccaguggaucuacauguccgauaauuauacagaugucaauggagaaaaaguucugcccaaagacgacaucgaauguccacugggcuggaaaugggaggacgaagaauggagcaccgaucuaaacagagcagucgacgagcaaggaugggaauauucgauaacuauuccuccggaacguaagccgaagcacugggugccagccgagaaaauguauuacacccaucgcagaagacguugggugcgccugagacgccgcgaucuuagucagauggaggcauuaaaaagacaccggcaggcagaagcugagggugaaggaugggaauaugccagcuuauuuggauggaaguuccacuuggaauaucgaaagaccgacgccuucaggagacgccgguggagacggcggauggagccccuggagaaaacagguccagcugcgguauucgcucuugagggugcauuaggcggaguuauggaugacaagagugaagauaguaugucagugaguacuuuaagcuucggcguuaaccgcccuacaaucuccugcauauucgacuacgguaaucgguaucaccuucgcugcuauauguaccaggcucgggaccuugcugccauggacaaagauagcuuuuccgauccuuaugccaucgucucguuccuacaccagagucaaaagacugucguugugaagaauacauugaacccaacuugggaccagacccugauauucuaugagauugagaucuucggugagcccgccaccguagcagaacaaccuccuagcauagucguggaauuguaugaucacgauaccuauggagcagacgaguuuaugggaaggugcauaugccagccauccuuggaacguaugccacgauuagccugguuuccucugacucgcgggucccaaccuuccggggagcuuuuggccuccuuugaauuaauucagcgcgagaagcccgccauccaucauauacccggcuucgaaguacaagaaaccaguagaauccucgacgaguccgaggacacugacuugccuuacccacccccccagcgggaggccaacauuuacaugguuccucaaaacauuaagccagccuuacaaagaaccgcgaucgagauucucgccuggggucucagaaauaugaaguccuaccaacuugccaacauuucuuccccaucgcucguaguagaaugcgggggccagaccguccaaucgugugugauucgaaaucugagaaagaauccuaacuucgauauaugcacauuguucauggaaguuaugcucccccgggaagagcuauauugcccaccuauuaccguaaagguaauagauaaucgucaguuuggaagaaggccugugguaggucaguguacaauccggagccucgagucuuuucuuugugauccauacagcgcagagucaccaucaccucagggagggcccgacgacguuucccucuuguccccaggcgaagacgugcugauugauaucgaugauaaggagccucucaucccaauccaagaggaggaauucauagacugguggucaaaauuuuucgcuuccauuggagaacgcgagaaaugcggauccuaccucgaaaaggacuucgauacccuaaaaguauacgacacccaacuugaaaauguggaggcuuucgaaggccucucagacuucugcaauacauuuaaauuguaucgcggaaaaacccaggaggagacagaagacccaagcgugauuggggaauucaagggccuuuuuaagauuuauccacuucccgaggacccugccaucccuaugcccccacgucaguuccaccaacucgcugcccaagguccccaggaaugucuaguacgcauauauaucguuagagccuucggucugcagccuaaagauccaaacggcaaaugugaccccuacauaaagauaagcaucgguaaaaaaucagugucugaccaagauaauuauauccccuguaccuuagagcccgucuuuggcaagauguuugagcugacaugcacacuaccacucgaaaaggauuugaagaucaccuuguacgauuacgaccuguugucaaaggaugagaagauuggcgagacagugguggaucuugagaaccgguuacuuuccaaguucggugcacguuguggucugccccaaacuuauugcgucucuggaccuaaucaguggagagaccagcuccggcccucucaguugcugcaccuauuuugucagcagcaucgcguuaaagcgccaguguauagaaccgaccgagugauguuccaggacaaggaguauucuauugaagaaaucgaggccggcagaaucccuaauccacaccugggcccuguggaagagcggcuugccuuacacguucuccagcagcaaggucucguuccagaacacguugagucucggccccuuuacagcccauugcagcccgauauugagcagggaaagcuccagauguggguugaucucuuucccaaagcgcuaggcaggcccggucccccuuuuaauauuacuccuagacgcgcacgcagauuuuuccuaagauguauaaucuggaauacacgggauguuauccucgacgaccugagucuuacaggugaaaagaugucugacauauacgugaaaggauggaugauuggauuugaagaacauaagcagaagaccgacgugcauuauagaaguuuggguggcgaaggcaauuuuaacuggcgcuucaucuuuccuuucgacuaucugcccgccgaacagguguguacuaucgcaaagaaagaugcauucuggcgccuugacaagacugaauccaaaauucccgcaagagugguuuuccaaauuugggauaaugacaaguuuuccuuugaugauuuccugggaagucuccagcuagaccugaacaggaugccuaaacccgccaaaacugccaaaaaauguucuuuagaccagcuggacgaugccuuucacccugaaugguucguuucauuauuugagcaaaagaccgugaaggguugguggccauguguagccgaagaaggcgagaagaagauuuuagccgggaaacuggaaaugacauuggaaauaguggcagagagcgaacacgaagaacggccagcagggcagggucgggacgagcccaauaugaacccuaaauuggaagacccuaggagaccugauacguccuuuuugugguuuacaaguccauacaagacaaugaaauuuauucucuggcgucgguuccgaugggcaauaauucuguuuaucauacuuuuuauccuccucuuauuccucgccaucuuuauuuacgccuuuccaaacuacgcagccaugaaguuaguuaaacccuucucuuag

SEQ ID NO: 48990 - protein, 2118 aa, Artificial Sequence
  derived and/or modified sequence
MLRVFILYAENVHTPDTDISDAYCSAVFAGVKKRTKVIKNSVNPVWNEGFEWDLKGIPLDQGSELHVVVKDHETMGRNRFLGEAKVPLREVLATPSLSASFNAPLLDTKKQPTGASLVLQVSYTPLPGAVPLFPPPTPLEPSPTLPDLDVVAGGGQSRAETWSLLSDSTMDTRYSGKKWPAPTDTGGEEDTEDQGLTGDEAEPFLDQSGGPGAPTTPRKLPSRPPPHYPGIKRKRSAPTSRKLLSDKPQDFQIRVQVIEGRQLPGVNIKPVVKVTAAGQTKRTRIHKGNSPLFNETLFFNLFDSPGELFDEPIFITVVDSRSLRTDALLGEFRMDVGTIYREPRHAYLRKWLLLSDPDDFSAGARGYLKTSLCVLGPGDEAPLERKDPSEDKEDIESNLLRPTGVALRGAHFCLKVFRAEDLPQMDDAVMDNVKQIFGFESNKKNLVDPFVEVSFAGKMLCSKILEKTANPQWNQNITLPAMFPSMCEKMRIRIIDWDRLTHNDIVATTYLSMSKISAPGGEIEVDDYLGFLPTFGPCYINLYGSPREFTGFPDPYTELNTGKGEGVAYRGRLLLSLETKLVEHSEQKVEDLPADDILRVEKYLRRRKYSLFAAFYSATMLQDVDDAIQFEVSIGNYGNKFDMTCLPLASTTQYSRAVFDGCHYYYLPWGNVKPVVVLSSYWEDISHRIETQNQLLGIADRLEAGLEQVHLALKAQCSTEDVDSLVAQLTDELIAGCSQPLGDIHETPSATHLDQYLYQLRTHHLSQITEAALALKLGHSELPAALEQAEDWLLRLRALAEEPQNSLPDIVIWMLQGDKRVAYQRVPAHQVLFSRRGANYCGKNCGKLQTIFLKYPMEKVPGARMPVQIRVKLWFGLSVDEKEFNQFAEGKLSVFAETYENETKLALVGNWGTTGLTYPKFSDVTGKIKLPKDSFRPSAGWTWAGDWFVCPEKTLLHDMDAGHLSFVEEVFENQTRLPGGQWIYMSDNYTDVNGEKVLPKDDIECPLGWKWEDEEWSTDLNRAVDEQGWEYSITIPPERKPKHWVPAEKMYYTHRRRRWVRLRRRDLSQMEALKRHRQAEAEGEGWEYASLFGWKFHLEYRKTDAFRRRRWRRRMEPLEKTGPAAVFALEGALGGVMDDKSEDSMSVSTLSFGVNRPTISCIFDYGNRYHLRCYMYQARDLAAMDKDSFSDPYAIVSFLHQSQKTVVVKNTLNPTWDQTLIFYEIEIFGEPATVAEQPPSIVVELYDHDTYGADEFMGRCICQPSLERMPRLAWFPLTRGSQPSGELLASFELIQREKPAIHHIPGFEVQETSRILDESEDTDLPYPPPQREANIYMVPQNIKPALQRTAIEILAWGLRNMKSYQLANISSPSLVVECGGQTVQSCVIRNLRKNPNFDICTLFMEVMLPREELYCPPITVKVIDNRQFGRRPVVGQCTIRSLESFLCDPYSAESPSPQGGPDDVSLLSPGEDVLIDIDDKEPLIPIQLADGLSSLAPTNTASPPSSPHEEEFIDWWSKFFASIGEREKCGSYLEKDFDTLKVYDTQLENVEAFEGLSDFCNTFKLYRGKTQEETEDPSVIGEFKGLFKIYPLPEDPAIPMPPRQFHQLAAQGPQECLVRIYIVRAFGLQPKDPNGKCDPYIKISIGKKSVSDQDNYIPCTLEPVFGKMFELTCTLPLEKDLKITLYDYDLLSKDEKIGETVVDLENRLLSKFGARCGLPQTYCVSGPNQWRDQLRPSQLLHLFCQQHRVKAPVYRTDRVMFQDKEYSIEEIEAGRIPNPHLGPVEERLALHVLQQQGLVPEHVESRPLYSPLQPDIEQGKLQMWVDLFPKALGRPGPPFNITPRRARRFFLRCIIWNTRDVILDDLSLTGEKMSDIYVKGWMIGFEEHKQKTDVHYRSLGGEGNFNWRFIFPFDYLPAEQVCTIAKKDAFWRLDKTESKIPARVVFQIWDNDKFSFDDFLGSLQLDLNRMPKPAKTAKKCSLDQLDDAFHPEWFVSLFEQKTVKGWWPCVAEEGEKKILAGKLEMTLEIVAESEHEERPAGQGRDEPNMNPKLEDPRRPDTSFLWFTSPYKTMKFILWRRFRWAIILFIILFILLLFLAIFIYAFPNYAAMKLVKPFS

SEQ ID NO: 48991 - DNA, 7004 bp, Artificial Sequence
  derived and/or modified sequence
gcggccgccgcccagccaggtgcaaaatgccgtgtcattgggagactccgcagccggagcattagattacagctcgacggagctcgggaagggcggcgggggtggaagatgagcagaagcccctgttctcggaacgccggctgacaagcggggtgagcgcagccggggcggggacccagcctagcccactggagcagccgggggtggcccgttcccctttaagagcaactgctctaagccaggagccagagattcgagccggcctcgcccagccagccctctccagcgaggggacccacaagcggcgcctcggccctcccgacctttccgagccctctttgcgccctgggcgcacggggccctacacgcgccaagcatgctgagggtcttcatcctctatgccgagaacgtccacacacccgacaccgacatcagcgatgcctactgctccgcggtgtttgcaggggtgaagaagagaaccaaagtcatcaagaacagcgtgaaccctgtatggaatgagggatttgaatgggacctcaagggcatccccctggaccagggctctgagcttcatgtggtggtcaaagaccatgagacgatggggaggaacaggttcctgggggaagccaaggtcccactccgagaggtcctcgccacccctagtctgtccgccagcttcaatgcccccctgctggacaccaagaagcagcccacaggggcctcgctggtcctgcaggtgtcctacacaccgctgcctggagctgtgcccctgttcccgccccctactcctctggagccctccccgactctgcctgacctggatgtagtggcaggcgggggacagagccgggccgagacttggtccctgctcagtgacagcaccatggacacgagatactctggaaagaagtggccggcccccacggacacaggaggagaggaagacacagaggaccagggactcactggagatgaggcggagccattcctggatcaaagcggaggcccgggggctcccaccaccccaaggaaactaccttcacgtcctccgccccactaccccgggatcaaaagaaagcgaagtgcgcctacatctagaaagctgctgtcagacaaaccgcaggatttccagatcagggtccaggtgatcgaggggcgccagctgccgggggtgaacatcaagcctgtggtcaaggttaccgctgcagggcagaccaagcggacgcggatccacaagggaaacagcccactcttcaatgagactcttttcttcaacttgtttgactctcctggggagctgtttgatgagcccatctttatcacggtggtagactctcgttctctcaggacagatgctctcctcggggagttccggatggacgtgggcaccatttacagagagccccggcacgcctatctcaggaagtggctgctgctctcagaccctgatgacttctctgctggggccagaggctacctgaaaacaagcctttgtgtgctggggcctggggacgaagcgcctctggagagaaaagacccctctgaagacaaggaggacattgaaagcaacctgctccggcccacaggcgtagccctgcgaggagcccacttctgcctgaaggtcttccgggccgaggacttgccgcagatggacgatgccgtgatggacaacgtgaaacagatctttggcttcgagagtaacaagaagaacttggtggacccctttgtggaggtcagctttgcggggaaaatgctgtgcagcaagatcttggagaagacggccaaccctcagtggaaccagaacatcacactgcctgccatgtttccctccatgtgcgaaaaaatgaggattcgtatcatagactgggaccgcctgactcacaatgacatcgtggctaccacctacctgagtatgtcgaaaatctctgcccctggaggagaaatagaagtggatgactacctgggcttcctccccacttttgggccctgctacatcaacctctatggcagtcccagagagttcacaggcttcccagacccctacacagagctcaacacaggcaagggggaaggtgtggcttatcgtggccggcttctgctctccctggagaccaagctggtggagcacagtgaacagaaggtggaggaccttcctgcggatgacatcctccgggtggagaagtaccttaggaggcgcaagtactccctgtttgcggccttctactcagccaccatgctgcaggatgtggatgatgccatccagtttgaggtcagcatcgggaactacgggaacaagttcgacatgacctgcctgccgctggcctccaccactcagtacagccgtgcagtctttgacgggtgccactactactacctaccctggggtaacgtgaaacctgtggtggtgctgtcatcctactgggaggacatcagccatagaatcgagactcagaaccagctgcttgggattgctgaccggctggaagctggcctggagcaggtccacctggccctgaaggcgcagtgctccacggaggacgtggactcgctggtggctcagctgacggatgagctcatcgcaggctgcagccagcctctgggtgacatccatgagacaccctctgccacccacctggaccagtacctgtaccagctgcgcacccatcacctgagccaaatcactgaggctgccctggccctgaagctcggccacagtgagctccctgcagctctggagcaggcggaggactggctcctgcgtctgcgtgccctggcagaggagccccagaacagcctgccggacatcgtcatctggatgctgcagggagacaagcgtgtggcataccagcgggtgcccgcccaccaagtcctcttctcccggcggggtgccaactactgtggcaagaattgtgggaagctacagacaatctttctgaaatatccgatggagaaggtgcctggcgcccggatgccagtgcagatacgggtcaagctgtggtttgggctctcagtggatgagaaggagttcaaccagtttgctgaggggaagctgtctgtctttgctgaaacctatgagaacgagactaagttggcccttgttgggaactggggcacaacgggcctcacctaccccaagttttctgacgtcacgggcaagatcaagctacccaaggacagcttccgcccctcggccggctggacctgggctggagattggttcgtgtgtccggagaagactctgctccatgacatggacgccggtcacctgagcttcgtggaagaggtgtttgagaaccagacccggcttcccggaggccagtggatctacatgagtgacaactacaccgatgtgaacggggagaaggtgcttcccaaggatgacattgagtgcccactgggctggaagtgggaagatgaggaatggtccacagacctcaaccgggctgtcgatgagcaaggctgggagtatagcatcaccatccccccggagcggaagccgaagcactgggtccctgctgagaagatgtactacacacaccgacggcggcgctgggtgcgcctgcgcaggagggatctcagccaaatggaagcactgaaaaggcacaggcaggcggaggcggagggcgagggctgggagtacgcctctctttttggctggaagttccacctcgagtaccgcaagacagatgccttccgccgccgccgctggcgccgtcgcatggagccactggagaagacggggcctgcagctgtgtttgcccttgagggggccctgggcggcgtgatggatgacaagagtgaagattccatgtccgtctccaccttgagcttcggtgtgaacagacccacgatttcctgcatattcgactatgggaaccgctaccatctacgctgctacatgtaccaggcccgggacctggctgcgatggacaaggactctttttctgatccctatgccatcgtctccttcctgcaccagagccagaagacggtggtggtgaagaacacccttaaccccacctgggaccagacgctcatcttctacgagatcgagatctttggcgagccggccacagttgctgagcaaccgcccagcattgtggtggagctgtacgaccatgacacttatggtgcagacgagtttatgggtcgctgcatctgtcaaccgagtctggaacggatgccacggctggcctggttcccactgacgaggggcagccagccgtcgggggagctgctggcctcttttgagctcatccagagagagaagccggccatccaccatattcctggttttgaggtgcaggagacatcaaggatcctggatgagtctgaggacacagacctgccctacccaccaccccagagggaggccaacatctacatggttcctcagaacatcaagccagcgctccagcgtaccgccatcgagatcctggcatggggcctgcggaacatgaagagttaccagctggccaacatctcctcccccagcctcgtggtagagtgtgggggccagacggtgcagtcctgtgtcatcaggaacctccggaagaaccccaactttgacatctgcaccctcttcatggaagtgatgctgcccagggaggagctctactgcccccccatcaccgtcaaggtcatcgataaccgccagtttggccgccggcctgtggtgggccagtgtaccatccgctccctggagagcttcctgtgtgacccctactcggcggagagtccatccccacagggtggcccagacgatgtgagcctactcagtcctggggaagacgtgctcatcgacattgatgacaaggagcccctcatccccatccagcttgcagacggtctgtcgagcttggcccccactaacacggcttctcctccatccagtcctcatgaggaagagttcatcgattggtggagcaaattctttgcctccataggggagagggaaaagtgcggctcctacctggagaaggattttgacaccctgaaggtctatgacacacagctggagaatgtggaggcctttgagggcctgtctgacttttgtaacaccttcaagctgtaccggggcaagacgcaggaggagacagaagatccatctgtgattggtgaatttaagggcctcttcaaaatttatcccctcccagaagacccagccatccccatgcccccaagacagttccaccagctggccgcccagggaccccaggagtgcttggtccgtatctacattgtccgagcatttggcctgcagcccaaggaccccaatggaaagtgtgatccttacatcaagatctccatagggaagaaatcagtgagtgaccaggataactacatcccctgcacgctggagcccgtatttggaaagatgttcgagctgacctgcactctgcctctggagaaggacctaaagatcactctctatgactatgacctcctctccaaggacgaaaagatcggtgagacggtcgtcgacctggagaacaggctgctgtccaagtttggggctcgctgtggactcccacagacctactgtgtctctggaccgaaccagtggcgggaccagctccgcccctcccagctcctccacctcttctgccagcagcatagagtcaaggcacctgtgtaccggacagaccgtgtaatgtttcaggataaagaatattccattgaagagatagaggctggcaggatcccaaacccacacctgggcccagtggaggagcgtctggctctgcatgtgcttcagcagcagggcctggtcccggagcacgtggagtcacggcccctctacagccccctgcagccagacatcgagcaggggaagctgcagatgtgggtcgacctatttccgaaggccctggggcggcctggacctcccttcaacatcaccccacggagagccagaaggtttttcctgcgttgtattatctggaataccagagatgtgatcctggatgacctgagcctcacgggggagaagatgagcgacatttatgtgaaaggttggatgattggctttgaagaacacaagcaaaagacagacgtgcattatcgttccctgggaggtgaaggcaacttcaactggaggttcattttccccttcgactacctgccagctgagcaagtctgtaccattgccaagaaggatgccttctggaggctggacaagactgagagcaaaatcccagcacgagtggtgttccagatctgggacaatgacaagttctcctttgatgattttctgggctccctgcagctcgatctcaaccgcatgcccaagccagccaagacagccaagaagtgctccttggaccagctggatgatgctttccacccagaatggtttgtgtccctttttgagcagaaaacagtgaagggctggtggccctgtgtagcagaagagggtgagaagaaaatactggcgggcaagctggaaatgaccttggagattgtagcagagagtgagcatgaggagcggcctgctggccagggccgggatgagcccaacatgaaccctaagcttgaggacccaaggcgccccgacacctccttcctgtggtttacctccccatacaagaccatgaagttcatcctgtggcggcgtttccggtgggccatcatcctcttcatcatcctcttcatcctgctgctgttcctggccatcttcatctacgccttcccgaactatgctgccatgaagctggtgaagcccttcagctgaggactctcctgccctgtagaaggggccgtggggtcccctccagcatgggactggcctgcctcctccgcccagctcggcgagctcctccagacctcctaggcctgattgtcctgccagggtgggcagacagacagatggaccggcccacactcccagagttgctaacatggagctctgagatcaccccacttccatcatttccttctcccccaacccaacgcttttttggatcagctcagacatatttcagtataaaacagttggaaccaca

SEQ ID NO: 48992 - DNA, 6354 bp, Artificial Sequence
  derived and/or modified sequence
atgctgcgcgtgttcatcctgtacgccgagaacgtgcacacccccgacaccgacatcagcgacgcctactgcagcgccgtgttcgccggcgtgaagaagcgcaccaaggtgatcaagaacagcgtgaaccccgtgtggaacgagggcttcgagtgggacctgaagggcatccccctggaccagggcagcgagctgcacgtggtggtgaaggaccacgagaccatgggccgcaaccgcttcctgggcgaggccaaggtgcccctgcgcgaggtgctggccacccccagcctgagcgccagcttcaacgcccccctgctggacaccaagaagcagcccaccggcgccagcctggtgctgcaggtgagctacacccccctgcccggcgccgtgcccctgttccccccccccacccccctggagcccagccccaccctgcccgacctggacgtggtggccggcggcggccagagccgcgccgagacctggagcctgctgagcgacagcaccatggacacccgctacagcggcaagaagtggcccgcccccaccgacaccggcggcgaggaggacaccgaggaccagggcctgaccggcgacgaggccgagcccttcctggaccagagcggcggccccggcgcccccaccaccccccgcaagctgcccagccgcccccccccccactaccccggcatcaagcgcaagcgcagcgcccccaccagccgcaagctgctgagcgacaagccccaggacttccagatccgcgtgcaggtgatcgagggccgccagctgcccggcgtgaacatcaagcccgtggtgaaggtgaccgccgccggccagaccaagcgcacccgcatccacaagggcaacagccccctgttcaacgagaccctgttcttcaacctgttcgacagccccggcgagctgttcgacgagcccatcttcatcaccgtggtggacagccgcagcctgcgcaccgacgccctgctgggcgagttccgcatggacgtgggcaccatctaccgcgagccccgccacgcctacctgcgcaagtggctgctgctgagcgaccccgacgacttcagcgccggcgcccgcggctacctgaagaccagcctgtgcgtgctgggccccggcgacgaggcccccctggagcgcaaggaccccagcgaggacaaggaggacatcgagagcaacctgctgcgccccaccggcgtggccctgcgcggcgcccacttctgcctgaaggtgttccgcgccgaggacctgccccagatggacgacgccgtgatggacaacgtgaagcagatcttcggcttcgagagcaacaagaagaacctggtggaccccttcgtggaggtgagcttcgccggcaagatgctgtgcagcaagatcctggagaagaccgccaacccccagtggaaccagaacatcaccctgcccgccatgttccccagcatgtgcgagaagatgcgcatccgcatcatcgactgggaccgcctgacccacaacgacatcgtggccaccacctacctgagcatgagcaagatcagcgcccccggcggcgagatcgaggtggacgactacctgggcttcctgcccaccttcggcccctgctacatcaacctgtacggcagcccccgcgagttcaccggcttccccgacccctacaccgagctgaacaccggcaagggcgagggcgtggcctaccgcggccgcctgctgctgagcctggagaccaagctggtggagcacagcgagcagaaggtggaggacctgcccgccgacgacatcctgcgcgtggagaagtacctgcgccgccgcaagtacagcctgttcgccgccttctacagcgccaccatgctgcaggacgtggacgacgccatccagttcgaggtgagcatcggcaactacggcaacaagttcgacatgacctgcctgcccctggccagcaccacccagtacagccgcgccgtgttcgacggctgccactactactacctgccctggggcaacgtgaagcccgtggtggtgctgagcagctactgggaggacatcagccaccgcatcgagacccagaaccagctgctgggcatcgccgaccgcctggaggccggcctggagcaggtgcacctggccctgaaggcccagtgcagcaccgaggacgtggacagcctggtggcccagctgaccgacgagctgatcgccggctgcagccagcccctgggcgacatccacgagacccccagcgccacccacctggaccagtacctgtaccagctgcgcacccaccacctgagccagatcaccgaggccgccctggccctgaagctgggccacagcgagctgcccgccgccctggagcaggccgaggactggctgctgcgcctgcgcgccctggccgaggagccccagaacagcctgcccgacatcgtgatctggatgctgcagggcgacaagcgcgtggcctaccagcgcgtgcccgcccaccaggtgctgttcagccgccgcggcgccaactactgcggcaagaactgcggcaagctgcagaccatcttcctgaagtaccccatggagaaggtgcccggcgcccgcatgcccgtgcagatccgcgtgaagctgtggttcggcctgagcgtggacgagaaggagttcaaccagttcgccgagggcaagctgagcgtgttcgccgagacctacgagaacgagaccaagctggccctggtgggcaactggggcaccaccggcctgacctaccccaagttcagcgacgtgaccggcaagatcaagctgcccaaggacagcttccgccccagcgccggctggacctgggccggcgactggttcgtgtgccccgagaagaccctgctgcacgacatggacgccggccacctgagcttcgtggaggaggtgttcgagaaccagacccgcctgcccggcggccagtggatctacatgagcgacaactacaccgacgtgaacggcgagaaggtgctgcccaaggacgacatcgagtgccccctgggctggaagtgggaggacgaggagtggagcaccgacctgaaccgcgccgtggacgagcagggctgggagtacagcatcaccatcccccccgagcgcaagcccaagcactgggtgcccgccgagaagatgtactacacccaccgccgccgccgctgggtgcgcctgcgccgccgcgacctgagccagatggaggccctgaagcgccaccgccaggccgaggccgagggcgagggctgggagtacgccagcctgttcggctggaagttccacctggagtaccgcaagaccgacgccttccgccgccgccgctggcgccgccgcatggagcccctggagaagaccggccccgccgccgtgttcgccctggagggcgccctgggcggcgtgatggacgacaagagcgaggacagcatgagcgtgagcaccctgagcttcggcgtgaaccgccccaccatcagctgcatcttcgactacggcaaccgctaccacctgcgctgctacatgtaccaggcccgcgacctggccgccatggacaaggacagcttcagcgacccctacgccatcgtgagcttcctgcaccagagccagaagaccgtggtggtgaagaacaccctgaaccccacctgggaccagaccctgatcttctacgagatcgagatcttcggcgagcccgccaccgtggccgagcagccccccagcatcgtggtggagctgtacgaccacgacacctacggcgccgacgagttcatgggccgctgcatctgccagcccagcctggagcgcatgccccgcctggcctggttccccctgacccgcggcagccagcccagcggcgagctgctggccagcttcgagctgatccagcgcgagaagcccgccatccaccacatccccggcttcgaggtgcaggagaccagccgcatcctggacgagagcgaggacaccgacctgccctacccccccccccagcgcgaggccaacatctacatggtgccccagaacatcaagcccgccctgcagcgcaccgccatcgagatcctggcctggggcctgcgcaacatgaagagctaccagctggccaacatcagcagccccagcctggtggtggagtgcggcggccagaccgtgcagagctgcgtgatccgcaacctgcgcaagaaccccaacttcgacatctgcaccctgttcatggaggtgatgctgccccgcgaggagctgtactgcccccccatcaccgtgaaggtgatcgacaaccgccagttcggccgccgccccgtggtgggccagtgcaccatccgcagcctggagagcttcctgtgcgacccctacagcgccgagagccccagcccccagggcggccccgacgacgtgagcctgctgagccccggcgaggacgtgctgatcgacatcgacgacaaggagcccctgatccccatccagctggccgacggcctgagcagcctggcccccaccaacaccgccagcccccccagcagcccccacgaggaggagttcatcgactggtggagcaagttcttcgccagcatcggcgagcgcgagaagtgcggcagctacctggagaaggacttcgacaccctgaaggtgtacgacacccagctggagaacgtggaggccttcgagggcctgagcgacttctgcaacaccttcaagctgtaccgcggcaagacccaggaggagaccgaggaccccagcgtgatcggcgagttcaagggcctgttcaagatctaccccctgcccgaggaccccgccatccccatgcccccccgccagttccaccagctggccgcccagggcccccaggagtgcctggtgcgcatctacatcgtgcgcgccttcggcctgcagcccaaggaccccaacggcaagtgcgacccctacatcaagatcagcatcggcaagaagagcgtgagcgaccaggacaactacatcccctgcaccctggagcccgtgttcggcaagatgttcgagctgacctgcaccctgcccctggagaaggacctgaagatcaccctgtacgactacgacctgctgagcaaggacgagaagatcggcgagaccgtggtggacctggagaaccgcctgctgagcaagttcggcgcccgctgcggcctgccccagacctactgcgtgagcggccccaaccagtggcgcgaccagctgcgccccagccagctgctgcacctgttctgccagcagcaccgcgtgaaggcccccgtgtaccgcaccgaccgcgtgatgttccaggacaaggagtacagcatcgaggagatcgaggccggccgcatccccaacccccacctgggccccgtggaggagcgcctggccctgcacgtgctgcagcagcagggcctggtgcccgagcacgtggagagccgccccctgtacagccccctgcagcccgacatcgagcagggcaagctgcagatgtgggtggacctgttccccaaggccctgggccgccccggcccccccttcaacatcaccccccgccgcgcccgccgcttcttcctgcgctgcatcatctggaacacccgcgacgtgatcctggacgacctgagcctgaccggcgagaagatgagcgacatctacgtgaagggctggatgatcggcttcgaggagcacaagcagaagaccgacgtgcactaccgcagcctgggcggcgagggcaacttcaactggcgcttcatcttccccttcgactacctgcccgccgagcaggtgtgcaccatcgccaagaaggacgccttctggcgcctggacaagaccgagagcaagatccccgcccgcgtggtgttccagatctgggacaacgacaagttcagcttcgacgacttcctgggcagcctgcagctggacctgaaccgcatgcccaagcccgccaagaccgccaagaagtgcagcctggaccagctggacgacgccttccaccccgagtggttcgtgagcctgttcgagcagaagaccgtgaagggctggtggccctgcgtggccgaggagggcgagaagaagatcctggccggcaagctggagatgaccctggagatcgtggccgagagcgagcacgaggagcgccccgccggccagggccgcgacgagcccaacatgaaccccaagctggaggacccccgccgccccgacaccagcttcctgtggttcaccagcccctacaagaccatgaagttcatcctgtggcgccgcttccgctgggccatcatcctgttcatcatcctgttcatcctgctgctgttcctggccatcttcatctacgccttccccaactacgccgccatgaagctggtgaagcccttcagc

SEQ ID NO: 48993 - DNA, 6357 bp, Artificial Sequence
  derived and/or modified sequence
atgctgagagtgttcatcctgtacgccgagaacgtgcacacccccgacaccgacatcagcgacgcctactgcagcgccgtgttcgccggcgtgaagaagagaaccaaggtgatcaagaacagcgtgaaccccgtgtggaacgagggcttcgagtgggacctgaagggcatccccctggaccagggcagcgagctgcacgtggtggtgaaggaccacgagaccatgggcagaaacagattcctgggcgaggccaaggtgcccctgagagaggtgctggccacccccagcctgagcgccagcttcaacgcccccctgctggacaccaagaagcagcccaccggcgccagcctggtgctgcaggtgagctacacccccctgcccggcgccgtgcccctgttccccccccccacccccctggagcccagccccaccctgcccgacctggacgtggtggccggcggcggccagagcagagccgagacctggagcctgctgagcgacagcaccatggacaccagatacagcggcaagaagtggcccgcccccaccgacaccggcggcgaggaggacaccgaggaccagggcctgaccggcgacgaggccgagcccttcctggaccagagcggcggccccggcgcccccaccacccccagaaagctgcccagcagaccccccccccactaccccggcatcaagagaaagagaagcgcccccaccagcagaaagctgctgagcgacaagccccaggacttccagatcagagtgcaggtgatcgagggcagacagctgcccggcgtgaacatcaagcccgtggtgaaggtgaccgccgccggccagaccaagagaaccagaatccacaagggcaacagccccctgttcaacgagaccctgttcttcaacctgttcgacagccccggcgagctgttcgacgagcccatcttcatcaccgtggtggacagcagaagcctgagaaccgacgccctgctgggcgagttcagaatggacgtgggcaccatctacagagagcccagacacgcctacctgagaaagtggctgctgctgagcgaccccgacgacttcagcgccggcgccagaggctacctgaagaccagcctgtgcgtgctgggccccggcgacgaggcccccctggagagaaaggaccccagcgaggacaaggaggacatcgagagcaacctgctgagacccaccggcgtggccctgagaggcgcccacttctgcctgaaggtgttcagagccgaggacctgccccagatggacgacgccgtgatggacaacgtgaagcagatcttcggcttcgagagcaacaagaagaacctggtggaccccttcgtggaggtgagcttcgccggcaagatgctgtgcagcaagatcctggagaagaccgccaacccccagtggaaccagaacatcaccctgcccgccatgttccccagcatgtgcgagaagatgagaatcagaatcatcgactgggacagactgacccacaacgacatcgtggccaccacctacctgagcatgagcaagatcagcgcccccggcggcgagatcgaggtggacgactacctgggcttcctgcccaccttcggcccctgctacatcaacctgtacggcagccccagagagttcaccggcttccccgacccctacaccgagctgaacaccggcaagggcgagggcgtggcctacagaggcagactgctgctgagcctggagaccaagctggtggagcacagcgagcagaaggtggaggacctgcccgccgacgacatcctgagagtggagaagtacctgagaagaagaaagtacagcctgttcgccgccttctacagcgccaccatgctgcaggacgtggacgacgccatccagttcgaggtgagcatcggcaactacggcaacaagttcgacatgacctgcctgcccctggccagcaccacccagtacagcagagccgtgttcgacggctgccactactactacctgccctggggcaacgtgaagcccgtggtggtgctgagcagctactgggaggacatcagccacagaatcgagacccagaaccagctgctgggcatcgccgacagactggaggccggcctggagcaggtgcacctggccctgaaggcccagtgcagcaccgaggacgtggacagcctggtggcccagctgaccgacgagctgatcgccggctgcagccagcccctgggcgacatccacgagacccccagcgccacccacctggaccagtacctgtaccagctgagaacccaccacctgagccagatcaccgaggccgccctggccctgaagctgggccacagcgagctgcccgccgccctggagcaggccgaggactggctgctgagactgagagccctggccgaggagccccagaacagcctgcccgacatcgtgatctggatgctgcagggcgacaagagagtggcctaccagagagtgcccgcccaccaggtgctgttcagcagaagaggcgccaactactgcggcaagaactgcggcaagctgcagaccatcttcctgaagtaccccatggagaaggtgcccggcgccagaatgcccgtgcagatcagagtgaagctgtggttcggcctgagcgtggacgagaaggagttcaaccagttcgccgagggcaagctgagcgtgttcgccgagacctacgagaacgagaccaagctggccctggtgggcaactggggcaccaccggcctgacctaccccaagttcagcgacgtgaccggcaagatcaagctgcccaaggacagcttcagacccagcgccggctggacctgggccggcgactggttcgtgtgccccgagaagaccctgctgcacgacatggacgccggccacctgagcttcgtggaggaggtgttcgagaaccagaccagactgcccggcggccagtggatctacatgagcgacaactacaccgacgtgaacggcgagaaggtgctgcccaaggacgacatcgagtgccccctgggctggaagtgggaggacgaggagtggagcaccgacctgaacagagccgtggacgagcagggctgggagtacagcatcaccatcccccccgagagaaagcccaagcactgggtgcccgccgagaagatgtactacacccacagaagaagaagatgggtgagactgagaagaagagacctgagccagatggaggccctgaagagacacagacaggccgaggccgagggcgagggctgggagtacgccagcctgttcggctggaagttccacctggagtacagaaagaccgacgccttcagaagaagaagatggagaagaagaatggagcccctggagaagaccggccccgccgccgtgttcgccctggagggcgccctgggcggcgtgatggacgacaagagcgaggacagcatgagcgtgagcaccctgagcttcggcgtgaacagacccaccatcagctgcatcttcgactacggcaacagataccacctgagatgctacatgtaccaggccagagacctggccgccatggacaaggacagcttcagcgacccctacgccatcgtgagcttcctgcaccagagccagaagaccgtggtggtgaagaacaccctgaaccccacctgggaccagaccctgatcttctacgagatcgagatcttcggcgagcccgccaccgtggccgagcagccccccagcatcgtggtggagctgtacgaccacgacacctacggcgccgacgagttcatgggcagatgcatctgccagcccagcctggagagaatgcccagactggcctggttccccctgaccagaggcagccagcccagcggcgagctgctggccagcttcgagctgatccagagagagaagcccgccatccaccacatccccggcttcgaggtgcaggagaccagcagaatcctggacgagagcgaggacaccgacctgccctacccccccccccagagagaggccaacatctacatggtgccccagaacatcaagcccgccctgcagagaaccgccatcgagatcctggcctggggcctgagaaacatgaagagctaccagctggccaacatcagcagccccagcctggtggtggagtgcggcggccagaccgtgcagagctgcgtgatcagaaacctgagaaagaaccccaacttcgacatctgcaccctgttcatggaggtgatgctgcccagagaggagctgtactgcccccccatcaccgtgaaggtgatcgacaacagacagttcggcagaagacccgtggtgggccagtgcaccatcagaagcctggagagcttcctgtgcgacccctacagcgccgagagccccagcccccagggcggccccgacgacgtgagcctgctgagccccggcgaggacgtgctgatcgacatcgacgacaaggagcccctgatccccatccagctggccgacggcctgagcagcctggcccccaccaacaccgccagcccccccagcagcccccacgaggaggagttcatcgactggtggagcaagttcttcgccagcatcggcgagagagagaagtgcggcagctacctggagaaggacttcgacaccctgaaggtgtacgacacccagctggagaacgtggaggccttcgagggcctgagcgacttctgcaacaccttcaagctgtacagaggcaagacccaggaggagaccgaggaccccagcgtgatcggcgagttcaagggcctgttcaagatctaccccctgcccgaggaccccgccatccccatgccccccagacagttccaccagctggccgcccagggcccccaggagtgcctggtgagaatctacatcgtgagagccttcggcctgcagcccaaggaccccaacggcaagtgcgacccctacatcaagatcagcatcggcaagaagagcgtgagcgaccaggacaactacatcccctgcaccctggagcccgtgttcggcaagatgttcgagctgacctgcaccctgcccctggagaaggacctgaagatcaccctgtacgactacgacctgctgagcaaggacgagaagatcggcgagaccgtggtggacctggagaacagactgctgagcaagttcggcgccagatgcggcctgccccagacctactgcgtgagcggccccaaccagtggagagaccagctgagacccagccagctgctgcacctgttctgccagcagcacagagtgaaggcccccgtgtacagaaccgacagagtgatgttccaggacaaggagtacagcatcgaggagatcgaggccggcagaatccccaacccccacctgggccccgtggaggagagactggccctgcacgtgctgcagcagcagggcctggtgcccgagcacgtggagagcagacccctgtacagccccctgcagcccgacatcgagcagggcaagctgcagatgtgggtggacctgttccccaaggccctgggcagacccggcccccccttcaacatcacccccagaagagccagaagattcttcctgagatgcatcatctggaacaccagagacgtgatcctggacgacctgagcctgaccggcgagaagatgagcgacatctacgtgaagggctggatgatcggcttcgaggagcacaagcagaagaccgacgtgcactacagaagcctgggcggcgagggcaacttcaactggagattcatcttccccttcgactacctgcccgccgagcaggtgtgcaccatcgccaagaaggacgccttctggagactggacaagaccgagagcaagatccccgccagagtggtgttccagatctgggacaacgacaagttcagcttcgacgacttcctgggcagcctgcagctggacctgaacagaatgcccaagcccgccaagaccgccaagaagtgcagcctggaccagctggacgacgccttccaccccgagtggttcgtgagcctgttcgagcagaagaccgtgaagggctggtggccctgcgtggccgaggagggcgagaagaagatcctggccggcaagctggagatgaccctggagatcgtggccgagagcgagcacgaggagagacccgccggccagggcagagacgagcccaacatgaaccccaagctggaggaccccagaagacccgacaccagcttcctgtggttcaccagcccctacaagaccatgaagttcatcctgtggagaagattcagatgggccatcatcctgttcatcatcctgttcatcctgctgctgttcctggccatcttcatctacgccttccccaactacgccgccatgaagctggtgaagcccttcagctag

SEQ ID NO: 48994 - DNA, 6357 bp, Artificial Sequence
  derived and/or modified sequence
atgctcagggtcttcatcctgtacgctgagaacgtgcatacccccgacaccgatataagcgacgcttactgttccgccgtgtttgccggtgtcaagaagcgcaccaaggttatcaagaacagcgtgaatcccgtttggaatgagggattcgaatgggacttgaaggggattcccttagatcaagggagcgagcttcacgtggtggtgaaggatcacgagaccatgggacggaatagattcctcggggaagccaaggtgcccctgcgcgaagtactcgccaccccatccctctccgcttcttttaatgcccctcttctggacacaaagaagcagcccactggcgccagtcttgtactccaggtgagttacacaccattgccaggagccgtacctctattccccccaccaacgccactcgagccgtctccgaccttgccagatctggatgtcgtagccgggggaggtcaatcccgcgcagagacttggtccctgctgtctgatagtaccatggataccagatattccggaaagaaatggcctgctccgacagacactgggggggaggaggataccgaggatcaggggctaaccggggacgaggctgagccatttctggaccagagcgggggtccgggggcccccaccaccccacgtaagcttccaagccgccccccgccgcactatcctggtataaaacgcaagcgttccgcacccacctccaggaagttattgtcagataagcctcaggatttccagattagagttcaggtcattgaaggtaggcaactgcccggggtgaacattaagccagtggtcaaggttaccgctgccggccagacaaaaagaacaaggatccataagggcaactctccactgttcaacgagacgctcttctttaacctgttcgattcgccaggggaattattcgatgagccaatttttatcactgtcgtggatagtaggagtctcaggaccgatgctctgctgggcgagttccggatggacgtcggcacaatatatcgcgagccaaggcatgcatatctgaggaaatggttgctccttagcgatcccgatgacttcagtgctggcgcacgagggtatttaaagacctcactgtgcgtcctgggtccaggggatgaggccccgctggaacggaaagacccctccgaggacaaagaggacattgaatccaatttgcttcggccaacaggagtcgcccttcgcggggctcacttttgcctgaaggttttcagagcagaggatctcccacaaatggacgacgccgtaatggataatgtgaagcaaatatttggttttgaaagcaataaaaaaaatctggttgatccattcgtagaagtctcgttcgccggaaagatgctatgtagtaaaatactcgagaagaccgcaaacccccagtggaatcagaacatcactctgcccgcaatgtttcctagtatgtgtgaaaaaatgcgaatccgtatcatcgactgggatcgcctgacgcataacgacatcgtcgccacaacatacctctccatgtctaagattagtgcccccgggggagaaattgaggtggacgattacctcggatttctccccacatttggcccttgttacatcaacctgtacggttcaccgagagagtttactggctttcctgatccttataccgagctcaacacagggaaaggcgagggtgttgcatatcgcggacggttgttactgtctctcgagaccaagcttgtcgagcattccgagcagaaagtggaagacctgcctgcggacgatatcttgcgcgtggaaaagtacttacgacgaaggaagtactcacttttcgccgccttctatagtgctaccatgctccaagatgttgatgatgcgatacagttcgaagtcagtatcggcaattacgggaacaaatttgacatgacctgcctgccattagcttccactacccaatatagtcgtgccgtgtttgacggttgtcattactattacttaccttggggcaacgtgaagcctgtggtcgtcctatccagttattgggaggacatatctcatcggatcgagacgcaaaatcagctgctgggtatcgctgatcggttggaagcgggattagaacaggtacacttggccctgaaagcccagtgcagcaccgaagatgtcgatagcctggttgctcagctgacagacgagttgattgcaggctgcagtcagccccttggcgacattcatgaaacaccttctgcaacacatctggatcaatacttataccagctgcgtacgcaccacctaagccagattaccgaggctgccttggcgctgaagctgggccactctgaactgccagcggccctggaacaggccgaggactggttgctgcgactcagagccttagccgaggagccccaaaatagcctaccagatattgtgatctggatgctgcagggggacaagcgggtcgcctatcagagagtccccgcccaccaagtgctgtttagcaggaggggggcaaactactgcggcaaaaactgtggtaaattgcagacaatttttcttaaatatcccatggagaaggttcccggcgctcgaatgccggtgcagattcgggtcaagttgtggtttgggctctccgtggatgaaaaagagtttaatcaatttgcagaaggcaagctgagcgtgttcgccgaaacatacgaaaacgaaacaaaactagccctcgtcggcaattggggtaccactggactgacataccccaagttttctgacgtcactggcaagatcaaactgccaaaggactcttttcgaccgtccgcaggttggacatgggctggagactggttcgtgtgccctgaaaagacactgcttcatgatatggacgctggccacctttcctttgttgaggaagtgttcgaaaaccagactcgcctaccagggggccagtggatatacatgtccgataactatacggatgtgaacggcgaaaaggtgttgcccaaggatgacatcgagtgccccctgggatggaagtgggaggacgaggagtggagcacagaccttaatcgggctgtagacgaacaaggctgggaatattcgattacaattccacccgaaagaaagcccaagcattgggtgcccgctgaaaaaatgtactatactcatcgacgacggcgatgggtcagattacggcggcgggacctgagtcagatggaagctctcaagcgccaccggcaagcagaggccgaaggtgaggggtgggagtacgctagcctgttcggctggaaattccatctcgagtaccggaagactgatgcgttcagacggaggagatggcgaagaagaatggagcctctggagaagacaggtccggccgctgtgtttgcactggaaggtgctctgggcggcgtgatggacgataaatctgaggatagcatgagtgtcagcaccttgtctttcggagtgaataggcctacaattagctgcatcttcgattacggcaacagataccacctgcggtgctacatgtatcaggctcgggatctggccgcaatggacaaggactctttttcagatccatatgccattgtgtctttcctgcaccagtcgcagaaaacagtggtggtgaagaatacattaaatccaacttgggatcagacactcattttttatgaaattgaaatctttggggagccagccacagtcgctgaacagccaccctccatcgtggtggaattatacgatcacgatacctatggtgccgatgaatttatgggtcgatgtatatgccagccatctctcgagcgtatgcccaggttagcatggtttccgctgacccgggggtcccagccaagtggagaattgctggcctccttcgagctcatccagcgggaaaagcccgctattcaccacatcccggggtttgaagtccaggaaacttcaaggatcctggacgagtccgaggataccgacctgccatatccaccaccgcaacgggaagctaatatctacatggtccctcaaaacatcaaacctgccttgcagcgcacagcaatagagatcctagcttggggattgcggaacatgaaatcttaccagctggccaacatttctagtccttctttagtggtcgagtgcggtggacaaaccgtccagtcgtgtgtcattcggaacctaaggaagaaccccaatttcgacatctgcacgctgtttatggaagtaatgctgcctcgagaggaattgtactgccccccgattacagtcaaagtaatcgacaatcggcagttcgggaggagacccgtagttgggcagtgtaccatcaggagcctcgaatcatttctctgcgatccgtattcagctgagtctccgagcccacagggtggcccggatgatgtctccttgctgtctccgggagaagatgtgttaatcgatatcgacgacaaagaacctcttattccaattcaattggcagatggcctgagctctttggcccctacaaatactgcgagcccaccaagttctccacatgaggaggaattcattgattggtggtccaaattcttcgctagcattggcgaaagagagaagtgtggctcctatctggagaaggatttcgatactctgaaagtatacgatacacaactcgaaaacgttgaggcattcgaaggactttctgacttctgcaacacatttaagctctacagagggaagactcaggaggaaaccgaggatccttctgtgatcggggaatttaagggcttgtttaaaatatatccattgcccgaagaccctgctataccgatgccacctaggcaattccaccagcttgccgcccaggggcctcaggaatgtctggttcggatctatattgtgagggcattcggactccaaccaaaagaccctaatgggaagtgcgatccttacatcaaaatttctattggcaagaaaagcgtgtcggatcaggacaattatatcccctgcacccttgagccggtgttcggcaagatgttcgaacttacttgtaccctgccactcgaaaaggacttaaagatcaccctgtacgattacgatctgctcagtaaggacgagaaaattggagagaccgttgttgatctcgaaaataggctcttaagcaagtttggcgctcggtgcggcttgccccaaacttactgtgtgtctggacctaatcagtggagggaccagctgcggccaagccagctgttgcatctgttctgtcagcaacatagagtgaaagctcccgtctatcgcactgaccgggttatgttccaggataaagagtactctatcgaagagatcgaggctggccgtatccctaatcctcacctgggacctgttgaagagcggctggccctccatgtgctacagcagcagggtctggtcccggaacacgttgagtctcggcctttatactctccactgcagcccgatattgaacaagggaagctgcagatgtgggtggacttattccccaaggccttgggcagacccggcccccctttcaacattacacccagaagagctaggaggttcttcctgagatgcatcatctggaacactcgcgacgtaattctggacgacctcagtctcaccggggagaaaatgagcgatatctacgtaaagggctggatgatcggatttgaggagcacaagcaaaaaacagacgtccattaccgctctctagggggcgagggtaactttaactggcgcttcatctttccttttgattacctgcccgccgagcaggtttgtacgatcgccaagaaagacgctttttggcggctcgataagaccgagtctaagataccggcacgagtagtttttcagatatgggataatgacaagttctcatttgacgacttcctgggctcactccaacttgacctgaacagaatgccaaaacctgctaagactgccaaaaaatgcagtctagaccaactggacgacgctttccaccctgagtggtttgtcagcctgttcgagcagaaaaccgttaagggttggtggccttgcgtcgcagaagaaggtgaaaaaaaaattttagccgggaaattggagatgaccctcgaaatcgtcgcagagtccgagcacgaggagagacccgccgggcagggcagagacgagcctaacatgaaccctaagctggaggaccccagaagaccagacactagctttctgtggtttacaagtccatacaaaaccatgaaattcattctgtggagaaggttccgttgggcaataattttgtttattatactatttattctcctcctgttccttgccatatttatctacgcgtttcctaactacgccgctatgaagttagtcaagcccttctcgtag

SEQ ID NO: 48995 - DNA, 6357 bp, Artificial Sequence
  derived and/or modified sequence
atgctgcgggtcttcatcctgtatgcagaaaatgtgcacaccccagacacagacatcagtgatgcctactgcagcgctgtgtttgctggggtgaagaagaggaccaaggtgatcaagaacagcgtgaaccctgtgtggaatgaaggatttgagtgggacctgaagggcatccccctggaccagggcagcgagctgcacgtggtggtgaaggaccacgagaccatgggcaggaaccgcttcctgggggaggccaaggtgcccctgcgggaggtgctggccacccccagcctgagcgccagcttcaatgcccccctgctggacaccaagaagcagcccactggagccagcctggtgctgcaggtgtcctacacccccctgcctggagctgtgcccctcttccccccacccacccccctggagcccagccccaccctgcctgacctggatgtggtggccggcggcggccagagcagagctgagacctggagcctgctgagtgacagcaccatggacacccgctacagcggcaagaagtggccagcccccacagacacaggaggagaggaggacacagaggaccagggcctgactggagatgaagctgagcccttcctggaccagagcggcggccctggggcccccaccacccccaggaagctgcccagccggcccccaccccactacccaggcatcaagaggaagaggtctgcccccaccagcaggaagctgctgagtgacaagccccaggacttccagatccgggtgcaggtgattgagggccggcagctgcccggggtgaacatcaagcctgtggtgaaggtgacagctgctggccagaccaagaggacccgcatccacaagggcaacagccccctcttcaatgagaccctcttcttcaacctgtttgacagccctggagagctgtttgatgagcccatcttcatcaccgtggtggacagccgcagcctgaggacagatgccctgctgggggagttcaggatggatgtgggcaccatctaccgggagcccaggcatgcctacctgaggaagtggctgctgctgagtgaccctgatgacttctctgctggggcccggggctacctgaagaccagcctgtgtgtgctgggccctggagatgaggcccccctggagaggaaggaccccagcgaggacaaggaggacatcgagagcaacctgctgcggcccactggagtggccctgcggggggcccacttctgcctgaaggtgttccgggcagaggacctgccccagatggatgatgctgtgatggacaacgtgaagcagatctttggatttgagagcaacaagaagaacctggtggacccctttgtggaggtgtcctttgctgggaagatgctgtgcagcaagatcctggagaagacagccaacccccagtggaaccagaacatcaccctgcctgccatgttccccagcatgtgtgagaagatgaggatccgcatcatcgactgggaccggctgacccacaatgacatcgtggccaccacctacctgtccatgagcaagatcagcgcccctggaggagaaattgaggtggatgactacctgggcttcctgcccaccttcggcccctgctacatcaacctgtatggcagcccccgggagttcaccggcttcccagacccctacacagagctgaacacaggaaaaggagagggcgtggcctaccggggccgcctgctgctgagcctggagaccaagctggtggagcacagcgagcagaaggtggaggacctgcctgcagatgacatcctgcgggtggagaagtacctgcggcggaggaagtacagcctgtttgctgccttctacagcgccaccatgctgcaggatgtggatgatgccatccagtttgaggtgtccatcggcaactacggcaacaagtttgacatgacctgcctgcccctggccagcaccacccagtacagcagagctgtgtttgatggctgccactactactacctgccctggggcaatgtgaagcctgtggtggtgctgagcagctactgggaggacatcagccacagaattgagacccagaaccagctgctgggcattgctgaccggctggaggccggcctggagcaggtgcacctggccctgaaggcccagtgcagcacagaagatgtggacagcctggtggcccagctgacagatgagctgattgctggctgcagccagcccctgggggacatccacgagaccccatctgccacccacctggaccagtacctgtaccagctgcggacccaccacctgagccagatcacagaagctgccctggccctgaagctgggccacagcgagctgcctgctgccctggagcaggccgaggactggctgctgcggctgcgggccctggccgaggagccccagaacagcctgcctgacatcgtcatctggatgctgcagggcgacaagagggtggcctaccagagggtgcctgcccaccaggtgctcttcagcagaagaggagccaactactgcggcaagaactgtgggaagctgcagaccatcttcctgaagtaccccatggagaaggtgcctggggccaggatgcctgtgcagatccgggtgaagctgtggtttggcctgtctgtggatgagaaggagttcaaccagtttgctgagggcaagctgtctgtgtttgctgagacctatgaaaatgagaccaagctggccctggtgggcaactggggcaccaccggcctgacctaccccaagttcagtgatgtgacaggcaagatcaagctgcccaaggacagcttccggcccagcgctggctggacctgggccggggactggtttgtgtgcccagagaagaccctgctgcatgacatggatgctggccacctgagctttgtggaggaggtgtttgagaaccagacccggctgcccggcggccagtggatctacatgtctgacaactacacagatgtgaatggagagaaggtgctgcccaaggatgacatcgagtgccccctgggctggaagtgggaggatgaggagtggagcacagacctgaacagagctgtggatgagcagggctgggagtacagcatcaccatccccccagagaggaagcccaagcactgggtgcctgctgagaagatgtactacacccacagaagaagacgctgggtgcggctgcggcggcgggacctgagccagatggaggccctgaagaggcaccggcaggccgaggccgagggggagggctgggagtatgccagcctgtttggctggaagttccacctggagtacaggaagacagatgccttcagaagaagacgctggaggaggaggatggagcccctggagaagacaggccctgctgctgtgtttgccctggagggcgccctgggcggcgtgatggatgacaagtctgaggacagcatgtctgtgtccaccctgagctttggagtgaaccggcccaccatcagctgcatctttgattatggcaaccgctaccacctgcgctgctacatgtaccaggcccgggacctggccgccatggacaaggacagcttcagtgacccctatgccatcgtgtccttcctgcaccagagccagaagacagtggtggtgaagaacaccctgaaccccacctgggaccagaccctcatcttctatgaaattgagatctttggagagcccgccaccgtggccgagcagccccccagcatcgtggtggagctgtatgaccatgacacctatggagcagatgagttcatgggccgctgcatctgccagcccagcctggagaggatgccccggctggcctggttccccctgacccggggcagccagcccagcggggagctgctggccagctttgagctgatccagcgggagaagccagccatccaccacatccctggctttgaggtgcaggagaccagccgcatcctggatgaaagtgaggacacagacctgccctaccccccaccccagcgggaggccaacatctacatggtgccccagaacatcaagccagccctgcagaggacagccatcgagatcctggcctggggcctgaggaacatgaagagctaccagctggccaacatcagcagccccagcctggtggtggagtgtggcggccagacagtgcagagctgtgtgatccggaacctgaggaagaaccccaactttgacatctgcaccctcttcatggaggtgatgctgccccgggaggagctgtactgcccccccatcaccgtgaaggtgattgacaaccggcagtttggccggcggcctgtggtgggccagtgcaccatccgcagcctggagagcttcctgtgtgacccctacagcgctgagagccccagcccccagggcggcccagatgatgtgtccctgctgagccctggagaagatgtgctgattgatattgatgacaaggagcccctcatccccatccagctggctgatggcctgagcagcctggcccccaccaacacagccagcccccccagcagcccccatgaggaggagttcatcgactggtggagcaagttctttgccagcattggagagcgggagaagtgtggcagctacctggagaaggactttgacaccctgaaggtgtatgacacccagctggagaatgtggaggcctttgagggcctgagtgacttctgcaacaccttcaagctgtaccggggcaagacccaggaggagacagaggaccccagcgtcatcggggagttcaagggcctcttcaagatctaccccctgcctgaggaccctgccatccccatgccaccccggcagttccaccagctggccgcccagggcccccaggagtgcctggtgcgcatctacatcgtgcgggccttcggcctgcagcccaaggaccccaacgggaaatgtgacccctacatcaagatcagcatcggcaagaagtctgtgtctgaccaggacaactacatcccctgcaccctggagcctgtgtttgggaagatgtttgagctgacctgcaccctgcccctggagaaggacctgaagatcaccctgtatgactatgacctgctgagcaaggatgagaagattggagagaccgtggtggacctggagaaccggctgctgagcaagtttggagcccgctgtggcctgccccagacctactgtgtgtctggccccaaccagtggagggaccagctgcggcccagccagctgctgcacctgttctgccagcagcaccgggtgaaggcccctgtgtacagaacagacagagtgatgttccaggacaaggagtacagcattgaggagattgaagctggccgcatccccaacccccacctgggccctgtggaggagcggctggccctgcacgtgctgcagcagcagggcctggtgcctgagcacgtggagagccggcccctgtacagccccctgcagcctgacatcgagcagggcaagctgcagatgtgggtggacctcttccccaaggccctgggccggcccggcccccccttcaacatcaccccccggcgggcccggcgcttcttcctgcgctgcatcatctggaacaccagagatgtgatcctggatgacctgagcctgactggagagaagatgtctgacatctacgtgaagggctggatgattggatttgaggagcacaagcagaagacagatgtgcactaccgcagcctgggcggggagggcaacttcaactggaggttcatcttcccctttgactacctgcctgctgagcaggtgtgcaccatcgccaagaaggatgccttctggaggctggacaagacagagagcaagatcccagcccgggtggtgttccagatctgggacaatgacaagttctcctttgatgacttcctgggcagcctgcagctggacctgaacaggatgcccaagccagccaagacagccaagaagtgcagcctggaccagctggatgatgccttccaccctgagtggtttgtgtccctgtttgagcagaagacagtgaagggctggtggccctgtgtggccgaggagggggagaagaagatcctggccggcaagctggagatgaccctggagatcgtggccgagagcgagcacgaggagaggcctgctggccagggcagagatgagcccaacatgaaccccaagctggaggaccccaggaggccagacaccagcttcctgtggttcaccagcccctacaagaccatgaagttcatcctgtggaggcgcttccgctgggccatcatcctcttcatcatcctcttcatcctgctgctcttcctggccatcttcatctatgccttccccaactatgctgccatgaagctggtgaagcccttctcctag

SEQ ID NO: 48996 - DNA, 6790 bp, Artificial Sequence
  derived and/or modified sequence
gggtggaagatgagcagaagcccctgttctcggaacgccggctgacaagcggggtgagcgcagccggggcggggacccagcctagcccactggagcagccgggggtggcccgttcccctttaagagcaactgctctaagccaggagccagagattcgagccggcctcgcccagccagccctctccagcgaggggacccacaagcggcgcctcggccctcccgacctttccgagccctctttgcgccctgggcgcacggggccctacacgcgccaagcatgctgagggtcttcatcctctatgccgagaacgtccacacacccgacaccgacatcagcgatgcctactgctccgcggtgtttgcaggggtgaagaagagaaccaaagtcatcaagaacagcgtgaaccctgtatggaatgagggatttgaatgggacctcaagggcatccccctggaccagggctctgagcttcatgtggtggtcaaagaccatgagacgatggggaggaacaggttcctgggggaagccaaggtcccactccgagaggtcctcgccacccctagtctgtccgccagcttcaatgcccccctgctggacaccaagaagcagcccacaggggcctcgctggtcctgcaggtgtcctacacaccgctgcctggagctgtgcccctgttcccgccccctactcctctggagccctccccgactctgcctgacctggatgtagtggcaggcgggggacagagccgggccgagacttggtccctgctcagtgacagcaccatggacacgagatactctggaaagaagtggccggcccccacggacacaggaggagaggaagacacagaggaccagggactcactggagatgaggcggagccattcctggatcaaagcggaggcccgggggctcccaccaccccaaggaaactaccttcacgtcctccgccccactaccccgggatcaaaagaaagcgaagtgcgcctacatctagaaagctgctgtcagacaaaccgcaggatttccagatcagggtccaggtgatcgaggggcgccagctgccgggggtgaacatcaagcctgtggtcaaggttaccgctgcagggcagaccaagcggacgcggatccacaagggaaacagcccactcttcaatgagactcttttcttcaacttgtttgactctcctggggagctgtttgatgagcccatctttatcacggtggtagactctcgttctctcaggacagatgctctcctcggggagttccggatggacgtgggcaccatttacagagagccccggcacgcctatctcaggaagtggctgctgctctcagaccctgatgacttctctgctggggccagaggctacctgaaaacaagcctttgtgtgctggggcctggggacgaagcgcctctggagagaaaagacccctctgaagacaaggaggacattgaaagcaacctgctccggcccacaggcgtagccctgcgaggagcccacttctgcctgaaggtcttccgggccgaggacttgccgcagatggacgatgccgtgatggacaacgtgaaacagatctttggcttcgagagtaacaagaagaacttggtggacccctttgtggaggtcagctttgcggggaaaatgctgtgcagcaagatcttggagaagacggccaaccctcagtggaaccagaacatcacactgcctgccatgtttccctccatgtgcgaaaaaatgaggattcgtatcatagactgggaccgcctgactcacaatgacatcgtggctaccacctacctgagtatgtcgaaaatctctgcccctggaggagaaatagaagtggatgactacctgggcttcctccccacttttgggccctgctacatcaacctctatggcagtcccagagagttcacaggcttcccagacccctacacagagctcaacacaggcaagggggaaggtgtggcttatcgtggccggcttctgctctccctggagaccaagctggtggagcacagtgaacagaaggtggaggaccttcctgcggatgacatcctccgggtggagaagtaccttaggaggcgcaagtactccctgtttgcggccttctactcagccaccatgctgcaggatgtggatgatgccatccagtttgaggtcagcatcgggaactacgggaacaagttcgacatgacctgcctgccgctggcctccaccactcagtacagccgtgcagtctttgacgggtgccactactactacctaccctggggtaacgtgaaacctgtggtggtgctgtcatcctactgggaggacatcagccatagaatcgagactcagaaccagctgcttgggattgctgaccggctggaagctggcctggagcaggtccacctggccctgaaggcgcagtgctccacggaggacgtggactcgctggtggctcagctgacggatgagctcatcgcaggctgcagccagcctctgggtgacatccatgagacaccctctgccacccacctggaccagtacctgtaccagctgcgcacccatcacctgagccaaatcactgaggctgccctggccctgaagctcggccacagtgagctccctgcagctctggagcaggcggaggactggctcctgcgtctgcgtgccctggcagaggagccccagaacagcctgccggacatcgtcatctggatgctgcagggagacaagcgtgtggcataccagcgggtgcccgcccaccaagtcctcttctcccggcggggtgccaactactgtggcaagaattgtgggaagctacagacaatctttctgaaatatccgatggagaaggtgcctggcgcccggatgccagtgcagatacgggtcaagctgtggtttgggctctcagtggatgagaaggagttcaaccagtttgctgaggggaagctgtctgtctttgctgaaacctatgagaacgagactaagttggcccttgttgggaactggggcacaacgggcctcacctaccccaagttttctgacgtcacgggcaagatcaagctacccaaggacagcttccgcccctcggccggctggacctgggctggagattggttcgtgtgtccggagaagactctgctccatgacatggacgccggtcacctgagcttcgtggaagaggtgtttgagaaccagacccggcttcccggaggccagtggatctacatgagtgacaactacaccgatgtgaacggggagaaggtgcttcccaaggatgacattgagtgcccactgggctggaagtgggaagatgaggaatggtccacagacctcaaccgggctgtcgatgagcaaggctgggagtatagcatcaccatccccccggagcggaagccgaagcactgggtccctgctgagaagatgtactacacacaccgacggcggcgctgggtgcgcctgcgcaggagggatctcagccaaatggaagcactgaaaaggcacaggcaggcggaggcggagggcgagggctgggagtacgcctctctttttggctggaagttccacctcgagtaccgcaagacagatgccttccgccgccgccgctggcgccgtcgcatggagccactggagaagacggggcctgcagctgtgtttgcccttgagggggccctgggcggcgtgatggatgacaagagtgaagattccatgtccgtctccaccttgagcttcggtgtgaacagacccacgatttcctgcatattcgactatgggaaccgctaccatctacgctgctacatgtaccaggcccgggacctggctgcgatggacaaggactctttttctgatccctatgccatcgtctccttcctgcaccagagccagaagacggtggtggtgaagaacacccttaaccccacctgggaccagacgctcatcttctacgagatcgagatctttggcgagccggccacagttgctgagcaaccgcccagcattgtggtggagctgtacgaccatgacacttatggtgcagacgagtttatgggtcgctgcatctgtcaaccgagtctggaacggatgccacggctggcctggttcccactgacgaggggcagccagccgtcgggggagctgctggcctcttttgagctcatccagagagagaagccggccatccaccatattcctggttttgaggtgcaggagacatcaaggatcctggatgagtctgaggacacagacctgccctacccaccaccccagagggaggccaacatctacatggttcctcagaacatcaagccagcgctccagcgtaccgccatcgagatcctggcatggggcctgcggaacatgaagagttaccagctggccaacatctcctcccccagcctcgtggtagagtgtgggggccagacggtgcagtcctgtgtcatcaggaacctccggaagaaccccaactttgacatctgcaccctcttcatggaagtgatgctgcccagggaggagctctactgcccccccatcaccgtcaaggtcatcgataaccgccagtttggccgccggcctgtggtgggccagtgtaccatccgctccctggagagcttcctgtgtgacccctactcggcggagagtccatccccacagggtggcccagacgatgtgagcctactcagtcctggggaagacgtgctcatcgacattgatgacaaggagcccctcatccccatccagcttgcagacggtctgtcgagcttggcccccactaacacggcttctcctccatccagtcctcatgaggaagagttcatcgattggtggagcaaattctttgcctccataggggagagggaaaagtgcggctcctacctggagaaggattttgacaccctgaaggtctatgacacacagctggagaatgtggaggcctttgagggcctgtctgacttttgtaacaccttcaagctgtaccggggcaagacgcaggaggagacagaagatccatctgtgattggtgaatttaagggcctcttcaaaatttatcccctcccagaagacccagccatccccatgcccccaagacagttccaccagctggccgcccagggaccccaggagtgcttggtccgtatctacattgtccgagcatttggcctgcagcccaaggaccccaatggaaagtgtgatccttacatcaagatctccatagggaagaaatcagtgagtgaccaggataactacatcccctgcacgctggagcccgtatttggaaagatgttcgagctgacctgcactctgcctctggagaaggacctaaagatcactctctatgactatgacctcctctccaaggacgaaaagatcggtgagacggtcgtcgacctggagaacaggctgctgtccaagtttggggctcgctgtggactcccacagacctactgtgtctctggaccgaaccagtggcgggaccagctccgcccctcccagctcctccacctcttctgccagcagcatagagtcaaggcacctgtgtaccggacagaccgtgtaatgtttcaggataaagaatattccattgaagagatagaggctggcaggatcccaaacccacacctgggcccagtggaggagcgtctggctctgcatgtgcttcagcagcagggcctggtcccggagcacgtggagtcacggcccctctacagccccctgcagccagacatcgagcaggggaagctgcagatgtgggtcgacctatttccgaaggccctggggcggcctggacctcccttcaacatcaccccacggagagccagaaggtttttcctgcgttgtattatctggaataccagagatgtgatcctggatgacctgagcctcacgggggagaagatgagcgacatttatgtgaaaggttggatgattggctttgaagaacacaagcaaaagacagacgtgcattatcgttccctgggaggtgaaggcaacttcaactggaggttcattttccccttcgactacctgccagctgagcaagtctgtaccattgccaagaaggatgccttctggaggctggacaagactgagagcaaaatcccagcacgagtggtgttccagatctgggacaatgacaagttctcctttgatgattttctgggctccctgcagctcgatctcaaccgcatgcccaagccagccaagacagccaagaagtgctccttggaccagctggatgatgctttccacccagaatggtttgtgtccctttttgagcagaaaacagtgaagggctggtggccctgtgtagcagaagagggtgagaagaaaatactggcgggcaagctggaaatgaccttggagattgtagcagagagtgagcatgaggagcggcctgctggccagggccgggatgagcccaacatgaaccctaagcttgaggacccaaggcgccccgacacctccttcctgtggtttacctccccatacaagaccatgaagttcatcctgtggcggcgtttccggtgggccatcatcctcttcatcatcctcttcatcctgctgctgttcctggccatcttcatctacgccttcccgaactatgctgccatgaagctggtgaagcccttcagctgaggactctcctgccctgtagaaggggccgtggggtcccctccagcatgggactggcctgcctcctccgcccagctcggcgagctcctccagacctcctaggcctgattgtcctgccagggtgggcagacagacagatggaccggcccacactcccag

SEQ ID NO: 48997 - DNA, 6357 bp, Artificial Sequence
  derived and/or modified sequence
atgctgcgggtgttcatcctgtacgccgagaacgtgcacacccccgataccgacatatctgacgcgtattgcagcgcggtgttcgccggggtgaaaaagcgtacaaaggtgatcaagaatagtgtgaatccagtctggaacgaaggcttcgagtgggaccttaaaggcatccccttggaccagggctccgagttgcatgtggttgtaaaagaccacgagactatgggccggaacagatttctgggcgaagcaaaagttccacttcgggaggtgttggcaaccccaagtctgagcgccagcttcaatgctcctctgttggacaccaagaaacagcctacaggggccagcctggttctgcaggtgagctatacgccattacctggtgccgtgccactcttccctcctccaacccctttggaaccctccccgactcttcctgaccttgacgttgtggccggcggaggccagagccgggccgagacatggagtttactaagcgacagtacaatggacacccgctatagcggcaagaagtggcccgctcccacagatacagggggcgaagaagatactgaggatcaagggctgacaggagatgaggcagagcctttcctcgaccagagcgggggacctggagctcctaccacgcctaggaaattacctagccggccacctccccattaccctggcattaagagaaagcggtcggcacccacctcacggaaactgttgagcgacaaacctcaggactttcagattcgggtgcaagtcatcgaaggaaggcagctgcctggcgtgaacatcaaacccgtggtgaaggtcacagccgctgggcagacaaaacgcactcgtatccataaaggcaactccccgctctttaatgagacgctctttttcaatttgtttgacagtccgggtgagctcttcgatgagccaattttcatcaccgtcgtagattccagatctttgcgaacagacgctcttctcggcgagttcaggatggacgtgggcaccatctatcgagaaccacgacacgcctacttaaggaaatggttgcttctcagcgaccccgacgacttcagtgcaggcgcccggggatacctgaaaaccagtctgtgcgtgttaggcccgggggatgaagcaccgctggaaaggaaggatccttctgaagacaaggaagacattgaaagcaatttgctgcgccccacaggagtggctctccgaggcgcccacttttgtttaaaggttttcagggctgaggatttgcctcagatggatgacgcagtcatggacaatgtgaaacagattttcggatttgagtccaacaagaagaacctggtcgatcccttcgtagaagttagttttgctggtaagatgctatgcagtaaaattctagagaagacagccaacccccagtggaatcagaacatcacgctgccagccatgtttccttctatgtgtgaaaaaatgagaatacgcatcattgactgggacagactgactcataatgacattgtggctacaacttacctcagcatgtcgaagatctcagctcccggcggcgaaattgaggtagacgattatctcggattcttacccacatttgggccttgctacattaatctttacggcagcccgagagaattcaccggtttccccgacccctacacggaactgaatactggaaagggggagggagtagcttatcgagggcggcttctacttagcttggagaccaaactggtcgaacacagcgagcagaaagtggaggacctaccagctgacgacatcctgagagtagaaaaatatctgcgcagaaggaagtacagcctgtttgccgctttctacagtgctaccatgctgcaggacgttgatgatgccatacagtttgaggtgagtatcggtaattatgggaacaagttcgacatgacttgtctgcccttggcaagcactactcagtacagcagggctgtcttcgacggttgtcactattattacctcccttggggtaacgtgaaaccagtggtagtgctaagttcttactgggaagacatatcacacagaattgagacccagaatcaacttctcggcattgctgacaggctcgaagccggactggagcaagtgcatcttgcgctcaaggcgcagtgttctacagaggacgtcgattccttggtcgcacagctgacagacgagctcatcgccggctgctctcagcccctgggagacatacacgaaaccccatccgctacacacctggatcaatatctctaccagctgaggacccaccacttaagccaaatcacagaggccgctctcgcattgaaactgggccactctgagctacccgcagcgttagaacaggccgaagactggttgctccggctgagagctctagctgaggagccacaaaactctctacctgacatcgtcatttggatgctgcagggtgacaaacgcgtcgcgtaccagcgggtccccgcccatcaagtgctctttagccgtcgcggcgcgaattattgcgggaaaaactgcgggaaactccaaactatcttcctaaagtatccaatggagaaggttccaggcgctaggatgcccgtgcagatccgggtgaaactgtggtttggcttgtcagtggacgagaaggagttcaaccaatttgctgaagggaagctcagcgtattcgccgaaacatatgagaacgagactaagctggccttagttggcaactgggggacaaccggcctaacgtaccccaagttctccgatgtcaccggcaagatcaaactgcctaaagattcatttcggccaagcgccggatggacctgggcgggcgattggtttgtgtgtcctgagaaaacattactgcacgacatggacgccggccacctcagctttgtcgaggaggtcttcgagaaccagactcgacttccaggagggcagtggatctatatgtctgataattatacagacgtgaacggagaaaaagtgctgcctaaggacgacatagaatgccccttaggttggaaatgggaggacgaagaatggagcaccgatctaaacagagccgttgatgagcagggatgggagtatagcataactattccccccgaaaggaaacctaaacattgggtccctgctgagaagatgtactatacccacagaagacgtcggtgggttcgcctgcgccgccgtgatttgagtcagatggaagctctgaaaagacacagacaagcagaggcggaaggagaaggctgggaatatgcctcacttttcggctggaagttccaccttgagtaccggaaaaccgatgcattccgccggcgtaggtggagacgccggatggagcctttggaaaaaactgggccagccgcagtatttgccctcgaaggtgcactgggcggcgtgatggacgataaatctgaagactccatgagcgtgtccaccctgtcattcggggtcaatcgccccaccatcagttgcatcttcgattatggaaacaggtaccacctccggtgttatatgtatcaggcaagagacctcgctgcaatggataaggattcctttagcgacccttacgccatcgtatctttccttcatcagagtcagaagactgtagtggtgaaaaataccctaaacccaacttgggaccagacgctgattttttatgaaattgagatctttggagaaccggccaccgtggctgagcagcctccctccatcgtagtggagctgtacgatcacgacacctacggcgctgacgagttcatgggaaggtgcatctgccagccgtctctcgaacgaatgccacggcttgcctggtttccactgactcggggaagccagccctcaggggaacttctggcctcttttgagttaatacagagagaaaagcctgctatccaccatatcccaggctttgaggtacaggaaacctctagaatcctggacgagagcgaagacactgatttaccttatccccccccccagcgggaagccaacatttacatggtcccccagaatataaaaccggcactgcagcggacggctattgaaatcttggcctggggtttaagaaacatgaagagctatcagttagccaacatctcttccccatcactggtggttgagtgtggagggcagacagtacagagctgcgttattaggaacctgagaaagaatcccaacttcgatatctgtactctgtttatggaagtgatgctgccaagggaagaattgtactgtccccctataaccgtgaaagttatcgataatcgacagttcggacggcgacctgtggtcgggcagtgcaccatacggtcattagaatcattcttatgcgacccctactcggccgagtctccctcaccgcagggaggacctgatgacgtctccctactgagtcctggcgaggatgtgctgatagatatcgatgacaaagaacccttgataccgatccagctggctgacgggctgagttcgctcgcgccgacaaatacggcgagcccgccatcctctccacacgaggaagaatttatagactggtggagcaaatttttcgcttcaatcggcgaaagagagaaatgcgggagctatttggagaaagactttgatacattaaaagtatatgacacccagctggagaacgtagaagccttcgagggtctgtctgatttctgtaataccttcaagctttatagaggaaagacacaggaggaaaccgaggatccgagtgtaataggggaattcaaaggtctgttcaagatttatcctctcccagaggaccctgccattcctatgccccctagacagtttcaccagctcgcggcccagggtccccaggagtgcctcgtgagaatttacatcgtgcgggcatttggcctacagcctaaagaccccaatggcaagtgtgacccgtatattaagattagcatcggtaagaagtctgtgtctgatcaagacaattacataccgtgcacgctggaacctgtgtttggaaaaatgtttgagctcacatgcacgctcccattggaaaaggatcttaagatcaccctctatgactatgatctccttagtaaggacgagaaaatcggcgagacggtagtggacctagaaaatagacttttgagtaagtttggcgctagatgtggtctgccacagacttactgtgtttcaggaccaaaccagtggcgcgaccagctgcgcccttctcagcttctccacttgttttgtcagcagcacagggtgaaagctcccgtttaccgcactgatcgggtgatgtttcaggacaaggaatactccattgaggagatagaagcaggccggatcccgaatccacatttaggccccgtggaggaaaggcttgccctgcatgtgcttcagcaacaaggacttgtgcccgaacacgtcgagtctagacctctgtattcacccctgcagcctgacatagagcaggggaagctgcaaatgtgggtcgatctgtttcctaaagctttgggacggcctgggcctccattcaatattactccacgaagagctcgccggttcttcttgcgctgtatcatatggaacacgcgggatgtgatcctcgatgacttgagcctgaccggcgagaagatgtccgacatctatgtaaagggatggatgattggcttcgaagagcacaagcagaaaacagatgtgcactatagaagcttaggtggcgagggcaatttcaattggcgtttcatcttccccttcgactatctgcccgcagaacaggtatgcaccattgccaagaaggacgctttctggaggctcgacaagactgagtcaaaaatcccggccagggtcgtgtttcagatttgggataatgataaatttagctttgatgatttcctcgggagtcttcagttggatctgaacagaatgccaaaacctgctaagacggccaaaaagtgctcactcgaccagcttgacgatgcattccatcccgagtggttcgtgagtctctttgaacagaagacggttaaaggatggtggccatgtgtcgccgaggagggtgagaagaagatcctcgcaggaaagctggaaatgacattggagattgtggcggaatccgagcatgaagaaaggcctgccggacagggcagagacgagcccaacatgaatcccaaattggaagatcccagaaggccagacacctcttttctctggttcacaagcccatataagacaatgaaattcatcctgtggcggcgatttaggtgggctattatcctctttattatcctcttcattctccttttgttcttggcaatcttcatctatgcctttcccaattacgcagcaatgaagctggtgaaacccttctcatag

SEQ ID NO: 48998 - DNA, 6357 bp, Artificial Sequence
  derived and/or modified sequence
atgttacgtgtctttatcctctacgccgagaatgttcacacacccgacactgacatctctgacgcctactgttcggccgtgttcgcgggtgttaaaaaacgcacaaaggtgatcaaaaactctgtcaaccctgtatggaatgaaggcttcgagtgggacttgaagggcattcccctagaccaaggttctgagttacatgtagtggttaaagaccacgaaaccatgggacgaaaccgattcctcggggaggcgaaagtccccctgcgtgaggttttagctacaccatcactatccgcctcctttaatgctcccttattggacactaaaaaacagcctactggcgcatctcttgtcctgcaggtgagttacaccccgctgcctggcgctgtgcccctttttcctccacctacacccttagagccctcacccacattgccggatcttgacgtcgtggccggaggaggccagtcaagagctgaaacatggagccttctgtctgatagtacaatggacacccgctatagcggcaagaagtggcccgcaccaacggacactgggggagaggaggacacagaggatcagggtctgacgggggatgaggccgaacccttcctggaccagtccgggggaccaggggcacccactacgcctcgcaaactgccaagcagacctcctccacactatccaggtatcaaacgcaagcgatccgctcctacgtcaagaaagcttctgagtgataagcctcaagatttccagattcgagtccaagttattgagggaagacagcttcccggtgtcaatattaagcctgtggtgaaagtgactgcagccggacaaacaaaacgcacaagaatccacaaaggaaactccccattgtttaatgagaccttatttttcaatctgttcgattctccgggtgagcttttcgatgagcccattttcatcactgtggttgactcacggtccctccgtaccgacgctctgctgggcgaatttaggatggacgtgggaactatctaccgagagcccaggcacgcgtacctgcgtaaatggttgctgctgagtgacccggacgacttctctgccggagcccgaggctacctgaagaccagtctctgcgttctgggaccaggcgacgaagcgcctctggagagaaaggacccatcagaggataaggaggacatagaaagcaatctgctgcgcccaaccggcgtggctctcagaggggcacatttctgtctcaaggtgttcagggctgaagatttgccccagatggatgatgcggtcatggacaacgtcaaacagatttttggcttcgagtctaataaaaagaaccttgtggacccgttcgttgaagtgtctttcgctgggaagatgctgtgctccaagatattagagaagaccgccaacccccagtggaaccagaacataaccttacccgcaatgtttccctccatgtgtgaaaagatgagaataaggataatagattgggacaggctgacccataacgacatagtggctaccacgtacctgtcaatgtccaaaattagtgcccctgggggagagatcgaggtagacgactatctcggtttcttacccacatttggaccgtgttacattaatctctatggttctccgcgtgagtttacaggatttcctgatccatacacggaactgaataccggcaagggggagggagtagcttatcgcggtaggttactgctctcgctggaaaccaaactggtcgagcactctgaacagaaagtcgaagacctgccggctgacgacatcttacgtgtggagaaatacctgcgacggcgtaaatactctctctttgccgctttttatagcgccacaatgctgcaggacgtggatgacgccattcagttcgaggtcagtatcgggaattatggcaataagttcgatatgacctgcttgcccctggccagcactactcagtattccagggcagtgtttgacggttgccactactactatcttccttggggcaatgtgaagccggtcgtagttctgtcatcatactgggaagacatctcacaccgaattgagactcagaatcagctcttaggcatcgctgaccggctggaggcaggactggagcaggtgcatctggctttaaaggctcagtgttccacggaagacgtcgattccctggttgcacagctcacagacgaactgattgccggatgttcccaacccttgggcgatattcatgaaactccaagcgccactcaccttgaccaatatctttaccagcttaggactcaccacctgtctcagatcactgaagctgcattggctctgaagttgggccactcagaactgccagcagctttggaacaggcagaggactggctgttgagactgcgagccctagccgaggagccgcagaacagcctccccgatattgtcatctggatgttgcaaggggataaaagggtcgcataccaacgggtgcccgctcaccaggtgctgttttcccggaggggtgctaattactgcggaaaaaattgtggaaaactgcagaccatcttccttaaataccccatggagaaggtcccaggagctaggatgcccgtgcagatcagagtgaagttgtggtttggtctgagcgtggacgagaaagaatttaatcagtttgctgaaggaaagctaagcgttttcgcagagacttacgaaaacgagactaaactcgcactagtcggaaactggggtacaaccggtcttacgtaccccaagttcagcgacgtgactggaaagatcaaactgccaaaagattcctttaggccgagcgctggatggacttgggctggagactggttcgtgtgtccagaaaagaccctgctacatgacatggatgccggacatttatcatttgtcgaagaggtcttcgagaatcagacacggcttcctggtggtcagtggatatacatgagtgacaactatacagatgtaaacggcgagaaagtactgcctaaagatgatatcgagtgccccctaggctggaagtgggaggatgaggagtggagtacggatctgaatcgcgcagtggatgaacagggctgggaatactcaatcacaattcctcctgagagaaagccgaagcactgggttcctgccgagaaaatgtactacactcacagaagaaggaggtgggtgcgcctccggagacgagacctatctcaaatggaggctcttaagcgtcatcgtcaggctgaggcagaaggtgaaggttgggaatatgctagcctatttgggtggaagtttcacttagagtaccgcaaaacggatgcattccgccgacgcagatggcgtagacggatggagcccctggaaaagactggccctgccgcagtcttcgcgctagaaggggcactggggggtgtgatggacgacaaaagcgaagattccatgtccgtttccactctttcttttggagtgaaccggccaacaatcagctgcattttcgactatggtaatcgttatcacctgcgttgctatatgtatcaggcgagagacctggccgcaatggacaaggactctttttctgacccctacgcaatagttagcttcctgcatcagagtcagaaaacggtagtggtgaagaacacactgaaccccacatgggaccaaaccctcatcttctacgagattgaaatcttcggtgagcctgcaacagtggctgaacagccaccatctatcgttgtcgaactctatgaccacgacacctacggagctgacgagtttatgggccgatgcatttgtcagccatccctcgagagaatgcctcgattggcgtggttccctttaacacgaggcagccagccttctggtgaacttctggcctcattcgaactcatccagcgggaaaaacccgctatacaccacatccccggttttgaagtccaggagacctcaagaatcctggacgagtctgaggacacggacctcccttatccccctcctcaaagggaagccaacatctatatggtgcctcaaaacatcaaacctgcccttcagcgcactgcaatcgaaatcctcgcttgggggctgcgaaacatgaagagttaccagctcgccaatattagtagtccatcactggtggtggagtgcggtggacaaactgtccaatcatgcgtgatccgcaatttaaggaagaatcccaatttcgatatttgcaccttgttcatggaagttatgttgcctcgagaagagctttactgtccccctatcacagtcaaagtgatcgataacagacagtttggacgtcgccctgtggtgggccagtgcacaatacgatctcttgagagttttctatgcgatccttatagcgccgaaagcccatctccccaggggggtcccgacgacgtgtccctgctaagtcccggtgaggacgtccttattgacatcgacgacaaagagcccttgatccccatccaactcgccgacggcctgagttctttagctccaaccaatacggcctcgcctcctagctctcctcatgaagaggagtttatcgattggtggagtaaatttttcgcgtccatcggtgaacgggaaaagtgtgggagctatctggaaaaggatttcgatacgctcaaagtctatgacacacagctcgagaacgtggaagctttcgagggactttccgacttttgtaacaccttcaaattgtacagagggaagacacaggaggagaccgaagatccatctgtaatcggggaattcaaaggcctttttaagatctaccccctccccgaggaccctgcaatcccaatgccaccacgacaattccaccagctggctgctcaaggtccgcaggagtgtctggtcagaatctatatcgttagggccttcgggctgcaaccaaaagatcccaacggaaaatgcgacccatatattaagatttcaattgggaagaaatcggtcagcgaccaggacaactacattccctgcacactagagccggttttcggcaagatgttcgagctgacctgtaccctacctctggaaaaggacttgaagatcaccttgtacgattacgatttgctgtccaaggatgagaagatcggggaaaccgtcgtggacctagaaaaccgcctgctatccaagttcggggctagatgtggacttcctcagacctactgtgtgtcgggtccaaaccagtggagagaccagctgcgcccttctcagctcttgcacctcttttgtcagcagcacagagtgaaagctcccgtctataggaccgatcgggtgatgtttcaagataaagagtattccattgaggaaattgaggcgggaagaattccgaacccacatttaggaccagtcgaggagcggctggcactccatgtgctgcagcagcagggcctggttccagaacatgtggagagccgcccactctattcaccgctccagccagatattgaacaggggaagctgcagatgtgggtggacttattcccgaaagctcttggcagaccgggtcccccttttaatattacgccaaggagagctaggcgattttttctgcgatgcatcatctggaacactcgcgacgtgattttagacgatctgtccctgacaggggagaaaatgtcagatatctatgtaaaaggatggatgattgggttcgaggagcacaaacagaaaactgacgtccactacaggtctttgggcggtgagggcaattttaactggaggttcatctttcctttcgactacctgcccgcagaacaggtgtgtactatcgccaaaaaggacgcattctggcgccttgataaaactgaatcaaagattcccgcaagggtcgtatttcagatatgggacaacgacaaattcagcttcgatgacttcctcggcagtttgcagctcgatctgaaccgtatgcccaagcctgccaaaactgctaagaagtgttccctggatcagctggacgacgcgtttcacccagagtggtttgtaagtttgttcgaacaaaaaacagtgaaggggtggtggccgtgtgttgcagaggagggagagaagaaaatcctggctggcaagctcgaaatgacactagagatcgtggccgagtccgaacacgaagaaaggcctgctggccagggccgagatgagccgaatatgaaccccaagttggaagatccacgcagaccagatacttctttcttatggttcacctccccctataagaccatgaagttcatcctctggcgcagattcaggtgggctatcatcctctttatcattctgttcatcttgcttctgtttctcgcaatttttatctacgcttttccgaattacgcagccatgaaattggttaagcccttcagttag

SEQ ID NO: 48999 - DNA, 6357 bp, Artificial Sequence
  derived and/or modified sequence
atgctaagagtgtttattctatacgcagaaaatgtgcacacacctgatactgatatcagcgacgcctactgttctgccgtgtttgctggtgtcaaaaaaaggaccaaggtgattaaaaatagtgtaaatccggtgtggaatgagggattcgaatgggacttaaaaggaataccgctcgaccagggttccgagctgcatgtggtggtgaaggatcatgagaccatgggtcggaaccgcttcctaggggaagccaaggtaccactcagggaggttctcgccacaccatctctgtcagcctccttcaacgccccccttctggacaccaaaaagcagcctacaggagcctctctggtattgcaggtatcttataccccccttcctggggccgtacctctttttcccccaccaactccattggagccgagcccaactctgcctgatctagacgtcgtggcaggaggcggacaatccagggccgagacatggagtctgttgtccgacagcactatggacacccgctactctggtaagaaatggcccgccccaaccgacacaggaggggaggaggataccgaggatcagggcctgacgggagatgaagctgagcccttcttggaccagagcggcggaccaggagccccgactacaccaagaaagctgccatccagaccgccccctcactatcccggcattaagaggaagcgcagcgctccaaccagtagaaaacttctgtccgacaagccacaagactttcaaattagagtgcaagtgattgagggaaggcaactacctggggtcaatatcaagccagtagtgaaggttaccgctgccggacaaaccaagcggacacggattcacaaaggtaacagtcctctcttcaacgaaacactattctttaacctgtttgatagcccaggcgagttgtttgatgaacccatctttattacagtcgtggactctaggtcactgagaacagatgcactgctcggcgagttccgcatggacgtgggaactatctacagagaaccgcggcatgcgtatctgagaaaatggctcctcttaagcgatcccgatgacttctctgctggagcaagggggtaccttaaaacctctctgtgtgtgttaggacccggcgacgaagccccactggagagaaaggatccaagcgaggataaagaggatatagaatccaatctgttaaggccaaccggggtagctttgagaggggcccatttttgtctgaaagtgttccgggccgaagacctaccacagatggatgacgctgttatggacaacgttaaacagatcttcgggttcgagtctaacaaaaagaacctcgtggatccgtttgtagaagtttccttcgccgggaaaatgctgtgtagcaaaatcctggagaagaccgcaaacccccagtggaaccagaatataaccctcccggcaatgtttccctcaatgtgcgaaaagatgagaatcagaatcatcgattgggaccggctgacccacaacgacatcgtcgctaccacctacctgagcatgtcaaaaatcagcgccccaggaggtgaaattgaagttgacgactacctaggatttctccccacatttgggccttgctacatcaacctgtatggatcaccaagagagttcacggggtttcccgacccctatactgaattgaacaccgggaagggagagggggtcgcatatcgcggaaggctcttgctgtctctcgaaactaagttggtcgaacattctgagcagaaggtcgaagacctccccgctgatgatatactgagagtcgagaagtatctccggcgccggaaatactcactgtttgccgccttctactctgctactatgctccaagacgtggacgacgctatccagtttgaagtctcgatcggaaactatggcaacaaatttgacatgacttgcctacctctcgctagcactacgcaatactcaagggcagttttcgacggctgtcactattactacttaccctggggaaatgttaagcccgtcgtggtcttatcctcttattgggaggatatctctcacaggatcgagactcagaatcagctgcttggcatcgctgaccgactggaggccggcctggaacaggtgcacctggctcttaaagcccaatgtagtaccgaggacgtggatagtctggtagcccagctaactgacgagctcattgccggctgttctcagcccctgggtgacattcacgaaacgcctagtgccacgcatctggatcaatatttatatcagttaaggacgcatcatttgtcccagatcacagaggccgccctcgctctgaaactgggccattccgaattgccggcagctctggagcaagcagaggactggttgttgagacttagagcattagcagaagaacctcaaaactctctgccagatatcgttatctggatgttgcaaggtgataagagggttgcatatcaacgggtgccagctcaccaggtgcttttcagcagaaggggggctaactactgtgggaagaattgtggaaagctccagacgatcttccttaaataccccatggagaaagttcctggagcacgtatgccagtgcagatccgggtgaagctgtggtttggactaagcgtggacgaaaaagaatttaaccaatttgccgagggtaagttatccgtgttcgcagaaacatatgagaacgagacaaagctggcactggtgggaaattgggggactactggtctgacttatcctaaatttagtgacgtgacgggaaagatcaagcttcccaaagattcatttaggccaagtgccgggtggacctgggccggagattggttcgtttgtccagaaaagactttactgcatgacatggacgccggacatctctccttcgtcgaggaagttttcgaaaatcagacccggttaccgggtgggcaatggatctatatgagtgacaactacacggacgttaacggggagaaggtgctgcctaaagacgatatagagtgtcccctcggttggaagtgggaggacgaggaatggagtacagatctcaatcgagcagtggacgagcagggttgggaatacagcattacaattccacctgagagaaaacccaaacattgggtgccagccgagaaaatgtactacacccataggcgtagacgatgggttagactccgccgccgcgacctgagccagatggaggcactaaaacgccacagacaggcagaggcagagggcgaaggctgggagtacgcaagtctatttggatggaaattccacctggaatacagaaagacggacgcttttcgcaggaggcggtggcgacggcgcatggaacccctcgaaaaaacagggccagccgcagtgttcgcactggaaggtgcccttggcggggttatggacgataaatcagaagacagtatgtcagttagcactctcagcttcggcgtgaaccgcccaaccatcagttgtatttttgattatgggaataggtaccacttgcgttgctatatgtaccaggcacgcgacctggccgccatggacaaggattcattttcagacccctatgcaatagtgtcctttctgcatcaaagtcaaaaaaccgtggtagttaagaataccttaaacccaacttgggatcagaccctcatattttatgaaattgagattttcggggagccagcaaccgtagcagagcagccccctagcattgtggtggaattatacgatcatgacacctacggcgctgatgagtttatgggtcgatgtatttgtcagcctagcttagaaagaatgcctcgcctggcttggttcccgttgacccgaggttctcagcccagtggggagctgctggcttcttttgagctgattcaacgcgagaagcctgccatccatcacatccccggttttgaagttcaggagacctcccggattctcgacgaatctgaggatacagacctgccttacccacctccccagcgcgaagccaacatttacatggtcccccaaaacatcaaacctgctctgcagaggacagcaatcgaaattttggcctggggcctccggaatatgaagagttaccagttggccaacataagttctcctagtttggtggtcgaatgcggcggtcagaccgtgcagagctgcgtcattcgcaatttaagaaagaatccaaatttcgacatttgcaccttgtttatggaggtgatgctgccacgagaagaactctactgcccacccatcacagtgaaagtgatcgataaccggcagtttggcaggcgcccagtcgtcgggcagtgtactataaggagtctcgaatccttcctctgtgacccatactctgccgaaagtcccagccctcagggggggcccgacgatgtgagccttctttctccaggagaggatgtccttatcgatatcgacgataaagagcccctgatccctatacagttagctgatggtctcagcagcttggcaccaaccaatacagcttcacccccaagttcaccccacgaggaggagtttatcgactggtggtccaaattctttgctagtattggcgaacgggagaagtgtgggagctacttggaaaaagattttgataccctgaaagtgtacgatacccaactagaaaacgtcgaagcatttgagggtctcagtgacttttgcaatacatttaaactgtacaggggcaagacgcaggaagagacagaagatcctagtgtgataggagaatttaagggcctcttcaagatttatcccctaccggaagatccagccatccctatgccaccccggcagttccatcagcttgccgctcaagggcctcaggaatgtctggtgcgaatctatatcgtgagggctttcggtctgcaaccaaaggatcccaatggcaagtgtgacccctatatcaaaatctcgatcgggaagaaaagtgtctcggatcaggataattacattccctgtacactcgagccagtgttcgggaagatgttcgagctgacttgcaccctgcctttagaaaaggacctgaaaatcaccctttacgattatgatctcttaagtaaggacgagaaaatcggcgagacggtagttgatctcgagaatagactccttagtaaattcggcgcgaggtgtggtttgcctcagacctattgtgtgtcgggaccgaaccagtggagggatcaactgaggccttcacaactgctgcacttgttctgccagcagcatcgtgtgaaagctcccgtctatcggaccgaccgtgtgatgttccaggacaaggagtacagtatcgaggaaatcgaggctggacgtatccctaatccccatctgggaccggtggaagagcgacttgccttgcacgtgctgcaacagcaggggcttgttccagaacatgtggagtctcggccattatattccccattgcaacccgatatcgagcaggggaagctccagatgtgggtggacctgtttccaaaggcccttgggagaccaggccccccattcaacattaccccacggagagcgcgccgttttttcctgagatgcatcatctggaatacccgtgacgtgattctggatgatctgtcgctcacaggtgagaaaatgtccgacatttacgtcaaaggctggatgatcggctttgaagagcataaacagaagaccgacgtgcattacagatctctgggcggggagggtaatttcaattggaggttcatttttccctttgactatttgcctgccgagcaggtgtgtacaatagctaagaaagatgctttctggcggctcgacaaaacagagtcaaaaatacccgcaagagtagtgttccaaatttgggataatgataagttttccttcgatgactttctcggatcccttcagctggacctgaaccggatgcccaagccagcgaagactgccaagaagtgctctctggatcaactggacgacgctttccatcctgagtggtttgtgtcactgttcgagcaaaagaccgtgaaaggatggtggccttgcgttgctgaggagggtgagaagaagatcctcgctgggaaactcgaaatgactctcgaaatagttgccgaatctgaacacgaggagagacctgctgggcagggtagagacgagcctaacatgaatccaaaactcgaagacccgcggaggcctgacacctcctttctctggtttacaagcccttacaagactatgaagtttatcctttggcggcgcttccgctgggcgattatactgttcattattttgttcatactgcttctgttcctggcaatcttcatttatgcattcccgaactacgccgcaatgaagctggtaaaacccttttcttag

SEQ ID NO: 49000 - DNA, 6357 bp, Artificial Sequence
  derived and/or modified sequence
atgctgagagtcttcatcctctatgctgaaaatgtgcatacccccgatacagacatttccgacgcttattgtagtgccgtgtttgccggtgttaagaagagaacaaaggtgatcaagaattctgttaacccggtctggaacgaaggatttgaatgggatctgaagggcatcccccttgatcaaggctcagaacttcacgtggttgtgaaggaccacgaaaccatggggaggaataggttcctgggagaagctaaagtaccacttcgtgaagtcctcgccaccccatcactgtctgcctcattcaacgccccacttctggatacaaagaaacaacctaccggggcatcactcgtgctacaggtgagctacactccactgcccggtgctgtcccactctttccaccaccaacccccctcgagccctcccctaccctgccggacctggatgttgtcgccggaggcggccagtctagagccgaaacctggtccctgctctcagactctaccatggataccaggtacagcggaaagaagtggcctgctccaactgatacaggaggcgaggaagatactgaagaccaaggactgaccggagacgaagccgaacctttcctggaccagtcaggcggacccggcgcacccacaacacctagaaaactgccctcccgacctcctccccattatcccggcatcaagcgtaagagaagcgctccgacatctcgcaagttactatcagataagcctcaagacttccagatccgcgttcaagtcatcgaggggcggcaattgcctggcgtgaacatcaagcctgttgttaaagtcaccgccgccggccagaccaaaagaacacgaatacataagggaaactcgccgctattcaatgaaactcttttttttaacctcttcgattcccccggtgagctattcgacgagcctattttcataacagtggtggacagccgctctttgaggactgacgcccttttaggcgaatttcgcatggacgtcggaaccatctatcgcgagccgcgccacgcatatttgagaaaatggctgctgctctcagaccctgatgacttctcagccggggcacgcgggtatctcaagacatcactctgcgtgttaggacctggagatgaagcccccctagagagaaaggatccgtcagaagacaaagaagatatagaaagcaacctactgcgacccacaggcgttgcactccgcggggctcatttctgcctgaaagtgttcagagccgaggacttgcctcagatggatgacgcagtgatggacaacgtgaaacagattttcggattcgagtcgaacaaaaaaaacctcgttgacccattcgtagaagtatcattcgctggtaaaatgttgtgttcgaagatcttagagaagacagctaatcctcaatggaatcagaatataaccctacctgctatgtttccatcaatgtgcgagaaaatgagaatacgaatcattgactgggacagattgacacacaatgacattgtagctaccacgtacttatctatgagcaagatctccgctcctggcggcgaaatcgaagttgatgattaccttgggtttctgcccacattcggcccatgttacataaatttgtacggctctccaagggagtttacaggatttccagacccttacaccgagctgaacacgggaaaaggtgaaggcgttgcctatcggggaagactactcttgagtttggagacaaaactggtggaacactctgaacaaaaggtcgaagatctcccggccgacgacatactgagagtggaaaagtatcttaggcgccgaaaatacagcttgtttgccgctttttacagtgccaccatgcttcaagatgtggatgacgctatacagttcgaagtatccatcggtaactacggaaacaagtttgacatgacatgcttgccactcgctagcactacccagtactctagagccgtctttgatggatgccactactattatttaccttggggcaatgttaaaccagtggttgtgttatcatcgtattgggaggatatcagtcaccgaatcgaaacccagaatcagctattaggaatcgccgaccgactcgaagcggggctggagcaagtgcatctggcactaaaggcccagtgcagcacggaagatgtggacagtctagtggcccagcttactgatgagctcatcgcaggctgttctcaaccacttggcgacattcacgagactccttcagcgacccacctagaccaatacttataccaactgaggactcaccacttatcccagatcactgaggcagcattagcgcttaaactagggcacagcgaactccctgcagctcttgaacaggctgaagactggctgcttaggttacgggctctcgccgaagaaccccaaaatagcctgcctgatattgtaatctggatgctgcagggggacaagagagtggcatatcagcgagtgccagcccatcaggtcctgttttcacgacgcggcgctaattattgtggcaaaaactgtggtaagctacagaccatcttcctaaaatatcccatggaaaaagtccctggtgccaggatgcctgtgcagatccgtgtaaaactgtggtttggactgtcagttgacgaaaaggaatttaatcagttcgcagaaggcaaactatccgtgttcgccgaaacctatgaaaatgaaacaaaattggccttggttggaaattggggcacgacaggactgacatacccaaaattcagtgacgtaactggcaaaattaagcttccaaaagattcattccgaccatcagcgggttggacttgggccggcgattggttcgtgtgtcctgaaaaaacgctgctccacgatatggacgccgggcatctctcatttgttgaagaggttttcgaaaatcagacccgtcttccaggggggcaatggatctatatgagtgataactataccgatgtgaacggtgagaaggtgctgcctaaagatgatatagagtgccctcttggatggaaatgggaagatgaggaatggtcaaccgacctgaaccgggccgtcgacgaacagggctgggagtatagcatcacgattcccccagaaagaaaaccaaaacattgggtcccagcagagaagatgtactacactcacaggagacgtcgctgggtgagacttaggagaagagacctgtcacagatggaagccctgaagagacaccgacaggctgaagccgagggcgagggttgggaatacgcaagcctgtttggctggaagtttcatctggaatacaggaagacagacgccttcagacgtcgaagatggcgaaggaggatggaacccctggaaaaaaccggcccagccgccgtgtttgccctggaaggtgctttaggaggcgttatggatgataaaagcgaagattctatgtccgttagtaccctctcctttggagttaaccgtccaacgatttcatgtatctttgattacggcaaccgctaccacttacggtgttatatgtaccaggcaagggatctggctgccatggataaggactcattctctgacccctatgcaatagtgtcattcctgcatcaaagccaaaagactgtggtcgttaagaatacccttaatcctacttgggatcaaacactgatcttttatgaaatagaaatctttggtgagcccgcaacagtcgcggaacaacccccaagcattgtggtcgaattatacgatcacgacacatacggcgcagacgaattcatgggaagatgtatttgccagccctctctcgaacgcatgccaagactggcctggttcccccttaccaggggcagtcaaccttccggggagcttctggcttcctttgagctcatccagcgagaaaagcctgcaattcaccatatcccaggatttgaggtgcaagagaccagccgcattctggatgaatccgaggacaccgacctcccttaccccccccctcagagagaagcgaacatttatatggtaccacagaacatcaaacctgccctgcaacgaacagctattgaaatcctggcctggggactgaggaatatgaagtcctaccaactcgcaaacattagctcaccgtcattagttgttgaatgcgggggccaaacagtccagtcttgtgtgataagaaacctgcgaaagaaccctaacttcgacatttgtactctcttcatggaagtcatgttaccaagagaggagctatactgccctccaatcaccgtgaaagtgatcgataatcggcagttcggcagaagacctgtcgtcggtcagtgcacaattcgcagtcttgagagttttttatgcgacccctactccgccgagtctccctcaccccaagggggccctgatgacgtgagcctgctttccccaggcgaggacgttcttatcgacattgatgacaaggaaccattaatccctatacaactggccgacggcctgagctcccttgcgcccacaaacacggccagcccccctagctcaccccatgaagaggaatttattgattggtggtctaaattctttgcctctatcggtgaaagagagaagtgcgggtcttacctggaaaaagactttgacacattgaaagtgtatgacacgcagctggagaatgtggaagcttttgaaggtttaagtgacttctgtaatacctttaagctgtacagaggtaagacccaagaagagacagaggaccctagcgtcatcggcgagtttaaaggactctttaagatctacccactgcccgaggatcctgccattcctatgccccctcggcagttccatcagttagcagcacagggcccccaggagtgcttagtccgaatctacatcgtccgagcatttggcttgcagccaaaggatcctaatgggaaatgcgacccctacattaaaataagtattggaaaaaaatcagttagcgatcaggataactacattccttgcaccctggagcccgtctttggcaaaatgtttgaactaacttgtacattaccgctcgagaaagatctgaaaatcaccctgtacgactacgacctacttagcaaagatgaaaaaattggggagaccgtcgtcgatcttgaaaaccgcttgctgagtaagtttggcgctcgctgcggcctcccacaaacctactgtgtgtccggccctaaccaatggcgggatcagttgcgtccctcccaactgctgcaccttttttgccagcagcatagagttaaagcccccgtgtaccgtaccgacagagtgatgtttcaagataaagagtattctatcgaagagattgaggcaggtagaattccgaatccgcacctcggcccagtcgaagagcgattagccctgcacgtgttacagcaacaaggcctggtacccgaacacgtcgaatccagacctttgtacagtcccctccaacctgatatcgaacagggtaagctgcaaatgtgggttgatctcttccccaaggcattgggccgccccggaccaccgttcaatatcacaccacgtcgagcgcggcgcttctttctccgatgtatcatttggaatacacgagatgtgatcctggatgacctcagtctgaccggcgaaaagatgtcagatatctatgttaaaggatggatgatcggcttcgaggagcataagcagaaaaccgacgttcattacaggagccttggaggcgagggaaactttaattggcgatttattttcccattcgactatcttcccgcggaacaggtctgcacaattgccaaaaaagacgcattctggaggctcgacaaaaccgaaagcaagatccccgcccgcgtcgtgtttcagatttgggataacgacaagttcagcttcgatgattttctaggatcccttcaattagaccttaatcgcatgccgaaaccagctaaaacggccaaaaagtgcagtctggaccagctggacgacgccttccaccctgaatggttcgtatctctcttcgagcagaaaacagttaaaggatggtggccgtgtgtagccgaagagggagaaaagaaaatactggcaggaaagctggagatgacacttgaaattgtggctgaaagcgaacatgaagaaagacctgccggccaaggtcgtgatgaaccgaacatgaatccaaaacttgaggacccaagacgaccagatacaagttttctatggtttacatcgccttataaaacaatgaaattcatcctctggcgccggttccgatgggctataatccttttcattattctctttatactcttgttgttcctagccatctttatctatgcatttcccaattacgccgccatgaaacttgttaagcctttcagttag

SEQ ID NO: 49001 - RNA, 6357 nt, Artificial Sequence
  derived and/or modified sequence
augcuaagaguguuuauucuauacgcagaaaaugugcacacaccugauacugauaucagcgacgccuacuguucugccguguuugcuggugucaaaaaaaggaccaaggugauuaaaaauaguguaaauccgguguggaaugagggauucgaaugggacuuaaaaggaauaccgcucgaccaggguuccgagcugcaugugguggugaaggaucaugagaccaugggucggaaccgcuuccuaggggaagccaagguaccacucagggagguucucgccacaccaucucugucagccuccuucaacgccccccuucuggacaccaaaaagcagccuacaggagccucucugguauugcagguaucuuauaccccccuuccuggggccguaccucuuuuucccccaccaacuccauuggagccgagcccaacucugccugaucuagacgucguggcaggaggcggacaauccagggccgagacauggagucuguuguccgacagcacuauggacacccgcuacucugguaagaaauggcccgccccaaccgacacaggaggggaggaggauaccgaggaucagggccugacgggagaugaagcugagcccuucuuggaccagagcggcggaccaggagccccgacuacaccaagaaagcugccauccagaccgcccccucacuaucccggcauuaagaggaagcgcagcgcuccaaccaguagaaaacuucuguccgacaagccacaagacuuucaaauuagagugcaagugauugagggaaggcaacuaccuggggucaauaucaagccaguagugaagguuaccgcugccggacaaaccaagcggacacggauucacaaagguaacaguccucucuucaacgaaacacuauucuuuaaccuguuugauagcccaggcgaguuguuugaugaacccaucuuuauuacagucguggacucuaggucacugagaacagaugcacugcucggcgaguuccgcauggacgugggaacuaucuacagagaaccgcggcaugcguaucugagaaaauggcuccucuuaagcgaucccgaugacuucucugcuggagcaaggggguaccuuaaaaccucucuguguguguuaggacccggcgacgaagccccacuggagagaaaggauccaagcgaggauaaagaggauauagaauccaaucuguuaaggccaaccgggguagcuuugagaggggcccauuuuugucugaaaguguuccgggccgaagaccuaccacagauggaugacgcuguuauggacaacguuaaacagaucuucggguucgagucuaacaaaaagaaccucguggauccguuuguagaaguuuccuucgccgggaaaaugcuguguagcaaaauccuggagaagaccgcaaacccccaguggaaccagaauauaacccucccggcaauguuucccucaaugugcgaaaagaugagaaucagaaucaucgauugggaccggcugacccacaacgacaucgucgcuaccaccuaccugagcaugucaaaaaucagcgccccaggaggugaaauugaaguugacgacuaccuaggauuucuccccacauuugggccuugcuacaucaaccuguauggaucaccaagagaguucacgggguuucccgaccccuauacugaauugaacaccgggaagggagagggggucgcauaucgcggaaggcucuugcugucucucgaaacuaaguuggucgaacauucugagcagaaggucgaagaccuccccgcugaugauauacugagagucgagaaguaucuccggcgccggaaauacucacuguuugccgccuucuacucugcuacuaugcuccaagacguggacgacgcuauccaguuugaagucucgaucggaaacuauggcaacaaauuugacaugacuugccuaccucucgcuagcacuacgcaauacucaagggcaguuuucgacggcugucacuauuacuacuuacccuggggaaauguuaagcccgucguggucuuauccucuuauugggaggauaucucucacaggaucgagacucagaaucagcugcuuggcaucgcugaccgacuggaggccggccuggaacaggugcaccuggcucuuaaagcccaauguaguaccgaggacguggauagucugguagcccagcuaacugacgagcucauugccggcuguucucagccccugggugacauucacgaaacgccuagugccacgcaucuggaucaauauuuauaucaguuaaggacgcaucauuugucccagaucacagaggccgcccucgcucugaaacugggccauuccgaauugccggcagcucuggagcaagcagaggacugguuguugagacuuagagcauuagcagaagaaccucaaaacucucugccagauaucguuaucuggauguugcaaggugauaagaggguugcauaucaacgggugccagcucaccaggugcuuuucagcagaaggggggcuaacuacugugggaagaauuguggaaagcuccagacgaucuuccuuaaauaccccauggagaaaguuccuggagcacguaugccagugcagauccgggugaagcugugguuuggacuaagcguggacgaaaaagaauuuaaccaauuugccgaggguaaguuauccguguucgcagaaacauaugagaacgagacaaagcuggcacuggugggaaauugggggacuacuggucugacuuauccuaaauuuagugacgugacgggaaagaucaagcuucccaaagauucauuuaggccaagugccggguggaccugggccggagauugguucguuuguccagaaaagacuuuacugcaugacauggacgccggacaucucuccuucgucgaggaaguuuucgaaaaucagacccgguuaccgggugggcaauggaucuauaugagugacaacuacacggacguuaacggggagaaggugcugccuaaagacgauauagaguguccccucgguuggaagugggaggacgaggaauggaguacagaucucaaucgagcaguggacgagcaggguugggaauacagcauuacaauuccaccugagagaaaacccaaacauugggugccagccgagaaaauguacuacacccauaggcguagacgauggguuagacuccgccgccgcgaccugagccagauggaggcacuaaaacgccacagacaggcagaggcagagggcgaaggcugggaguacgcaagucuauuuggauggaaauuccaccuggaauacagaaagacggacgcuuuucgcaggaggcgguggcgacggcgcauggaaccccucgaaaaaacagggccagccgcaguguucgcacuggaaggugcccuuggcgggguuauggacgauaaaucagaagacaguaugucaguuagcacucucagcuucggcgugaaccgcccaaccaucaguuguauuuuugauuaugggaauagguaccacuugcguugcuauauguaccaggcacgcgaccuggccgccauggacaaggauucauuuucagaccccuaugcaauaguguccuuucugcaucaaagucaaaaaaccgugguaguuaagaauaccuuaaacccaacuugggaucagacccucauauuuuaugaaauugagauuuucggggagccagcaaccguagcagagcagcccccuagcauugugguggaauuauacgaucaugacaccuacggcgcugaugaguuuaugggucgauguauuugucagccuagcuuagaaagaaugccucgccuggcuugguucccguugacccgagguucucagcccaguggggagcugcuggcuucuuuugagcugauucaacgcgagaagccugccauccaucacauccccgguuuugaaguucaggagaccucccggauucucgacgaaucugaggauacagaccugccuuacccaccuccccagcgcgaagccaacauuuacauggucccccaaaacaucaaaccugcucugcagaggacagcaaucgaaauuuuggccuggggccuccggaauaugaagaguuaccaguuggccaacauaaguucuccuaguuugguggucgaaugcggcggucagaccgugcagagcugcgucauucgcaauuuaagaaagaauccaaauuucgacauuugcaccuuguuuauggaggugaugcugccacgagaagaacucuacugcccacccaucacagugaaagugaucgauaaccggcaguuuggcaggcgcccagucgucgggcaguguacuauaaggagucucgaauccuuccucugugacccauacucugccgaaagucccagcccucagggggggcccgacgaugugagccuucuuucuccaggagaggauguccuuaucgauaucgacgauaaagagccccugaucccuauacaguuagcugauggucucagcagcuuggcaccaaccaauacagcuucacccccaaguucaccccacgaggaggaguuuaucgacuggugguccaaauucuuugcuaguauuggcgaacgggagaagugugggagcuacuuggaaaaagauuuugauacccugaaaguguacgauacccaacuagaaaacgucgaagcauuugagggucucagugacuuuugcaauacauuuaaacuguacaggggcaagacgcaggaagagacagaagauccuagugugauaggagaauuuaagggccucuucaagauuuauccccuaccggaagauccagccaucccuaugccaccccggcaguuccaucagcuugccgcucaagggccucaggaaugucuggugcgaaucuauaucgugagggcuuucggucugcaaccaaaggaucccaauggcaagugugaccccuauaucaaaaucucgaucgggaagaaaagugucucggaucaggauaauuacauucccuguacacucgagccaguguucgggaagauguucgagcugacuugcacccugccuuuagaaaaggaccugaaaaucacccuuuacgauuaugaucucuuaaguaaggacgagaaaaucggcgagacgguaguugaucucgagaauagacuccuuaguaaauucggcgcgaggugugguuugccucagaccuauugugugucgggaccgaaccaguggagggaucaacugaggccuucacaacugcugcacuuguucugccagcagcaucgugugaaagcucccgucuaucggaccgaccgugugauguuccaggacaaggaguacaguaucgaggaaaucgaggcuggacguaucccuaauccccaucugggaccgguggaagagcgacuugccuugcacgugcugcaacagcaggggcuuguuccagaacauguggagucucggccauuauauuccccauugcaacccgauaucgagcaggggaagcuccagauguggguggaccuguuuccaaaggcccuugggagaccaggccccccauucaacauuaccccacggagagcgcgccguuuuuuccugagaugcaucaucuggaauacccgugacgugauucuggaugaucugucgcucacaggugagaaaauguccgacauuuacgucaaaggcuggaugaucggcuuugaagagcauaaacagaagaccgacgugcauuacagaucucugggcggggaggguaauuucaauuggagguucauuuuucccuuugacuauuugccugccgagcagguguguacaauagcuaagaaagaugcuuucuggcggcucgacaaaacagagucaaaaauacccgcaagaguaguguuccaaauuugggauaaugauaaguuuuccuucgaugacuuucucggaucccuucagcuggaccugaaccggaugcccaagccagcgaagacugccaagaagugcucucuggaucaacuggacgacgcuuuccauccugagugguuugugucacuguucgagcaaaagaccgugaaaggaugguggccuugcguugcugaggagggugagaagaagauccucgcugggaaacucgaaaugacucucgaaauaguugccgaaucugaacacgaggagagaccugcugggcaggguagagacgagccuaacaugaauccaaaacucgaagacccgcggaggccugacaccuccuuucucugguuuacaagcccuuacaagacuaugaaguuuauccuuuggcggcgcuuccgcugggcgauuauacuguucauuauuuuguucauacugcuucuguuccuggcaaucuucauuuaugcauucccgaacuacgccgcaaugaagcugguaaaacccuuuucuuag

SEQ ID NO: 49002 - RNA, 6357 nt, Artificial Sequence
  derived and/or modified sequence
augcugagagucuucauccucuaugcugaaaaugugcauacccccgauacagacauuuccgacgcuuauuguagugccguguuugccgguguuaagaagagaacaaaggugaucaagaauucuguuaacccggucuggaacgaaggauuugaaugggaucugaagggcaucccccuugaucaaggcucagaacuucacgugguugugaaggaccacgaaaccauggggaggaauagguuccugggagaagcuaaaguaccacuucgugaaguccucgccaccccaucacugucugccucauucaacgccccacuucuggauacaaagaaacaaccuaccggggcaucacucgugcuacaggugagcuacacuccacugcccggugcugucccacucuuuccaccaccaaccccccucgagcccuccccuacccugccggaccuggauguugucgccggaggcggccagucuagagccgaaaccuggucccugcucucagacucuaccauggauaccagguacagcggaaagaaguggccugcuccaacugauacaggaggcgaggaagauacugaagaccaaggacugaccggagacgaagccgaaccuuuccuggaccagucaggcggacccggcgcacccacaacaccuagaaaacugcccucccgaccuccuccccauuaucccggcaucaagcguaagagaagcgcuccgacaucucgcaaguuacuaucagauaagccucaagacuuccagauccgcguucaagucaucgaggggcggcaauugccuggcgugaacaucaagccuguuguuaaagucaccgccgccggccagaccaaaagaacacgaauacauaagggaaacucgccgcuauucaaugaaacucuuuuuuuuaaccucuucgauucccccggugagcuauucgacgagccuauuuucauaacagugguggacagccgcucuuugaggacugacgcccuuuuaggcgaauuucgcauggacgucggaaccaucuaucgcgagccgcgccacgcauauuugagaaaauggcugcugcucucagacccugaugacuucucagccggggcacgcggguaucucaagacaucacucugcguguuaggaccuggagaugaagccccccuagagagaaaggauccgucagaagacaaagaagauauagaaagcaaccuacugcgacccacaggcguugcacuccgcggggcucauuucugccugaaaguguucagagccgaggacuugccucagauggaugacgcagugauggacaacgugaaacagauuuucggauucgagucgaacaaaaaaaaccucguugacccauucguagaaguaucauucgcugguaaaauguuguguucgaagaucuuagagaagacagcuaauccucaauggaaucagaauauaacccuaccugcuauguuuccaucaaugugcgagaaaaugagaauacgaaucauugacugggacagauugacacacaaugacauuguagcuaccacguacuuaucuaugagcaagaucuccgcuccuggcggcgaaaucgaaguugaugauuaccuuggguuucugcccacauucggcccauguuacauaaauuuguacggcucuccaagggaguuuacaggauuuccagacccuuacaccgagcugaacacgggaaaaggugaaggcguugccuaucggggaagacuacucuugaguuuggagacaaaacugguggaacacucugaacaaaaggucgaagaucucccggccgacgacauacugagaguggaaaaguaucuuaggcgccgaaaauacagcuuguuugccgcuuuuuacagugccaccaugcuucaagauguggaugacgcuauacaguucgaaguauccaucgguaacuacggaaacaaguuugacaugacaugcuugccacucgcuagcacuacccaguacucuagagccgucuuugauggaugccacuacuauuauuuaccuuggggcaauguuaaaccagugguuguguuaucaucguauugggaggauaucagucaccgaaucgaaacccagaaucagcuauuaggaaucgccgaccgacucgaagcggggcuggagcaagugcaucuggcacuaaaggcccagugcagcacggaagauguggacagucuaguggcccagcuuacugaugagcucaucgcaggcuguucucaaccacuuggcgacauucacgagacuccuucagcgacccaccuagaccaauacuuauaccaacugaggacucaccacuuaucccagaucacugaggcagcauuagcgcuuaaacuagggcacagcgaacucccugcagcucuugaacaggcugaagacuggcugcuuagguuacgggcucucgccgaagaaccccaaaauagccugccugauauuguaaucuggaugcugcagggggacaagagaguggcauaucagcgagugccagcccaucagguccuguuuucacgacgcggcgcuaauuauuguggcaaaaacugugguaagcuacagaccaucuuccuaaaauaucccauggaaaaagucccuggugccaggaugccugugcagauccguguaaaacugugguuuggacugucaguugacgaaaaggaauuuaaucaguucgcagaaggcaaacuauccguguucgccgaaaccuaugaaaaugaaacaaaauuggccuugguuggaaauuggggcacgacaggacugacauacccaaaauucagugacguaacuggcaaaauuaagcuuccaaaagauucauuccgaccaucagcggguuggacuugggccggcgauugguucguguguccugaaaaaacgcugcuccacgauauggacgccgggcaucucucauuuguugaagagguuuucgaaaaucagacccgucuuccaggggggcaauggaucuauaugagugauaacuauaccgaugugaacggugagaaggugcugccuaaagaugauauagagugcccucuuggauggaaaugggaagaugaggaauggucaaccgaccugaaccgggccgucgacgaacagggcugggaguauagcaucacgauucccccagaaagaaaaccaaaacauugggucccagcagagaagauguacuacacucacaggagacgucgcugggugagacuuaggagaagagaccugucacagauggaagcccugaagagacaccgacaggcugaagccgagggcgaggguugggaauacgcaagccuguuuggcuggaaguuucaucuggaauacaggaagacagacgccuucagacgucgaagauggcgaaggaggauggaaccccuggaaaaaaccggcccagccgccguguuugcccuggaaggugcuuuaggaggcguuauggaugauaaaagcgaagauucuauguccguuaguacccucuccuuuggaguuaaccguccaacgauuucauguaucuuugauuacggcaaccgcuaccacuuacgguguuauauguaccaggcaagggaucuggcugccauggauaaggacucauucucugaccccuaugcaauagugucauuccugcaucaaagccaaaagacuguggucguuaagaauacccuuaauccuacuugggaucaaacacugaucuuuuaugaaauagaaaucuuuggugagcccgcaacagucgcggaacaacccccaagcauuguggucgaauuauacgaucacgacacauacggcgcagacgaauucaugggaagauguauuugccagcccucucucgaacgcaugccaagacuggccugguucccccuuaccaggggcagucaaccuuccggggagcuucuggcuuccuuugagcucauccagcgagaaaagccugcaauucaccauaucccaggauuugaggugcaagagaccagccgcauucuggaugaauccgaggacaccgaccucccuuacccccccccucagagagaagcgaacauuuauaugguaccacagaacaucaaaccugcccugcaacgaacagcuauugaaauccuggccuggggacugaggaauaugaaguccuaccaacucgcaaacauuagcucaccgucauuaguuguugaaugcgggggccaaacaguccagucuugugugauaagaaaccugcgaaagaacccuaacuucgacauuuguacucucuucauggaagucauguuaccaagagaggagcuauacugcccuccaaucaccgugaaagugaucgauaaucggcaguucggcagaagaccugucgucggucagugcacaauucgcagucuugagaguuuuuuaugcgaccccuacuccgccgagucucccucaccccaagggggcccugaugacgugagccugcuuuccccaggcgaggacguucuuaucgacauugaugacaaggaaccauuaaucccuauacaacuggccgacggccugagcucccuugcgcccacaaacacggccagccccccuagcucaccccaugaagaggaauuuauugauugguggucuaaauucuuugccucuaucggugaaagagagaagugcgggucuuaccuggaaaaagacuuugacacauugaaaguguaugacacgcagcuggagaauguggaagcuuuugaagguuuaagugacuucuguaauaccuuuaagcuguacagagguaagacccaagaagagacagaggacccuagcgucaucggcgaguuuaaaggacucuuuaagaucuacccacugcccgaggauccugccauuccuaugcccccucggcaguuccaucaguuagcagcacagggcccccaggagugcuuaguccgaaucuacaucguccgagcauuuggcuugcagccaaaggauccuaaugggaaaugcgaccccuacauuaaaauaaguauuggaaaaaaaucaguuagcgaucaggauaacuacauuccuugcacccuggagcccgucuuuggcaaaauguuugaacuaacuuguacauuaccgcucgagaaagaucugaaaaucacccuguacgacuacgaccuacuuagcaaagaugaaaaaauuggggagaccgucgucgaucuugaaaaccgcuugcugaguaaguuuggcgcucgcugcggccucccacaaaccuacuguguguccggcccuaaccaauggcgggaucaguugcgucccucccaacugcugcaccuuuuuugccagcagcauagaguuaaagcccccguguaccguaccgacagagugauguuucaagauaaagaguauucuaucgaagagauugaggcagguagaauuccgaauccgcaccucggcccagucgaagagcgauuagcccugcacguguuacagcaacaaggccugguacccgaacacgucgaauccagaccuuuguacaguccccuccaaccugauaucgaacaggguaagcugcaaauguggguugaucucuuccccaaggcauugggccgccccggaccaccguucaauaucacaccacgucgagcgcggcgcuucuuucuccgauguaucauuuggaauacacgagaugugauccuggaugaccucagucugaccggcgaaaagaugucagauaucuauguuaaaggauggaugaucggcuucgaggagcauaagcagaaaaccgacguucauuacaggagccuuggaggcgagggaaacuuuaauuggcgauuuauuuucccauucgacuaucuucccgcggaacaggucugcacaauugccaaaaaagacgcauucuggaggcucgacaaaaccgaaagcaagauccccgcccgcgucguguuucagauuugggauaacgacaaguucagcuucgaugauuuucuaggaucccuucaauuagaccuuaaucgcaugccgaaaccagcuaaaacggccaaaaagugcagucuggaccagcuggacgacgccuuccacccugaaugguucguaucucucuucgagcagaaaacaguuaaaggaugguggccguguguagccgaagagggagaaaagaaaauacuggcaggaaagcuggagaugacacuugaaauuguggcugaaagcgaacaugaagaaagaccugccggccaaggucgugaugaaccgaacaugaauccaaaacuugaggacccaagacgaccagauacaaguuuucuaugguuuacaucgccuuauaaaacaaugaaauucauccucuggcgccgguuccgaugggcuauaauccuuuucauuauucucuuuauacucuuguuguuccuagccaucuuuaucuaugcauuucccaauuacgccgccaugaaacuuguuaagccuuucaguuag

SEQ ID NO: 49003 - protein, 2112 aa, Artificial Sequence
  derived and/or modified sequence
MLCCLLVRASNLPSAKKDRRSDPVASLTFRGVKKRTKVIKNSVNPVWNEGFEWDLKGIPLDQGSELHVVVKDHETMGRNRFLGEAKVPLREVLATPSLSASFNAPLLDTKKQPTGASLVLQVSYTPLPGAVPLFPPPTPLEPSPTLPDLDVVAGGGQSRAETWSLLSDSTMDTRYSGKKWPAPTDTGGEEDTEDQGLTGDEAEPFLDQSGGPGAPTTPRKLPSRPPPHYPGIKRKRSAPTSRKLLSDKPQDFQIRVQVIEGRQLPGVNIKPVVKVTAAGQTKRTRIHKGNSPLFNETLFFNLFDSPGELFDEPIFITVVDSRSLRTDALLGEFRMDVGTIYREPRHAYLRKWLLLSDPDDFSAGARGYLKTSLCVLGPGDEAPLERKDPSEDKEDIESNLLRPTGVALRGAHFCLKVFRAEDLPQMDDAVMDNVKQIFGFESNKKNLVDPFVEVSFAGKMLCSKILEKTANPQWNQNITLPAMFPSMCEKMRIRIIDWDRLTHNDIVATTYLSMSKISAPGGEIEEEPAGAVKPSKASDLDDYLGFLPTFGPCYINLYGSPREFTGFPDPYTELNTGKGEGVAYRGRLLLSLETKLVEHSEQKVEDLPADDILRVEKYLRRRKYSLFAAFYSATMLQDVDDAIQFEVSIGNYGNKFDMTCLPLASTTQYSRAVFDGCHYYYLPWGNVKPVVVLSSYWEDISHRIETQNQLLGIADRLEAGLEQVHLALKAQCSTEDVDSLVAQLTDELIAGCSQPLGDIHETPSATHLDQYLYQLRTHHLSQITEAALALKLGHSELPAALEQAEDWLLRLRALAEEPQNSLPDIVIWMLQGDKRVAYQRVPAHQVLFSRRGANYCGKNCGKLQTIFLKYPMEKVPGARMPVQIRVKLWFGLSVDEKEFNQFAEGKLSVFAETYENETKLALVGNWGTTGLTYPKFSDVTGKIKLPKDSFRPSAGWTWAGDWFVCPEKTLLHDMDAGHLSFVEEVFENQTRLPGGQWIYMSDNYTDVNGEKVLPKDDIECPLGWKWEDEEWSTDLNRAVDEQGWEYSITIPPERKPKHWVPAEKMYYTHRRRRWVRLRRRDLSQMEALKRHRQAEAEGEGWEYASLFGWKFHLEYRKTDAFRRRRWRRRMEPLEKTGPAAVFALEGALGGVMDDKSEDSMSVSTLSFGVNRPTISCIFDYGNRYHLRCYMYQARDLAAMDKDSFSDPYAIVSFLHQSQKTVVVKNTLNPTWDQTLIFYEIEIFGEPATVAEQPPSIVVELYDHDTYGADEFMGRCICQPSLERMPRLAWFPLTRGSQPSGELLASFELIQREKPAIHHIPGFEVQETSRILDESEDTDLPYPPPQREANIYMVPQNIKPALQRTAIEILAWGLRNMKSYQLANISSPSLVVECGGQTVQSCVIRNLRKNPNFDICTLFMEVMLPREELYCPPITVKVIDNRQFGRRPVVGQCTIRSLESFLCDPYSAESPSPQGGPDDVSLLSPGEDVLIDIDDKEPLIPIQEEEFIDWWSKFFASIGEREKCGSYLEKDFDTLKVYDTQLENVEAFEGLSDFCNTFKLYRGKTQEETEDPSVIGEFKGLFKIYPLPEDPAIPMPPRQFHQLAAQGPQECLVRIYIVRAFGLQPKDPNGKCDPYIKISIGKKSVSDQDNYIPCTLEPVFGKMFELTCTLPLEKDLKITLYDYDLLSKDEKIGETVVDLENRLLSKFGARCGLPQTYCVSGPNQWRDQLRPSQLLHLFCQQHRVKAPVYRTDRVMFQDKEYSIEEIEAGRIPNPHLGPVEERLALHVLQQQGLVPEHVESRPLYSPLQPDIEQGKLQMWVDLFPKALGRPGPPFNITPRRARRFFLRCIIWNTRDVILDDLSLTGEKMSDIYVKGWMIGFEEHKQKTDVHYRSLGGEGNFNWRFIFPFDYLPAEQVCTIAKKDAFWRLDKTESKIPARVVFQIWDNDKFSFDDFLGSLQLDLNRMPKPAKTAKKCSLDQLDDAFHPEWFVSLFEQKTVKGWWPCVAEEGEKKILAGKLEMTLEIVAESEHEERPAGQGRDEPNMNPKLEDPRRPDTSFLWFTSPYKTMKFILWRRFRWAIILFIILFILLLFLAIFIYAFPNYAAMKLVKPFS

SEQ ID NO: 49004 - DNA, 6775 bp, Artificial Sequence
  derived and/or modified sequence
tctccgcggaggagcagcgaaggcgacagctctcttggcgcggctgcctgggagccgggcgcttgctgggtgggtgctcgggcccggtgctcccgctcccgccctgactgcgcgcctgtgtgccgccggggctgcccagccatgctgtgctgcctgctggtgagggccagcaacctccccagtgcgaagaaggaccggcgcagcgaccctgtcgcaagcctgactttccgaggggtgaagaagagaaccaaagtcatcaagaacagcgtgaaccctgtatggaatgagggatttgaatgggacctcaagggcatccccctggaccagggctctgagcttcatgtggtggtcaaagaccatgagacgatggggaggaacaggttcctgggggaagccaaggtcccactccgagaggtcctcgccacccctagtctgtccgccagcttcaatgcccccctgctggacaccaagaagcagcccacaggggcctcgctggtcctgcaggtgtcctacacaccgctgcctggagctgtgcccctgttcccgccccctactcctctggagccctccccgactctgcctgacctggatgtagtggcaggcgggggacagagccgggccgagacttggtccctgctcagtgacagcaccatggacacgagatactctggaaagaagtggccggcccccacggacacaggaggagaggaagacacagaggaccagggactcactggagatgaggcggagccattcctggatcaaagcggaggcccgggggctcccaccaccccaaggaaactaccttcacgtcctccgccccactaccccgggatcaaaagaaagcgaagtgcgcctacatctagaaagctgctgtcagacaaaccgcaggatttccagatcagggtccaggtgatcgaggggcgccagctgccgggggtgaacatcaagcctgtggtcaaggttaccgctgcagggcagaccaagcggacgcggatccacaagggaaacagcccactcttcaatgagactcttttcttcaacttgtttgactctcctggggagctgtttgatgagcccatctttatcacggtggtagactctcgttctctcaggacagatgctctcctcggggagttccggatggacgtgggcaccatttacagagagccccggcacgcctatctcaggaagtggctgctgctctcagaccctgatgacttctctgctggggccagaggctacctgaaaacaagcctttgtgtgctggggcctggggacgaagcgcctctggagagaaaagacccctctgaagacaaggaggacattgaaagcaacctgctccggcccacaggcgtagccctgcgaggagcccacttctgcctgaaggtcttccgggccgaggacttgccgcagatggacgatgccgtgatggacaacgtgaaacagatctttggcttcgagagtaacaagaagaacttggtggacccctttgtggaggtcagctttgcggggaaaatgctgtgcagcaagatcttggagaagacggccaaccctcagtggaaccagaacatcacactgcctgccatgtttccctccatgtgcgaaaaaatgaggattcgtatcatagactgggaccgcctgactcacaatgacatcgtggctaccacctacctgagtatgtcgaaaatctctgcccctggaggagaaatagaagaggagcctgcaggtgctgtcaagccttcgaaagcctcagacttggatgactacctgggcttcctccccacttttgggccctgctacatcaacctctatggcagtcccagagagttcacaggcttcccagacccctacacagagctcaacacaggcaagggggaaggtgtggcttatcgtggccggcttctgctctccctggagaccaagctggtggagcacagtgaacagaaggtggaggaccttcctgcggatgacatcctccgggtggagaagtaccttaggaggcgcaagtactccctgtttgcggccttctactcagccaccatgctgcaggatgtggatgatgccatccagtttgaggtcagcatcgggaactacgggaacaagttcgacatgacctgcctgccgctggcctccaccactcagtacagccgtgcagtctttgacgggtgccactactactacctaccctggggtaacgtgaaacctgtggtggtgctgtcatcctactgggaggacatcagccatagaatcgagactcagaaccagctgcttgggattgctgaccggctggaagctggcctggagcaggtccacctggccctgaaggcgcagtgctccacggaggacgtggactcgctggtggctcagctgacggatgagctcatcgcaggctgcagccagcctctgggtgacatccatgagacaccctctgccacccacctggaccagtacctgtaccagctgcgcacccatcacctgagccaaatcactgaggctgccctggccctgaagctcggccacagtgagctccctgcagctctggagcaggcggaggactggctcctgcgtctgcgtgccctggcagaggagccccagaacagcctgccggacatcgtcatctggatgctgcagggagacaagcgtgtggcataccagcgggtgcccgcccaccaagtcctcttctcccggcggggtgccaactactgtggcaagaattgtgggaagctacagacaatctttctgaaatatccgatggagaaggtgcctggcgcccggatgccagtgcagatacgggtcaagctgtggtttgggctctcagtggatgagaaggagttcaaccagtttgctgaggggaagctgtctgtctttgctgaaacctatgagaacgagactaagttggcccttgttgggaactggggcacaacgggcctcacctaccccaagttttctgacgtcacgggcaagatcaagctacccaaggacagcttccgcccctcggccggctggacctgggctggagattggttcgtgtgtccggagaagactctgctccatgacatggacgccggtcacctgagcttcgtggaagaggtgtttgagaaccagacccggcttcccggaggccagtggatctacatgagtgacaactacaccgatgtgaacggggagaaggtgcttcccaaggatgacattgagtgcccactgggctggaagtgggaagatgaggaatggtccacagacctcaaccgggctgtcgatgagcaaggctgggagtatagcatcaccatccccccggagcggaagccgaagcactgggtccctgctgagaagatgtactacacacaccgacggcggcgctgggtgcgcctgcgcaggagggatctcagccaaatggaagcactgaaaaggcacaggcaggcggaggcggagggcgagggctgggagtacgcctctctttttggctggaagttccacctcgagtaccgcaagacagatgccttccgccgccgccgctggcgccgtcgcatggagccactggagaagacggggcctgcagctgtgtttgcccttgagggggccctgggcggcgtgatggatgacaagagtgaagattccatgtccgtctccaccttgagcttcggtgtgaacagacccacgatttcctgcatattcgactatgggaaccgctaccatctacgctgctacatgtaccaggcccgggacctggctgcgatggacaaggactctttttctgatccctatgccatcgtctccttcctgcaccagagccagaagacggtggtggtgaagaacacccttaaccccacctgggaccagacgctcatcttctacgagatcgagatctttggcgagccggccacagttgctgagcaaccgcccagcattgtggtggagctgtacgaccatgacacttatggtgcagacgagtttatgggtcgctgcatctgtcaaccgagtctggaacggatgccacggctggcctggttcccactgacgaggggcagccagccgtcgggggagctgctggcctcttttgagctcatccagagagagaagccggccatccaccatattcctggttttgaggtgcaggagacatcaaggatcctggatgagtctgaggacacagacctgccctacccaccaccccagagggaggccaacatctacatggttcctcagaacatcaagccagcgctccagcgtaccgccatcgagatcctggcatggggcctgcggaacatgaagagttaccagctggccaacatctcctcccccagcctcgtggtagagtgtgggggccagacggtgcagtcctgtgtcatcaggaacctccggaagaaccccaactttgacatctgcaccctcttcatggaagtgatgctgcccagggaggagctctactgcccccccatcaccgtcaaggtcatcgataaccgccagtttggccgccggcctgtggtgggccagtgtaccatccgctccctggagagcttcctgtgtgacccctactcggcggagagtccatccccacagggtggcccagacgatgtgagcctactcagtcctggggaagacgtgctcatcgacattgatgacaaggagcccctcatccccatccaggaggaagagttcatcgattggtggagcaaattctttgcctccataggggagagggaaaagtgcggctcctacctggagaaggattttgacaccctgaaggtctatgacacacagctggagaatgtggaggcctttgagggcctgtctgacttttgtaacaccttcaagctgtaccggggcaagacgcaggaggagacagaagatccatctgtgattggtgaatttaagggcctcttcaaaatttatcccctcccagaagacccagccatccccatgcccccaagacagttccaccagctggccgcccagggaccccaggagtgcttggtccgtatctacattgtccgagcatttggcctgcagcccaaggaccccaatggaaagtgtgatccttacatcaagatctccatagggaagaaatcagtgagtgaccaggataactacatcccctgcacgctggagcccgtatttggaaagatgttcgagctgacctgcactctgcctctggagaaggacctaaagatcactctctatgactatgacctcctctccaaggacgaaaagatcggtgagacggtcgtcgacctggagaacaggctgctgtccaagtttggggctcgctgtggactcccacagacctactgtgtctctggaccgaaccagtggcgggaccagctccgcccctcccagctcctccacctcttctgccagcagcatagagtcaaggcacctgtgtaccggacagaccgtgtaatgtttcaggataaagaatattccattgaagagatagaggctggcaggatcccaaacccacacctgggcccagtggaggagcgtctggctctgcatgtgcttcagcagcagggcctggtcccggagcacgtggagtcacggcccctctacagccccctgcagccagacatcgagcaggggaagctgcagatgtgggtcgacctatttccgaaggccctggggcggcctggacctcccttcaacatcaccccacggagagccagaaggtttttcctgcgttgtattatctggaataccagagatgtgatcctggatgacctgagcctcacgggggagaagatgagcgacatttatgtgaaaggttggatgattggctttgaagaacacaagcaaaagacagacgtgcattatcgttccctgggaggtgaaggcaacttcaactggaggttcattttccccttcgactacctgccagctgagcaagtctgtaccattgccaagaaggatgccttctggaggctggacaagactgagagcaaaatcccagcacgagtggtgttccagatctgggacaatgacaagttctcctttgatgattttctgggctccctgcagctcgatctcaaccgcatgcccaagccagccaagacagccaagaagtgctccttggaccagctggatgatgctttccacccagaatggtttgtgtccctttttgagcagaaaacagtgaagggctggtggccctgtgtagcagaagagggtgagaagaaaatactggcgggcaagctggaaatgaccttggagattgtagcagagagtgagcatgaggagcggcctgctggccagggccgggatgagcccaacatgaaccctaagcttgaggacccaaggcgccccgacacctccttcctgtggtttacctccccatacaagaccatgaagttcatcctgtggcggcgtttccggtgggccatcatcctcttcatcatcctcttcatcctgctgctgttcctggccatcttcatctacgccttcccgaactatgctgccatgaagctggtgaagcccttcagctgaggactctcctgccctgtagaaggggccgtggggtcccctccagcatgggactggcctgcctcctccgcccagctcggcgagctcctccagacctcctaggcctgattgtcctgccagggtgggcagacagacagatggaccggcccacactcccagagttgctaacatggagctctgagatcaccccacttccatcatttccttctcccccaacccaacgcttttttggatcagctcagacatatttcagtataaaacagttggaaccacaaaaaaaaaaaaaaaaaaaaaaaaa

SEQ ID NO: 49005 - DNA, 6336 bp, Artificial Sequence
  derived and/or modified sequence
atgctgtgctgcctgctggtgcgcgccagcaacctgcccagcgccaagaaggaccgccgcagcgaccccgtggccagcctgaccttccgcggcgtgaagaagcgcaccaaggtgatcaagaacagcgtgaaccccgtgtggaacgagggcttcgagtgggacctgaagggcatccccctggaccagggcagcgagctgcacgtggtggtgaaggaccacgagaccatgggccgcaaccgcttcctgggcgaggccaaggtgcccctgcgcgaggtgctggccacccccagcctgagcgccagcttcaacgcccccctgctggacaccaagaagcagcccaccggcgccagcctggtgctgcaggtgagctacacccccctgcccggcgccgtgcccctgttccccccccccacccccctggagcccagccccaccctgcccgacctggacgtggtggccggcggcggccagagccgcgccgagacctggagcctgctgagcgacagcaccatggacacccgctacagcggcaagaagtggcccgcccccaccgacaccggcggcgaggaggacaccgaggaccagggcctgaccggcgacgaggccgagcccttcctggaccagagcggcggccccggcgcccccaccaccccccgcaagctgcccagccgcccccccccccactaccccggcatcaagcgcaagcgcagcgcccccaccagccgcaagctgctgagcgacaagccccaggacttccagatccgcgtgcaggtgatcgagggccgccagctgcccggcgtgaacatcaagcccgtggtgaaggtgaccgccgccggccagaccaagcgcacccgcatccacaagggcaacagccccctgttcaacgagaccctgttcttcaacctgttcgacagccccggcgagctgttcgacgagcccatcttcatcaccgtggtggacagccgcagcctgcgcaccgacgccctgctgggcgagttccgcatggacgtgggcaccatctaccgcgagccccgccacgcctacctgcgcaagtggctgctgctgagcgaccccgacgacttcagcgccggcgcccgcggctacctgaagaccagcctgtgcgtgctgggccccggcgacgaggcccccctggagcgcaaggaccccagcgaggacaaggaggacatcgagagcaacctgctgcgccccaccggcgtggccctgcgcggcgcccacttctgcctgaaggtgttccgcgccgaggacctgccccagatggacgacgccgtgatggacaacgtgaagcagatcttcggcttcgagagcaacaagaagaacctggtggaccccttcgtggaggtgagcttcgccggcaagatgctgtgcagcaagatcctggagaagaccgccaacccccagtggaaccagaacatcaccctgcccgccatgttccccagcatgtgcgagaagatgcgcatccgcatcatcgactgggaccgcctgacccacaacgacatcgtggccaccacctacctgagcatgagcaagatcagcgcccccggcggcgagatcgaggaggagcccgccggcgccgtgaagcccagcaaggccagcgacctggacgactacctgggcttcctgcccaccttcggcccctgctacatcaacctgtacggcagcccccgcgagttcaccggcttccccgacccctacaccgagctgaacaccggcaagggcgagggcgtggcctaccgcggccgcctgctgctgagcctggagaccaagctggtggagcacagcgagcagaaggtggaggacctgcccgccgacgacatcctgcgcgtggagaagtacctgcgccgccgcaagtacagcctgttcgccgccttctacagcgccaccatgctgcaggacgtggacgacgccatccagttcgaggtgagcatcggcaactacggcaacaagttcgacatgacctgcctgcccctggccagcaccacccagtacagccgcgccgtgttcgacggctgccactactactacctgccctggggcaacgtgaagcccgtggtggtgctgagcagctactgggaggacatcagccaccgcatcgagacccagaaccagctgctgggcatcgccgaccgcctggaggccggcctggagcaggtgcacctggccctgaaggcccagtgcagcaccgaggacgtggacagcctggtggcccagctgaccgacgagctgatcgccggctgcagccagcccctgggcgacatccacgagacccccagcgccacccacctggaccagtacctgtaccagctgcgcacccaccacctgagccagatcaccgaggccgccctggccctgaagctgggccacagcgagctgcccgccgccctggagcaggccgaggactggctgctgcgcctgcgcgccctggccgaggagccccagaacagcctgcccgacatcgtgatctggatgctgcagggcgacaagcgcgtggcctaccagcgcgtgcccgcccaccaggtgctgttcagccgccgcggcgccaactactgcggcaagaactgcggcaagctgcagaccatcttcctgaagtaccccatggagaaggtgcccggcgcccgcatgcccgtgcagatccgcgtgaagctgtggttcggcctgagcgtggacgagaaggagttcaaccagttcgccgagggcaagctgagcgtgttcgccgagacctacgagaacgagaccaagctggccctggtgggcaactggggcaccaccggcctgacctaccccaagttcagcgacgtgaccggcaagatcaagctgcccaaggacagcttccgccccagcgccggctggacctgggccggcgactggttcgtgtgccccgagaagaccctgctgcacgacatggacgccggccacctgagcttcgtggaggaggtgttcgagaaccagacccgcctgcccggcggccagtggatctacatgagcgacaactacaccgacgtgaacggcgagaaggtgctgcccaaggacgacatcgagtgccccctgggctggaagtgggaggacgaggagtggagcaccgacctgaaccgcgccgtggacgagcagggctgggagtacagcatcaccatcccccccgagcgcaagcccaagcactgggtgcccgccgagaagatgtactacacccaccgccgccgccgctgggtgcgcctgcgccgccgcgacctgagccagatggaggccctgaagcgccaccgccaggccgaggccgagggcgagggctgggagtacgccagcctgttcggctggaagttccacctggagtaccgcaagaccgacgccttccgccgccgccgctggcgccgccgcatggagcccctggagaagaccggccccgccgccgtgttcgccctggagggcgccctgggcggcgtgatggacgacaagagcgaggacagcatgagcgtgagcaccctgagcttcggcgtgaaccgccccaccatcagctgcatcttcgactacggcaaccgctaccacctgcgctgctacatgtaccaggcccgcgacctggccgccatggacaaggacagcttcagcgacccctacgccatcgtgagcttcctgcaccagagccagaagaccgtggtggtgaagaacaccctgaaccccacctgggaccagaccctgatcttctacgagatcgagatcttcggcgagcccgccaccgtggccgagcagccccccagcatcgtggtggagctgtacgaccacgacacctacggcgccgacgagttcatgggccgctgcatctgccagcccagcctggagcgcatgccccgcctggcctggttccccctgacccgcggcagccagcccagcggcgagctgctggccagcttcgagctgatccagcgcgagaagcccgccatccaccacatccccggcttcgaggtgcaggagaccagccgcatcctggacgagagcgaggacaccgacctgccctacccccccccccagcgcgaggccaacatctacatggtgccccagaacatcaagcccgccctgcagcgcaccgccatcgagatcctggcctggggcctgcgcaacatgaagagctaccagctggccaacatcagcagccccagcctggtggtggagtgcggcggccagaccgtgcagagctgcgtgatccgcaacctgcgcaagaaccccaacttcgacatctgcaccctgttcatggaggtgatgctgccccgcgaggagctgtactgcccccccatcaccgtgaaggtgatcgacaaccgccagttcggccgccgccccgtggtgggccagtgcaccatccgcagcctggagagcttcctgtgcgacccctacagcgccgagagccccagcccccagggcggccccgacgacgtgagcctgctgagccccggcgaggacgtgctgatcgacatcgacgacaaggagcccctgatccccatccaggaggaggagttcatcgactggtggagcaagttcttcgccagcatcggcgagcgcgagaagtgcggcagctacctggagaaggacttcgacaccctgaaggtgtacgacacccagctggagaacgtggaggccttcgagggcctgagcgacttctgcaacaccttcaagctgtaccgcggcaagacccaggaggagaccgaggaccccagcgtgatcggcgagttcaagggcctgttcaagatctaccccctgcccgaggaccccgccatccccatgcccccccgccagttccaccagctggccgcccagggcccccaggagtgcctggtgcgcatctacatcgtgcgcgccttcggcctgcagcccaaggaccccaacggcaagtgcgacccctacatcaagatcagcatcggcaagaagagcgtgagcgaccaggacaactacatcccctgcaccctggagcccgtgttcggcaagatgttcgagctgacctgcaccctgcccctggagaaggacctgaagatcaccctgtacgactacgacctgctgagcaaggacgagaagatcggcgagaccgtggtggacctggagaaccgcctgctgagcaagttcggcgcccgctgcggcctgccccagacctactgcgtgagcggccccaaccagtggcgcgaccagctgcgccccagccagctgctgcacctgttctgccagcagcaccgcgtgaaggcccccgtgtaccgcaccgaccgcgtgatgttccaggacaaggagtacagcatcgaggagatcgaggccggccgcatccccaacccccacctgggccccgtggaggagcgcctggccctgcacgtgctgcagcagcagggcctggtgcccgagcacgtggagagccgccccctgtacagccccctgcagcccgacatcgagcagggcaagctgcagatgtgggtggacctgttccccaaggccctgggccgccccggcccccccttcaacatcaccccccgccgcgcccgccgcttcttcctgcgctgcatcatctggaacacccgcgacgtgatcctggacgacctgagcctgaccggcgagaagatgagcgacatctacgtgaagggctggatgatcggcttcgaggagcacaagcagaagaccgacgtgcactaccgcagcctgggcggcgagggcaacttcaactggcgcttcatcttccccttcgactacctgcccgccgagcaggtgtgcaccatcgccaagaaggacgccttctggcgcctggacaagaccgagagcaagatccccgcccgcgtggtgttccagatctgggacaacgacaagttcagcttcgacgacttcctgggcagcctgcagctggacctgaaccgcatgcccaagcccgccaagaccgccaagaagtgcagcctggaccagctggacgacgccttccaccccgagtggttcgtgagcctgttcgagcagaagaccgtgaagggctggtggccctgcgtggccgaggagggcgagaagaagatcctggccggcaagctggagatgaccctggagatcgtggccgagagcgagcacgaggagcgccccgccggccagggccgcgacgagcccaacatgaaccccaagctggaggacccccgccgccccgacaccagcttcctgtggttcaccagcccctacaagaccatgaagttcatcctgtggcgccgcttccgctgggccatcatcctgttcatcatcctgttcatcctgctgctgttcctggccatcttcatctacgccttccccaactacgccgccatgaagctggtgaagcccttcagc

SEQ ID NO: 49006 - DNA, 6339 bp, Artificial Sequence
  derived and/or modified sequence
atgctgtgctgcctgctggtgagagccagcaacctgcccagcgccaagaaggacagaagaagcgaccccgtggccagcctgaccttcagaggcgtgaagaagagaaccaaggtgatcaagaacagcgtgaaccccgtgtggaacgagggcttcgagtgggacctgaagggcatccccctggaccagggcagcgagctgcacgtggtggtgaaggaccacgagaccatgggcagaaacagattcctgggcgaggccaaggtgcccctgagagaggtgctggccacccccagcctgagcgccagcttcaacgcccccctgctggacaccaagaagcagcccaccggcgccagcctggtgctgcaggtgagctacacccccctgcccggcgccgtgcccctgttccccccccccacccccctggagcccagccccaccctgcccgacctggacgtggtggccggcggcggccagagcagagccgagacctggagcctgctgagcgacagcaccatggacaccagatacagcggcaagaagtggcccgcccccaccgacaccggcggcgaggaggacaccgaggaccagggcctgaccggcgacgaggccgagcccttcctggaccagagcggcggccccggcgcccccaccacccccagaaagctgcccagcagaccccccccccactaccccggcatcaagagaaagagaagcgcccccaccagcagaaagctgctgagcgacaagccccaggacttccagatcagagtgcaggtgatcgagggcagacagctgcccggcgtgaacatcaagcccgtggtgaaggtgaccgccgccggccagaccaagagaaccagaatccacaagggcaacagccccctgttcaacgagaccctgttcttcaacctgttcgacagccccggcgagctgttcgacgagcccatcttcatcaccgtggtggacagcagaagcctgagaaccgacgccctgctgggcgagttcagaatggacgtgggcaccatctacagagagcccagacacgcctacctgagaaagtggctgctgctgagcgaccccgacgacttcagcgccggcgccagaggctacctgaagaccagcctgtgcgtgctgggccccggcgacgaggcccccctggagagaaaggaccccagcgaggacaaggaggacatcgagagcaacctgctgagacccaccggcgtggccctgagaggcgcccacttctgcctgaaggtgttcagagccgaggacctgccccagatggacgacgccgtgatggacaacgtgaagcagatcttcggcttcgagagcaacaagaagaacctggtggaccccttcgtggaggtgagcttcgccggcaagatgctgtgcagcaagatcctggagaagaccgccaacccccagtggaaccagaacatcaccctgcccgccatgttccccagcatgtgcgagaagatgagaatcagaatcatcgactgggacagactgacccacaacgacatcgtggccaccacctacctgagcatgagcaagatcagcgcccccggcggcgagatcgaggaggagcccgccggcgccgtgaagcccagcaaggccagcgacctggacgactacctgggcttcctgcccaccttcggcccctgctacatcaacctgtacggcagccccagagagttcaccggcttccccgacccctacaccgagctgaacaccggcaagggcgagggcgtggcctacagaggcagactgctgctgagcctggagaccaagctggtggagcacagcgagcagaaggtggaggacctgcccgccgacgacatcctgagagtggagaagtacctgagaagaagaaagtacagcctgttcgccgccttctacagcgccaccatgctgcaggacgtggacgacgccatccagttcgaggtgagcatcggcaactacggcaacaagttcgacatgacctgcctgcccctggccagcaccacccagtacagcagagccgtgttcgacggctgccactactactacctgccctggggcaacgtgaagcccgtggtggtgctgagcagctactgggaggacatcagccacagaatcgagacccagaaccagctgctgggcatcgccgacagactggaggccggcctggagcaggtgcacctggccctgaaggcccagtgcagcaccgaggacgtggacagcctggtggcccagctgaccgacgagctgatcgccggctgcagccagcccctgggcgacatccacgagacccccagcgccacccacctggaccagtacctgtaccagctgagaacccaccacctgagccagatcaccgaggccgccctggccctgaagctgggccacagcgagctgcccgccgccctggagcaggccgaggactggctgctgagactgagagccctggccgaggagccccagaacagcctgcccgacatcgtgatctggatgctgcagggcgacaagagagtggcctaccagagagtgcccgcccaccaggtgctgttcagcagaagaggcgccaactactgcggcaagaactgcggcaagctgcagaccatcttcctgaagtaccccatggagaaggtgcccggcgccagaatgcccgtgcagatcagagtgaagctgtggttcggcctgagcgtggacgagaaggagttcaaccagttcgccgagggcaagctgagcgtgttcgccgagacctacgagaacgagaccaagctggccctggtgggcaactggggcaccaccggcctgacctaccccaagttcagcgacgtgaccggcaagatcaagctgcccaaggacagcttcagacccagcgccggctggacctgggccggcgactggttcgtgtgccccgagaagaccctgctgcacgacatggacgccggccacctgagcttcgtggaggaggtgttcgagaaccagaccagactgcccggcggccagtggatctacatgagcgacaactacaccgacgtgaacggcgagaaggtgctgcccaaggacgacatcgagtgccccctgggctggaagtgggaggacgaggagtggagcaccgacctgaacagagccgtggacgagcagggctgggagtacagcatcaccatcccccccgagagaaagcccaagcactgggtgcccgccgagaagatgtactacacccacagaagaagaagatgggtgagactgagaagaagagacctgagccagatggaggccctgaagagacacagacaggccgaggccgagggcgagggctgggagtacgccagcctgttcggctggaagttccacctggagtacagaaagaccgacgccttcagaagaagaagatggagaagaagaatggagcccctggagaagaccggccccgccgccgtgttcgccctggagggcgccctgggcggcgtgatggacgacaagagcgaggacagcatgagcgtgagcaccctgagcttcggcgtgaacagacccaccatcagctgcatcttcgactacggcaacagataccacctgagatgctacatgtaccaggccagagacctggccgccatggacaaggacagcttcagcgacccctacgccatcgtgagcttcctgcaccagagccagaagaccgtggtggtgaagaacaccctgaaccccacctgggaccagaccctgatcttctacgagatcgagatcttcggcgagcccgccaccgtggccgagcagccccccagcatcgtggtggagctgtacgaccacgacacctacggcgccgacgagttcatgggcagatgcatctgccagcccagcctggagagaatgcccagactggcctggttccccctgaccagaggcagccagcccagcggcgagctgctggccagcttcgagctgatccagagagagaagcccgccatccaccacatccccggcttcgaggtgcaggagaccagcagaatcctggacgagagcgaggacaccgacctgccctacccccccccccagagagaggccaacatctacatggtgccccagaacatcaagcccgccctgcagagaaccgccatcgagatcctggcctggggcctgagaaacatgaagagctaccagctggccaacatcagcagccccagcctggtggtggagtgcggcggccagaccgtgcagagctgcgtgatcagaaacctgagaaagaaccccaacttcgacatctgcaccctgttcatggaggtgatgctgcccagagaggagctgtactgcccccccatcaccgtgaaggtgatcgacaacagacagttcggcagaagacccgtggtgggccagtgcaccatcagaagcctggagagcttcctgtgcgacccctacagcgccgagagccccagcccccagggcggccccgacgacgtgagcctgctgagccccggcgaggacgtgctgatcgacatcgacgacaaggagcccctgatccccatccaggaggaggagttcatcgactggtggagcaagttcttcgccagcatcggcgagagagagaagtgcggcagctacctggagaaggacttcgacaccctgaaggtgtacgacacccagctggagaacgtggaggccttcgagggcctgagcgacttctgcaacaccttcaagctgtacagaggcaagacccaggaggagaccgaggaccccagcgtgatcggcgagttcaagggcctgttcaagatctaccccctgcccgaggaccccgccatccccatgccccccagacagttccaccagctggccgcccagggcccccaggagtgcctggtgagaatctacatcgtgagagccttcggcctgcagcccaaggaccccaacggcaagtgcgacccctacatcaagatcagcatcggcaagaagagcgtgagcgaccaggacaactacatcccctgcaccctggagcccgtgttcggcaagatgttcgagctgacctgcaccctgcccctggagaaggacctgaagatcaccctgtacgactacgacctgctgagcaaggacgagaagatcggcgagaccgtggtggacctggagaacagactgctgagcaagttcggcgccagatgcggcctgccccagacctactgcgtgagcggccccaaccagtggagagaccagctgagacccagccagctgctgcacctgttctgccagcagcacagagtgaaggcccccgtgtacagaaccgacagagtgatgttccaggacaaggagtacagcatcgaggagatcgaggccggcagaatccccaacccccacctgggccccgtggaggagagactggccctgcacgtgctgcagcagcagggcctggtgcccgagcacgtggagagcagacccctgtacagccccctgcagcccgacatcgagcagggcaagctgcagatgtgggtggacctgttccccaaggccctgggcagacccggcccccccttcaacatcacccccagaagagccagaagattcttcctgagatgcatcatctggaacaccagagacgtgatcctggacgacctgagcctgaccggcgagaagatgagcgacatctacgtgaagggctggatgatcggcttcgaggagcacaagcagaagaccgacgtgcactacagaagcctgggcggcgagggcaacttcaactggagattcatcttccccttcgactacctgcccgccgagcaggtgtgcaccatcgccaagaaggacgccttctggagactggacaagaccgagagcaagatccccgccagagtggtgttccagatctgggacaacgacaagttcagcttcgacgacttcctgggcagcctgcagctggacctgaacagaatgcccaagcccgccaagaccgccaagaagtgcagcctggaccagctggacgacgccttccaccccgagtggttcgtgagcctgttcgagcagaagaccgtgaagggctggtggccctgcgtggccgaggagggcgagaagaagatcctggccggcaagctggagatgaccctggagatcgtggccgagagcgagcacgaggagagacccgccggccagggcagagacgagcccaacatgaaccccaagctggaggaccccagaagacccgacaccagcttcctgtggttcaccagcccctacaagaccatgaagttcatcctgtggagaagattcagatgggccatcatcctgttcatcatcctgttcatcctgctgctgttcctggccatcttcatctacgccttccccaactacgccgccatgaagctggtgaagcccttcagctag

SEQ ID NO: 49007 - DNA, 6339 bp, Artificial Sequence
  derived and/or modified sequence
atgctctgttgcctgctcgttcgggcttcaaatctgccgtccgccaaaaaggatcgcaggagtgatcctgtggcttcactcaccttcagaggcgtcaagaagcgaacgaaggtgatcaagaattcggtgaaccccgtgtggaacgaagggttcgaatgggacctgaaaggtatccccttggatcagggctctgagctgcatgtggttgtgaaggatcacgaaaccatggggcgtaatcgtttccttggagaggcaaaagtgccccttagagaggttcttgccaccccctccctttctgcttcttttaatgcccccctcctggacacgaaaaagcaaccgaccggggccagtctggttctccaggtctcgtacactccccttcccggagcggtacccctcttccctcctccgactcccctcgaaccgtctcctaccctgcccgatctggatgtagtggcaggtggtggtcagtctagagccgagacctggtcactgttatctgacagtacaatggatacgcgctacagcggaaagaaatggccagcccccacagacaccggaggcgaggaagataccgaagaccagggcctgacaggagacgaggccgagccctttctagaccaatccggcggcccgggcgctccaactacacctcggaagctgccctccaggcctcccccccattaccccggcatcaaacgtaaacggagcgcccccacatctaggaagctcctttcagataagcctcaggactttcagatcagggtgcaagtaattgaggggcgccagctccccggggtaaatattaaacccgtggtgaaagtgaccgctgcaggacaaaccaaaagaactaggattcacaaggggaattcgcctttattcaatgaaacactctttttcaacctgttcgactcgcctggggaactgtttgatgagccaattttcatcaccgtggtggactccaggagcttacgcacggatgcgctgctgggggaatttaggatggacgtcggcactatatatagggagcctcggcacgcttatctcagaaaatggcttctgttatctgacccggacgacttttcagctggcgcccggggatacctgaagacctctttgtgcgtacttggcccaggcgatgaggcccccctggagcgaaaggacccttcggaggacaaagaggacattgaatctaatctcttgcgccccaccggggtggcacttcgcggggcccacttctgtctgaaggtgtttagggctgaagatttacctcaaatggacgacgcggttatggacaacgtgaagcagatcttcggattcgaatccaataagaagaatctcgtagacccgtttgtggaggtctcatttgccggaaaaatgctctgttccaagatcctggagaaaacggcaaatcctcagtggaatcaaaacataaccctccctgcaatgtttccttctatgtgcgagaagatgcgtatcaggatcattgactgggaccgtttgacgcacaacgacatcgtcgctaccacttatctatcaatgtcaaagatctccgctcccggtggcgagatcgaggaagagcctgccggcgccgtaaagcccagcaaggctagtgacctggacgattaccttgggttcctgcctacctttggcccatgttatataaacctctatggcagtccaagagaattcactggcttccccgatccctacactgaactgaacaccggcaaaggcgaaggcgtcgcttaccgtggccgtttactgctgagcctggaaacaaagctggtggagcactcagaacagaaagtggaagaccttcccgccgatgatatcctgcgggtcgaaaagtacctgaggagaaggaagtacagtctgttcgcagctttttactccgctactatgctgcaagatgtagacgacgcaattcagtttgaggtttcgatcggaaattacgggaataagtttgacatgacctgtctgcctctcgcatctactactcagtactcacgcgccgtcttcgatggctgtcactattactaccttccatggggcaatgtgaagcctgtcgtggtgctcagttcctattgggaagacatttctcaccgcatcgagacccagaaccagctgctcgggattgccgataggttggaagccggtctggagcaggtgcacctcgccttaaaggcccagtgtagtaccgaagatgtggatagcctggtggcccagctaacagatgagcttatagctggctgttcccaaccactcggggacattcacgaaacccctagtgctacccacctggaccagtatctctaccagcttaggactcaccatctgagccagatcaccgaagccgcccttgctcttaagttggggcacagtgaacttcccgccgccctcgaacaggctgaagactggctcctccgcctgagggcattggcagaggagcctcagaattcgctccccgacatagtgatctggatgctccaaggtgacaagcgcgtggcttaccaaagagttccagctcaccaggttctgttttctcggagaggtgctaattattgcggcaaaaactgcggcaagttgcaaaccatctttcttaagtaccccatggaaaaagtccctggagccagaatgcctgtccagatacgcgtgaagctgtggttcggtctgtccgtagatgaaaaggaattcaatcagtttgcagaaggcaagctttctgtgtttgccgagacctacgaaaatgagactaagttggcactagtcgggaactggggaaccactggactgacctacccaaagtttagtgatgttactggtaaaataaaactgcccaaggactcttttcggcctagcgccgggtggacatgggcaggggactggttcgtgtgcccagagaagactctgctccatgacatggacgctggacacctcagtttcgtggaggaggtgttcgagaatcaaactcggctgcctggcggccagtggatctacatgtccgacaattatacggacgttaacggcgaaaaagtgttgcctaaggatgacatcgaatgccctctgggctggaagtgggaagacgaggaatggagcactgacttaaatcgtgccgtagacgagcagggatgggagtacagcatcaccatcccccccgagcgtaagcccaaacactgggtaccagctgagaagatgtattacacacaccgccggcgaaggtgggtacgcctgcgccgaagagacctgagtcaaatggaagctttgaagcgccacagacaagccgaggccgaaggagaggggtgggagtacgcctcactattcgggtggaagtttcatctcgagtaccgtaagacggacgcatttcggcgcagaaggtggcggaggagaatggaaccactagagaagacagggcctgctgctgtctttgccttagaaggggcgctgggcggggtgatggacgacaagtcagaagacagtatgagcgtgagtacactgagtttcggagtcaaccggcccactatctcctgcatcttcgactatggaaaccgctatcacctgagatgttacatgtatcaggccagagatctggctgcaatggataaggattctttttctgacccttatgccatcgtgagctttctccatcagtcacagaaaactgtggtggtgaaaaataccctcaaccccacctgggaccagacattgatcttctacgagatcgaaatcttcggcgaaccagccacagtggccgaacagcccccatcaatcgtagtggagctctacgatcacgatacatatggtgcagacgagttcatgggccggtgcatatgccagccatctctggagcgaatgccacgattagcctggtttcccctgacacgtggaagtcagccctccggtgagctgctggcaagttttgaactcatccagcgcgagaaacccgcaatccaccacattcctggcttcgaagtgcaggagacatcccgcatcctcgacgagagtgaggatacggatctgccatacccccccccacagcgggaggcgaacatttatatggttccgcagaacatcaaacccgcactacaacgtaccgccatcgagatactggcatggggcttgcgtaacatgaaatcatatcagctggctaatatctctagcccctccctcgtggtcgagtgcggtggacagactgtgcaaagttgtgtgatccgtaaccttaggaagaatccaaattttgacatttgtacactatttatggaggtgatgttgcccagagaggagttatactgtccacccatcacagtgaaggttatcgataatcggcagtttggtcgtagacccgttgtgggtcagtgtacaattcgctccctcgaaagcttcttatgcgacccttattctgcagaatccccaagtcctcagggcggcccagatgacgttagtctactgtccccaggcgaggatgtgctaatagacatcgatgataaggaacctctcattcccattcaggaagaagagtttatcgattggtggtccaagttctttgctagtataggagagagggagaagtgtggcagttacctcgaaaaggacttcgacaccttgaaagtgtacgacacacagttagagaacgtggaggcgtttgaaggcttatctgacttctgcaacactttcaaactctaccgcggcaaaacccaggaagagactgaagatccttcagtcatcggggaatttaagggcctgttcaagatctacccactgcctgaggacccagccattcccatgccccccagacaatttcaccaattggctgcgcagggaccacaggaatgcctggttcgaatctacattgtccgcgcattcggtctgcagcccaaggacccaaatggaaaatgtgatccttacatcaaaataagcatcggcaaaaagagcgtgtccgatcaggacaactacatcccctgcaccctagaacccgtgttcgggaaaatgtttgagctcacatgcactctccccctggaaaaggacctcaaaattactctgtatgactacgacctgctatccaaggacgagaagatcggagagaccgtagttgatctggagaatcggctgctgtctaagttcggcgcacgttgcggattgccacagacatattgtgtgagcgggccgaatcagtggagggatcagcttcggccgagtcagttgctccacctattctgtcagcagcatcgggtcaaggcccccgtgtaccgcacagatagggtcatgtttcaagacaaagaatattctatcgaggagatcgaggccggtagaatccccaacccccacctaggccccgtggaggaaaggcttgcgctccacgtgctgcagcagcagggtctggttcctgagcacgtggagtctagacctctctactctcctttgcagcctgacattgagcaggggaagctgcagatgtgggttgacttattccctaaagccctcgggcggccagggccccccttcaatatcacgccccgaagagccagacggttctttcttcggtgtatcatatggaacactagggacgttatcctggacgatcttagtttaacaggagaaaaaatgtccgacatttacgtgaagggttggatgattggcttcgaggagcacaagcagaaaacggacgtgcattacagaagcttagggggcgagggcaactttaattggagattcatatttccattcgattatctcccagcggagcaagtatgcactattgctaagaaggatgccttctggcggctggacaaaaccgaatcaaagatccccgcccgagtcgtgtttcaaatctgggacaatgacaagttttcctttgacgatttcctgggcagccttcaactggacctgaaccgtatgccaaagcctgcgaagacagccaagaaatgtagtcttgatcagctggacgatgcctttcatcccgagtggtttgtgtccctgtttgagcagaagactgtgaagggttggtggccctgcgttgcggaggaaggtgaaaaaaagatcctcgccgggaaactggagatgacattggagatcgttgcagagtctgagcacgaggaaaggccagccggccagggaagagatgaaccaaacatgaatcctaaacttgaagaccccagacgacccgatacttcttttttgtggtttacatcaccgtacaagacaatgaagttcattctttggcgccgtttccggtgggccattattctcttcatcattctcttcattctactgttgttcttggctatcttcatttatgctttccctaattacgccgctatgaagttggtgaaacctttcagctag

SEQ ID NO: 49008 - DNA, 6339 bp, Artificial Sequence
  derived and/or modified sequence
atgctgtgctgcctgctggtgcgggccagcaacctgcccagcgccaagaaggacagaagaagtgaccctgtggccagcctgaccttccggggcgtgaagaagaggaccaaggtgatcaagaacagcgtgaaccctgtgtggaatgaaggatttgagtgggacctgaagggcatccccctggaccagggcagcgagctgcacgtggtggtgaaggaccacgagaccatgggcaggaaccgcttcctgggggaggccaaggtgcccctgcgggaggtgctggccacccccagcctgagcgccagcttcaatgcccccctgctggacaccaagaagcagcccaccggggccagcctggtgctgcaggtgtcctacacccccctgcccggggctgtgcccctcttccccccacccacccccctggagcccagccccaccctgcctgacctggatgtggtggccggcggcggccagagcagagctgagacctggagcctgctgagtgacagcaccatggacacccgctacagcggcaagaagtggccagcccccacagacaccggcggggaggaggacacagaggaccagggcctgactggagatgaggccgagcccttcctggaccagagcggcggccctggggcccccaccacccccaggaagctgcccagccggcccccaccccactacccaggcatcaagaggaagaggtctgcccccaccagcaggaagctgctgagtgacaagccccaggacttccagatccgggtgcaggtgattgagggccggcagctgcccggggtgaacatcaagcctgtggtgaaggtgacagctgctggccagaccaagaggacccgcatccacaagggcaacagccccctcttcaatgagaccctcttcttcaacctgtttgacagccctggagagctgtttgatgagcccatcttcatcaccgtggtggacagccgcagcctgaggacagatgccctgctgggggagttcaggatggatgtgggcaccatctaccgggagcccaggcatgcctacctgaggaagtggctgctgctgagtgaccctgatgacttctctgctggggcccggggctacctgaagaccagcctgtgtgtgctgggccctggagatgaggcccccctggagaggaaggaccccagcgaggacaaggaggacatcgagagcaacctgctgcggcccaccggggtggccctgcggggggcccacttctgcctgaaggtgttccgggcagaggacctgccccagatggatgatgctgtgatggacaacgtgaagcagatcttcggctttgagagcaacaagaagaacctggtggacccctttgtggaggtgtcctttgctgggaagatgctgtgcagcaagatcctggagaagacagccaacccccagtggaaccagaacatcaccctgcctgccatgttccccagcatgtgtgagaagatgaggatccgcatcatcgactgggaccggctgacccacaatgacatcgtggccaccacctacctgtccatgagcaagatcagcgcccctggaggagaaattgaggaggagcctgctggagctgtgaagcccagcaaggccagtgacctggatgactacctgggcttcctgcccaccttcggcccctgctacatcaacctgtatggcagcccccgggagttcaccggcttcccagacccctacacagagctgaacacaggcaagggggagggcgtggcctaccggggccgcctgctgctgagcctggagaccaagctggtggagcacagcgagcagaaggtggaggacctgcctgcagatgacatcctgcgggtggagaagtacctgcggcggaggaagtacagcctgtttgctgccttctacagcgccaccatgctgcaggatgtggatgatgccatccagtttgaggtgtccatcggcaactacggcaacaagtttgacatgacctgcctgcccctggccagcaccacccagtacagcagagctgtgtttgatggctgccactactactacctgccctggggcaatgtgaagcctgtggtggtgctgagcagctactgggaggacatcagccaccgcatcgagacccagaaccagctgctgggcattgctgaccggctggaggccggcctggagcaggtgcacctggccctgaaggcccagtgcagcacagaagatgtggacagcctggtggcccagctgacagatgagctgattgctggctgcagccagcccctgggggacatccacgagacccccagcgccacccacctggaccagtacctgtaccagctgcggacccaccacctgagccagatcacagaggccgccctggccctgaagctgggccacagcgagctgcctgctgccctggagcaggccgaggactggctgctgcggctgcgggccctggccgaggagccccagaacagcctgcctgacatcgtcatctggatgctgcagggcgacaagagggtggcctaccagagggtgcctgcccaccaggtgctcttcagccggcggggggccaactactgtgggaagaactgtgggaagctgcagaccatcttcctgaagtaccccatggagaaggtgcctggggccaggatgcctgtgcagatccgggtgaagctgtggtttggcctgtctgtggatgagaaggagttcaaccagtttgctgagggcaagctgtctgtgtttgctgagacctatgaaaatgagaccaagctggccctggtgggcaactggggcaccaccggcctgacctaccccaagttcagtgatgtgacaggcaagatcaagctgcccaaggacagcttccggcccagcgctggctggacctgggccggggactggtttgtgtgcccagagaagaccctgctgcatgacatggatgctggccacctgagctttgtggaggaggtgtttgagaaccagacccggctgcccggcggccagtggatctacatgtctgacaactacacagatgtgaatggagagaaggtgctgcccaaggatgacattgaatgtcccctgggctggaagtgggaggatgaggagtggagcacagacctgaacagagctgtggatgagcagggctgggagtacagcatcaccatccccccagagaggaagcccaagcactgggtgcctgctgagaagatgtactacacccacagaagaagacgctgggtgcggctgcggcggcgggacctgagccagatggaggccctgaagaggcaccggcaggccgaggccgagggggagggctgggagtatgccagcctgtttggctggaagttccacctggagtacaggaagacagatgccttcagaagaagacgctggaggaggaggatggagcccctggagaagacaggccctgctgctgtgtttgccctggagggcgccctgggcggcgtgatggatgacaagtcagaagattccatgtctgtgtccaccctgagctttggagtgaaccggcccaccatcagctgcatctttgattatggcaaccgctaccacctgcgctgctacatgtaccaggcccgggacctggccgccatggacaaggacagcttcagtgacccctatgccatcgtgtccttcctgcaccagagccagaagacagtggtggtgaagaacaccctgaaccccacctgggaccagaccctcatcttctatgaaattgagatctttggagagcccgccaccgtggccgagcagcccccatccatcgtggtggagctgtatgaccatgacacctacggggctgatgagttcatgggccgctgcatctgccagcccagcctggagaggatgccccggctggcctggttccccctgacccggggcagccagcccagcggggagctgctggccagctttgagctgatccagcgggagaagccagccatccaccacatccctggctttgaggtgcaggagaccagccgcatcctggatgaaagtgaggacacagacctgccctaccccccaccccagcgggaggccaacatctacatggtgccccagaacatcaagccagccctgcagaggacagccatcgagatcctggcctggggcctgaggaacatgaagagctaccagctggccaacatcagcagccccagcctggtggtggagtgtggcggccagacagtgcagagctgtgtgatccggaacctgaggaagaaccccaactttgacatctgcaccctcttcatggaggtgatgctgccccgggaggagctgtactgcccccccatcaccgtgaaggtgattgacaaccggcagtttggaagaagacctgtggtgggccagtgcaccatccgcagcctggagagcttcctgtgtgacccctacagcgctgagagccccagcccccagggcggcccagatgatgtgtccctgctgagccctggagaagatgtgctgattgatattgatgacaaggagcccctcatccccatccaggaggaggagttcatcgactggtggagcaagttctttgccagcattggagagcgggagaagtgtggcagctacctggagaaggactttgacaccctgaaggtgtatgacacccagctggagaatgtggaggcctttgagggcctgagtgacttctgcaacaccttcaagctgtaccggggcaagacccaggaggagacagaggaccccagcgtcatcggggagttcaagggcctcttcaagatctaccccctgcctgaggaccctgccatccccatgccaccccggcagttccaccagctggccgcccagggcccccaggagtgcctggtgcgcatctacatcgtgcgggccttcggcctgcagcccaaggaccccaacgggaaatgtgacccctacatcaagatcagcatcggcaagaagtctgtgtctgaccaggacaactacatcccctgcaccctggagcctgtgtttgggaagatgtttgagctgacctgcaccctgcccctggagaaggacctgaagatcaccctgtatgactatgacctgctgagcaaggatgagaagattggagagaccgtggtggacctggagaaccggctgctgagcaagtttggagcccgctgtggcctgccccagacctactgtgtgtctggccccaaccagtggagggaccagctgcggcccagccagctgctgcacctgttctgccagcagcaccgggtgaaggcccctgtgtacagaacagacagagtgatgttccaggacaaggagtacagcattgaggagattgaagctggccgcatccccaacccccacctgggccctgtggaggagcggctggccctgcacgtgctgcagcagcagggcctggtgcctgagcacgtggagagccggcccctgtacagccccctgcagcctgacatcgagcagggcaagctgcagatgtgggtggacctcttccccaaggccctgggccggcccggcccccccttcaacatcaccccccggcgggcccggcgcttcttcctgcgctgcatcatctggaacaccagagatgtgatcctggatgacctgagcctgactggagagaagatgtctgacatctacgtgaagggctggatgattggatttgaggagcacaagcagaagacagatgtgcactaccgcagcctgggcggggagggcaacttcaactggaggttcatcttcccctttgactacctgcctgctgagcaggtgtgcaccatcgccaagaaggatgccttctggaggctggacaagacagagagcaagatcccagcccgggtggtgttccagatctgggacaatgacaagttctcctttgatgacttcctgggcagcctgcagctggacctgaacaggatgcccaagccagccaagacagccaagaagtgcagcctggaccagctggatgatgccttccaccctgagtggtttgtgtccctgtttgagcagaagacagtgaagggctggtggccctgtgtggccgaggagggggagaagaagatcctggccggcaagctggagatgaccctggagatcgtggccgagagcgagcacgaggagaggcctgctggccagggcagagatgagcccaacatgaaccccaagctggaggaccccaggaggccagacaccagcttcctgtggttcaccagcccctacaagaccatgaagttcatcctgtggaggcgcttccgctgggccatcatcctcttcatcatcctcttcatcctgctgctcttcctggccatcttcatctatgccttccccaactatgctgccatgaagctggtgaagcccttctcctag

SEQ ID NO: 49009 - DNA, 6636 bp, Artificial Sequence
  derived and/or modified sequence
tctccgcggaggagcagcgaaggcgacagctctcttggcgcggctgcctgggagccgggcgcttgctgggtgggtgctcgggcccggtgctcccgctcccgccctgactgcgcgcctgtgtgccgccggggctgcccagccatgctgtgctgcctgctggtgagggccagcaacctccccagtgcgaagaaggaccggcgcagcgaccctgtcgcaagcctgactttccgaggggtgaagaagagaaccaaagtcatcaagaacagcgtgaaccctgtatggaatgagggatttgaatgggacctcaagggcatccccctggaccagggctctgagcttcatgtggtggtcaaagaccatgagacgatggggaggaacaggttcctgggggaagccaaggtcccactccgagaggtcctcgccacccctagtctgtccgccagcttcaatgcccccctgctggacaccaagaagcagcccacaggggcctcgctggtcctgcaggtgtcctacacaccgctgcctggagctgtgcccctgttcccgccccctactcctctggagccctccccgactctgcctgacctggatgtagtggcaggcgggggacagagccgggccgagacttggtccctgctcagtgacagcaccatggacacgagatactctggaaagaagtggccggcccccacggacacaggaggagaggaagacacagaggaccagggactcactggagatgaggcggagccattcctggatcaaagcggaggcccgggggctcccaccaccccaaggaaactaccttcacgtcctccgccccactaccccgggatcaaaagaaagcgaagtgcgcctacatctagaaagctgctgtcagacaaaccgcaggatttccagatcagggtccaggtgatcgaggggcgccagctgccgggggtgaacatcaagcctgtggtcaaggttaccgctgcagggcagaccaagcggacgcggatccacaagggaaacagcccactcttcaatgagactcttttcttcaacttgtttgactctcctggggagctgtttgatgagcccatctttatcacggtggtagactctcgttctctcaggacagatgctctcctcggggagttccggatggacgtgggcaccatttacagagagccccggcacgcctatctcaggaagtggctgctgctctcagaccctgatgacttctctgctggggccagaggctacctgaaaacaagcctttgtgtgctggggcctggggacgaagcgcctctggagagaaaagacccctctgaagacaaggaggacattgaaagcaacctgctccggcccacaggcgtagccctgcgaggagcccacttctgcctgaaggtcttccgggccgaggacttgccgcagatggacgatgccgtgatggacaacgtgaaacagatctttggcttcgagagtaacaagaagaacttggtggacccctttgtggaggtcagctttgcggggaaaatgctgtgcagcaagatcttggagaagacggccaaccctcagtggaaccagaacatcacactgcctgccatgtttccctccatgtgcgaaaaaatgaggattcgtatcatagactgggaccgcctgactcacaatgacatcgtggctaccacctacctgagtatgtcgaaaatctctgcccctggaggagaaatagaagaggagcctgcaggtgctgtcaagccttcgaaagcctcagacttggatgactacctgggcttcctccccacttttgggccctgctacatcaacctctatggcagtcccagagagttcacaggcttcccagacccctacacagagctcaacacaggcaagggggaaggtgtggcttatcgtggccggcttctgctctccctggagaccaagctggtggagcacagtgaacagaaggtggaggaccttcctgcggatgacatcctccgggtggagaagtaccttaggaggcgcaagtactccctgtttgcggccttctactcagccaccatgctgcaggatgtggatgatgccatccagtttgaggtcagcatcgggaactacgggaacaagttcgacatgacctgcctgccgctggcctccaccactcagtacagccgtgcagtctttgacgggtgccactactactacctaccctggggtaacgtgaaacctgtggtggtgctgtcatcctactgggaggacatcagccatagaatcgagactcagaaccagctgcttgggattgctgaccggctggaagctggcctggagcaggtccacctggccctgaaggcgcagtgctccacggaggacgtggactcgctggtggctcagctgacggatgagctcatcgcaggctgcagccagcctctgggtgacatccatgagacaccctctgccacccacctggaccagtacctgtaccagctgcgcacccatcacctgagccaaatcactgaggctgccctggccctgaagctcggccacagtgagctccctgcagctctggagcaggcggaggactggctcctgcgtctgcgtgccctggcagaggagccccagaacagcctgccggacatcgtcatctggatgctgcagggagacaagcgtgtggcataccagcgggtgcccgcccaccaagtcctcttctcccggcggggtgccaactactgtggcaagaattgtgggaagctacagacaatctttctgaaatatccgatggagaaggtgcctggcgcccggatgccagtgcagatacgggtcaagctgtggtttgggctctcagtggatgagaaggagttcaaccagtttgctgaggggaagctgtctgtctttgctgaaacctatgagaacgagactaagttggcccttgttgggaactggggcacaacgggcctcacctaccccaagttttctgacgtcacgggcaagatcaagctacccaaggacagcttccgcccctcggccggctggacctgggctggagattggttcgtgtgtccggagaagactctgctccatgacatggacgccggtcacctgagcttcgtggaagaggtgtttgagaaccagacccggcttcccggaggccagtggatctacatgagtgacaactacaccgatgtgaacggggagaaggtgcttcccaaggatgacattgagtgcccactgggctggaagtgggaagatgaggaatggtccacagacctcaaccgggctgtcgatgagcaaggctgggagtatagcatcaccatccccccggagcggaagccgaagcactgggtccctgctgagaagatgtactacacacaccgacggcggcgctgggtgcgcctgcgcaggagggatctcagccaaatggaagcactgaaaaggcacaggcaggcggaggcggagggcgagggctgggagtacgcctctctttttggctggaagttccacctcgagtaccgcaagacagatgccttccgccgccgccgctggcgccgtcgcatggagccactggagaagacggggcctgcagctgtgtttgcccttgagggggccctgggcggcgtgatggatgacaagagtgaagattccatgtccgtctccaccttgagcttcggtgtgaacagacccacgatttcctgcatattcgactatgggaaccgctaccatctacgctgctacatgtaccaggcccgggacctggctgcgatggacaaggactctttttctgatccctatgccatcgtctccttcctgcaccagagccagaagacggtggtggtgaagaacacccttaaccccacctgggaccagacgctcatcttctacgagatcgagatctttggcgagccggccacagttgctgagcaaccgcccagcattgtggtggagctgtacgaccatgacacttatggtgcagacgagtttatgggtcgctgcatctgtcaaccgagtctggaacggatgccacggctggcctggttcccactgacgaggggcagccagccgtcgggggagctgctggcctcttttgagctcatccagagagagaagccggccatccaccatattcctggttttgaggtgcaggagacatcaaggatcctggatgagtctgaggacacagacctgccctacccaccaccccagagggaggccaacatctacatggttcctcagaacatcaagccagcgctccagcgtaccgccatcgagatcctggcatggggcctgcggaacatgaagagttaccagctggccaacatctcctcccccagcctcgtggtagagtgtgggggccagacggtgcagtcctgtgtcatcaggaacctccggaagaaccccaactttgacatctgcaccctcttcatggaagtgatgctgcccagggaggagctctactgcccccccatcaccgtcaaggtcatcgataaccgccagtttggccgccggcctgtggtgggccagtgtaccatccgctccctggagagcttcctgtgtgacccctactcggcggagagtccatccccacagggtggcccagacgatgtgagcctactcagtcctggggaagacgtgctcatcgacattgatgacaaggagcccctcatccccatccaggaggaagagttcatcgattggtggagcaaattctttgcctccataggggagagggaaaagtgcggctcctacctggagaaggattttgacaccctgaaggtctatgacacacagctggagaatgtggaggcctttgagggcctgtctgacttttgtaacaccttcaagctgtaccggggcaagacgcaggaggagacagaagatccatctgtgattggtgaatttaagggcctcttcaaaatttatcccctcccagaagacccagccatccccatgcccccaagacagttccaccagctggccgcccagggaccccaggagtgcttggtccgtatctacattgtccgagcatttggcctgcagcccaaggaccccaatggaaagtgtgatccttacatcaagatctccatagggaagaaatcagtgagtgaccaggataactacatcccctgcacgctggagcccgtatttggaaagatgttcgagctgacctgcactctgcctctggagaaggacctaaagatcactctctatgactatgacctcctctccaaggacgaaaagatcggtgagacggtcgtcgacctggagaacaggctgctgtccaagtttggggctcgctgtggactcccacagacctactgtgtctctggaccgaaccagtggcgggaccagctccgcccctcccagctcctccacctcttctgccagcagcatagagtcaaggcacctgtgtaccggacagaccgtgtaatgtttcaggataaagaatattccattgaagagatagaggctggcaggatcccaaacccacacctgggcccagtggaggagcgtctggctctgcatgtgcttcagcagcagggcctggtcccggagcacgtggagtcacggcccctctacagccccctgcagccagacatcgagcaggggaagctgcagatgtgggtcgacctatttccgaaggccctggggcggcctggacctcccttcaacatcaccccacggagagccagaaggtttttcctgcgttgtattatctggaataccagagatgtgatcctggatgacctgagcctcacgggggagaagatgagcgacatttatgtgaaaggttggatgattggctttgaagaacacaagcaaaagacagacgtgcattatcgttccctgggaggtgaaggcaacttcaactggaggttcattttccccttcgactacctgccagctgagcaagtctgtaccattgccaagaaggatgccttctggaggctggacaagactgagagcaaaatcccagcacgagtggtgttccagatctgggacaatgacaagttctcctttgatgattttctgggctccctgcagctcgatctcaaccgcatgcccaagccagccaagacagccaagaagtgctccttggaccagctggatgatgctttccacccagaatggtttgtgtccctttttgagcagaaaacagtgaagggctggtggccctgtgtagcagaagagggtgagaagaaaatactggcgggcaagctggaaatgaccttggagattgtagcagagagtgagcatgaggagcggcctgctggccagggccgggatgagcccaacatgaaccctaagcttgaggacccaaggcgccccgacacctccttcctgtggtttacctccccatacaagaccatgaagttcatcctgtggcggcgtttccggtgggccatcatcctcttcatcatcctcttcatcctgctgctgttcctggccatcttcatctacgccttcccgaactatgctgccatgaagctggtgaagcccttcagctgaggactctcctgccctgtagaaggggccgtggggtcccctccagcatgggactggcctgcctcctccgcccagctcggcgagctcctccagacctcctaggcctgattgtcctgccagggtgggcagacagacagatggaccggcccacactcccag

SEQ ID NO: 49010 - DNA, 6339 bp, Artificial Sequence
  derived and/or modified sequence
atgctgtgctgcctgctggtgcgggccagcaacctgcccagcgccaagaaagatcggcgcagcgacccagtcgcctcacttacatttcggggggtcaagaaacgcaccaaggtgatcaaaaatagcgtgaaccctgtctggaacgaaggatttgaatgggatctgaaagggatcccgctcgaccaggggtctgaacttcatgttgtcgtcaaagaccacgagaccatgggcaggaacagatttctaggggaagccaaggtccctctccgggaagtgttggccaccccaagcctgtccgcatccttcaacgcacctcttctagataccaagaagcagcctaccggtgccagcctagtgctccaagtgagttatactcccctgccgggggcagtgcccctgtttcctccccctacaccactggaacccagcccaaccctgcctgatttggatgttgtcgccggcggcggacagtcccgcgcagaaacttggagtctgttgtcagattcaacaatggacaccagatactctgggaagaagtggcctgcacccacagataccgggggcgaggaagacacggaagaccaaggtctgactggggacgaggccgagcccttccttgaccagtcagggggcccaggtgcgccgactactcctaggaagctccccagtcggccccctccgcactacccaggtattaagaggaaaagatccgcccctaccagtagaaaactgttaagtgacaaaccgcaggacttccagattagggttcaagtcatcgagggccgccaactccccggggtaaacattaagcccgtggtgaaagtcaccgctgctggtcaaactaaaaggacgcgcattcacaagggcaactcgcctctcttcaacgagactttgttttttaatttatttgatagcccgggcgagctgttcgacgagcctatcttcatcacagtggtagacagccgctcactaagaaccgacgcgcttctcggagaattccggatggacgtgggtacaatctatagggaaccacggcacgcctatttacggaagtggttgcttctgtccgacccagacgatttttcagctggagctagggggtatttgaaaacaagcctatgtgttctggggccaggtgatgaggctcccttggaacggaaagatccctctgaagacaaagaggatattgaaagcaacctgctgaggccgacaggggtggcccttaggggagcccacttttgcctgaaagtgtttcgcgccgaggatctacctcaaatggacgatgctgtgatggataacgtgaagcagatctttggcttcgagagcaacaaaaagaatctcgtggacccattcgtggaagtatcgttcgctgggaagatgctctgctccaaaatcctggaaaagaccgctaacccacagtggaaccaaaacataaccctgcccgctatgttcccgtccatgtgcgaaaaaatgaggatccgtataatcgactgggaccgcctcacccacaacgatatcgttgcgacgacctatctgtcaatgagcaagatatcagccccagggggcgagatcgaggaagaaccggccggagccgtcaaaccatccaaggcttcggatctggatgattatctcgggttcctgccaacttttggcccatgttacattaacctctatggcagcccgcgcgagttcaccggatttcctgatccgtataccgagctgaacaccggaaaaggagagggcgtcgcttacagagggaggctcctgttgtccctggaaacgaaactggtggaacatagcgaacagaaggtggaagatctccccgctgatgacatcttacgggttgaaaagtacctgcgccggaggaaatacagcctttttgccgctttttacagcgcgaccatgctgcaagatgtggacgacgcgatacagtttgaggtgtctatcggaaactatggaaacaaatttgacatgacatgtctgcccctcgctagtaccacccaatacagtagagccgtatttgacggctgtcactactattatctcccttggggaaacgttaagccggtcgtcgttctgtcaagctattgggaggatatttcacaccgcatcgagacccagaaccagctgctagggattgccgaccgactggaagccgggttagaacaggtccatttggccctcaaagcacaatgcagtaccgaggatgtggacagtctcgtggcgcagcttacagatgagctgatcgccggttgttcccaaccgctgggggatattcatgaaacaccatccgccacccatctggaccagtacctctaccaactgcgcacacatcatttgagccaaattaccgaagccgcactggccctcaagttgggccattcagaactgccagctgcactggagcaggctgaggactggctgttgcggctaagggcattagccgaggagccgcagaactccttacccgatatcgtcatttggatgctgcagggggacaagcgggtagcctatcaaagggtgccagctcatcaggtgctgttcagccgcaggggagccaactactgcggcaaaaactgtgggaagctccaaaccatctttctgaagtatccgatggaaaaagtacccggtgctcgcatgccagtgcagatccgcgtcaaactgtggtttggcttgtctgtagacgaaaaagagttcaatcaattcgccgagggcaaactctcagtattcgcggaaacctacgagaacgaaacaaaattagctcttgtcggcaattggggtacaaccggcctgacgtatccaaaattcagcgacgtaactgggaaaataaagctccccaaagactctttcaggccttcagccggttggacttgggctggcgactggtttgtgtgtcctgaaaagaccctgctccacgatatggacgcgggccacctctctttcgtggaggaagtgttcgagaatcagactcgtctgccaggcggacagtggatctacatgtcagacaactacaccgacgttaatggtgagaaagtgctgcccaaggatgatatcgagtgcccccttggctggaagtgggaggatgaggaatggtccacagacttaaatcgcgcagtggacgaacagggatgggaatacagcattactatacctccagaacggaaacctaagcactgggttccagctgaaaaaatgtattacacgcatcgccgcaggcggtgggtccgcctgcgtaggagagaccttagccagatggaagcactgaagcgccaccgacaagcagaggccgagggggaagggtgggagtacgcaagcctcttcggctggaaattccacctcgaatatcggaaaactgacgcttttaggagacgaagatggcggcgacggatggagcctcttgaaaagactggacccgcagcagtgttcgccttggagggggccctggggggggtaatggacgataagtctgaggattctatgagcgtctccaccttatcgtttggcgtaaacagaccaacaatttcttgtatctttgactatgggaacagatatcatctacgctgttatatgtaccaagctagagatctagccgccatggataaagatagcttctcagacccttatgccattgtttcctttctgcatcagtctcagaaaacggtcgtggtgaagaacacacttaacccaacctgggaccaaaccctcatattctacgagattgagatcttcggggaacctgccactgtagcagagcagccacccagtatagttgtcgagttgtatgatcacgatacctacggcgcggacgaatttatggggcgctgcatctgccagccttcacttgagagaatgccccggcttgcctggtttccactcacgaggggtagccagccctccggcgagcttctcgctagcttcgagctgattcagagggagaagccagcaatacatcatatccccggtttcgaggtgcaagagacgagccgcattcttgacgaatcagaagacaccgacttaccctatccacccccccagcgcgaggccaatatttatatggtaccccagaatattaaacccgctctgcaaagaaccgcaatagagatcctggcctggggactgcgcaatatgaaatcataccagctggccaatattagcagtccctccctggtggtggagtgtggcgggcagaccgtgcagtcttgtgtgattaggaatctcagaaaaaaccctaactttgatatttgtacgctgttcatggaagttatgctccctagagaagagctgtattgtccaccaatcactgtcaaggttatcgacaaccgccagtttgggcgtagacccgtcgtagggcagtgtacaatccggtccctggagagcttcctctgcgatccatatagtgcagagagtccatccccccagggcggcccagatgacgtttccctcctgtcaccaggcgaggacgtgctgatcgatattgatgacaaagaacccctcattccgatccaggaggaggagttcatcgattggtggtccaaatttttcgctagcattggtgagagagagaagtgtgggtcttatctggagaaggattttgatacactgaaagtctacgatacccaactggaaaatgttgaggcatttgagggcttgtctgatttctgtaatacattcaagctttacaggggcaaaacacaggaggagacagaggatccaagcgttatcggggagttcaagggccttttcaaaatctaccctctaccagaagatcccgcgatcccaatgccaccccgacagtttcaccagcttgcagctcagggcccccaagagtgcctggtgcgcatttatatcgtccgtgccttcgggctccagcccaaagatccgaacgggaaatgtgatccatacattaagattagcattggcaaaaaatcggtctccgaccaggataattacatcccttgcacattggagccggtgtttggtaagatgtttgaattgacctgcacactgcctctggagaaggacctgaaaattaccttgtacgactacgacctgctgtctaaggacgagaaaattggtgagacagtcgttgatctcgagaatcggctgcttagcaagtttggtgcacgctgcggtctgccccaaacatactgcgtttctggacccaaccaatggagagaccagcttaggcctagtcagctgctgcacttattttgtcagcaacatagggtaaaagctcccgtctatcgtactgaccgggtcatgtttcaagataaagaatacagcatagaagagatcgaagccgggaggatccctaacccgcacctcggccccgtagaggagcggctcgcactgcacgttttacagcagcagggcctggtgccggagcacgtggaaagccgtccattatattcgcctcttcagcccgatatcgaacaagggaagttgcagatgtgggttgaccttttcccaaaagccctagggaggcctggacccccattcaacataacacccagaagggcgaggaggtttttcctgcggtgtatcatttggaacacccgagatgtgattctagacgacctgagtctgactggcgagaagatgagcgacatctacgttaaggggtggatgatcggattcgaggagcacaaacagaaaactgacgtccactacaggtctctgggcggagaagggaatttcaattggcgattcatctttcctttcgattacctcccagccgaacaagtctgcaccattgcgaaaaaagatgccttttggcggctcgataaaactgagtcaaagatcccagcacgggtagttttccagatctgggacaatgacaagttttcattcgacgatttcttgggatccctgcagctggaccttaataggatgcctaaaccggccaagacggcaaagaagtgcagcctcgatcagcttgacgacgcgtttcacccagagtggtttgtgtcactgtttgaacagaagacggtgaaggggtggtggccttgcgtagcggaagaaggagagaagaaaattctggccgggaaactcgagatgactctggagattgtggccgagagcgagcacgaagaaagaccggcgggacagggaagggacgaacccaatatgaacccgaaactcgaagacccaagacgccccgatacttctttcctgtggttcaccagcccctacaaaactatgaaatttatcctctggcgacgctttcgatgggcaatcattctgttcataatcctttttatcctgctgttgttcctggccatctttatctacgccttccctaactatgctgcgatgaaactggtgaagccgttctcatag

SEQ ID NO: 49011 - DNA, 6339 bp, Artificial Sequence
  derived and/or modified sequence
atgctgtgttgtctgctggtcagggcttcgaacctcccttccgctaagaaggaccggaggtccgacccagtggcatctttaacatttcggggagtcaaaaaacgaaccaaggtgataaaaaattcagtcaacccagtttggaatgaaggtttcgagtgggacctcaaaggcattccgcttgatcagggctccgagcttcatgtggtggttaaggaccacgagacaatggggaggaatcggtttctaggcgaggcaaaagtgccattacgagaagtgctcgctaccccaagtttatcagcatcgttcaacgcacctctgctggacaccaagaaacagcccacaggcgcatccctggtcctccaggtgtcttacactcccctcccaggagctgtgcccctgttcccacctccaaccccacttgagccgtcccctactctgccggatttggacgtggtcgccggaggaggacagagcagggcagaaacctggtccctgctgtccgattcaaccatggacactagatatagtggcaagaagtggcctgcacctaccgacactggcggagaagaagacaccgaggaccaaggactaaccggcgatgaggccgagccattcctggatcagtccgggggacctggtgctcctactactcctcgaaaactcccaagccggccaccgcctcactaccccggaatcaaacgcaaacgtagtgcccctacaagtcggaagctgctctctgacaaaccgcaggattttcagatcagagtgcaggtgatcgagggcaggcagttaccgggtgtgaacataaagcctgtagtgaaggtcaccgccgcaggccaaacaaagcggacaaggattcacaaagggaactctccactgtttaacgaaactctgttctttaacttattcgacagccccggagagctctttgatgaacccatttttatcaccgtggttgactcacggtcactgcgaacagacgcactacttggcgagttccgtatggacgtgggaactatttacagggagccaaggcacgcctacttgaggaagtggctcctattaagtgacccggatgacttctctgcgggagcacgaggttacctgaagacctccctctgtgtgttgggtccaggcgatgaggccccactggaacggaaggacccgtcggaggataaagaagacatagagtctaaccttctacggcctacaggagtcgctcttcgtggagcccatttctgtctcaaagtgttccgtgccgaggacctccctcagatggacgacgccgtcatggacaacgtcaagcaaatattcggatttgaaagtaataagaagaaccttgtggatccattcgtggaggtgagttttgccggaaagatgctgtgttcgaagatactcgagaaaacagccaacccacagtggaaccagaatatcactctcccggcaatgtttccttccatgtgtgagaaaatgagaatcagaatcatcgattgggaccgcctgacccataacgatatcgtcgccacaacttacctatcaatgtccaagattagcgctcccggaggagaaattgaggaagagccagctggagcggtgaaaccctctaaagcaagtgacttggatgattacttggggtttttgcctactttcggcccatgctacattaacttgtatggctctccgagagaatttaccggtttcccagatccatataccgagctaaacacaggaaaaggggaaggcgtggcctacagaggcaggcttctgctctccctggagactaaattagtggagcactcagagcagaaagtggaagatctgcccgcagacgatatactgagagttgaaaagtatctcagacgtcggaagtacagtctctttgccgctttttatagcgccactatgcttcaggacgtggacgacgcaattcagttcgaagtctctatcggcaattacgggaacaagttcgacatgacctgtcttcctctggcttctactactcagtattcgagggcggtcttcgacggctgccattattactatttgccttggggcaatgtgaagccggtggttgttctttccagctactgggaggatatctcccatagaatcgaaacacagaatcaactgttgggcattgccgatagactggaagctggattagagcaagttcaccttgctctgaaggctcagtgctctacagaagacgtcgacagcctggtcgcacaattgaccgacgagcttatcgccggttgcagccaacctctgggcgacatccacgagaccccttccgccacacacttggatcagtacctgtaccagctgaggacccaccacctgtctcagattactgaagctgcgctcgcgttaaagctcgggcattcagagctgcctgctgctctcgaacaagccgaggattggcttctgcgacttcgcgcattagctgaggagccacagaattccctgccagacatcgtgatttggatgctccaaggggataaaagggtagcctatcaaagagtaccagcacaccaagtgttgttcagtcggcgaggggctaattactgtgggaaaaattgtgggaagctgcagacaatttttttgaaataccccatggagaaggttcctggagcgagaatgcctgtccagattcgcgttaaattatggttcggcctatccgtggatgagaaagagtttaatcagttcgccgagggcaagctgtccgtcttcgcagagacatatgagaacgagaccaagctggccttggtcggcaattggggtaccacaggcctaacttacccgaagttcagtgatgttacaggaaaaataaagttgcccaaggactcttttcgcccatcggctgggtggacatgggcaggggattggtttgtgtgcccagagaaaactctcctccatgatatggacgctggacacctctcattcgttgaggaagtctttgagaatcagacccgcctgccaggtggccagtggatttatatgtccgacaactacactgacgtcaatggcgagaaggtgctcccaaaggatgatatcgaatgcccactgggctggaagtgggaagatgaggagtggtccaccgatctgaatagagccgttgatgaacagggttgggagtattccattactattcccccagaacgcaaaccaaaacattgggtacctgctgagaaaatgtattatactcatcgaaggcggcgatgggttagactgagacgcagggacctctcacaaatggaggccctgaaaagacaccggcaggccgaggcagagggtgagggctgggagtacgcaagcctgtttggctggaagtttcacttagagtatcgtaagactgatgccttccgccgacgcaggtggcggagaaggatggagcccttagaaaaaactgggcctgcagctgttttcgcgctcgaaggcgctttaggcggtgtcatggacgacaagtctgaagacagtatgagcgtgtctactttgtccttcggcgtgaacagacctactatttcctgcatcttcgactacggaaacaggtaccatctccggtgctacatgtaccaggccagagacctcgctgctatggataaagactccttttcagatccatatgccatcgtgtcctttctgcatcaatcccaaaaaacagtcgtcgttaagaacacccttaaccccacatgggatcagacactgatcttttacgaaattgaaatcttcggggaaccagcaactgttgcagagcagccacctagcatcgttgtagagttgtacgatcatgatacttatggagccgatgaattcatgggtagatgcatatgccagcctagtctggaaagaatgccaaggctggcctggtttccccttacaagaggttcgcaaccttcaggcgagctgttagcttccttcgagctaatccagcgggaaaagcccgctatccatcacattccgggatttgaggtgcaggagactagtcggatcctggacgagagtgaggatactgacctgccatatccaccaccgcaacgagaggcaaatatatatatggtaccacagaatattaaaccggcactgcagcgaacagccattgaaatcctggcttggggcctgcggaacatgaaatcataccagctagcaaacatatctagcccaagtctggtggtggagtgtgggggacagactgtgcagtcatgtgtcattagaaacctgagaaagaatcccaattttgacatctgcacgttattcatggaggtcatgctccctcgggaagagttgtattgtccacccatcactgtgaaggtgattgacaaccggcagtttggcagaaggcctgtggtgggccagtgtaccattagatctcttgaatctttcctctgtgacccttattctgcagaatctcccagcccacaaggaggtccagatgacgtgtcgctgctgtctccaggagaggatgtcctgattgatattgacgataaggagcccctaatacctattcaggaggaggagttcattgactggtggtccaaatttttcgctagcatcggcgagagggagaaatgtgggtcatacctggagaaggactttgacacactgaaggtgtacgacacacagctggagaacgttgaggcctttgaagggctttccgacttttgtaacacgttcaaactatataggggaaagacacaggaggagaccgaagatccttcagtgatcggcgagttcaaaggcctgtttaaaatctacccgctgcctgaagacccggctatcccaatgcctccccgtcagtttcatcagctcgccgctcaaggtccgcaggagtgtttggtaaggatttatattgtgagggctttcggacttcaacccaaagatccgaacggcaagtgcgacccgtacattaaaattagtataggcaaaaagagcgtttctgaccaggacaactacattccttgtacacttgaacccgtctttggtaaaatgttcgagctgacctgtactctgccccttgagaaagatttgaagatcaccttgtacgattatgacctgctgtccaaagatgaaaagattggagagacggtggtagacttggagaaccgcctgctgagcaaatttggcgcaaggtgtggtcttccccaaacatactgcgtgagcgggccaaaccagtggagagaccaactccgcccatcacagttgctgcaccttttttgtcagcaacatcgagtcaaggctcctgtgtacagaaccgaccgtgtcatgtttcaggataaggaatactctattgaggaaatagaagccggtcgtattcctaatccgcacttgggcccagtggaggagagactggctctccacgtgttacagcagcagggtctggtccctgagcatgtcgaatcacgccctctgtatagccccctccagcctgacattgaacagggaaaactccagatgtgggttgacctctttcccaaggctctgggtagacctggccctcctttcaacataacacctcgcagggcgaggaggttcttcctgagatgcatcatttggaacacccgcgatgtcattctcgacgatttaagtcttaccggagaaaagatgagtgacatctatgttaagggctggatgatagggttcgaggaacacaagcagaaaacagacgtacactaccgttctctgggcggagagggcaactttaactggcgctttatcttccccttcgattatcttccagcagagcaggtgtgcacgatcgccaagaaggatgccttctggcgtctcgataagacagagtccaagatccccgcacgcgtggtgttccaaatttgggataacgataagttctcttttgacgacttccttggtagcctgcagttagatctgaaccgtatgcctaaacctgcaaagaccgctaagaagtgctctctagatcaattggacgacgcctttcaccccgagtggttcgtgagcctgttcgaacagaagaccgtcaaagggtggtggccttgtgtagcggaggaaggggaaaagaaaattcttgccggaaagttagagatgactctggagatcgtcgctgagtcagagcacgaggagagacccgcaggacaaggtcgcgacgaacccaatatgaacccaaagctggaagatccacggagaccagatacatcgttcctttggtttacgtcaccctacaagactatgaagtttattctctggcggcgattcagatgggccattatcctatttatcatactgttcatcttactcctgtttctggccatattcatatacgcattcccaaattatgcagcgatgaagctggtgaaacccttctcctaa

SEQ ID NO: 49012 - DNA, 6339 bp, Artificial Sequence
  derived and/or modified sequence
atgctgtgctgtcttctcgtccgcgctagcaatctccccagtgccaagaaggaccgccgatcagaccccgttgctagcttgactttccgcggagttaaaaaacggactaaggtaattaagaattctgtcaaccccgtgtggaatgaaggcttcgagtgggacctgaaagggataccactggatcaggggtctgagctgcatgtggttgtgaaagaccatgaaacaatggggcggaatagatttctaggtgaagccaaggttccgttgcgagaggtgctcgctactccatctctgagtgcaagctttaacgcgcccctgttagacaccaagaagcaacccaccggcgcctctctggtactgcaagtttcctatacaccgctcccaggtgctgtccctctgtttcctccaccaacccctcttgagccgagcccgacacttcccgacttggacgttgtcgccggtggcggtcagagtagagctgagacgtggagcctattgagcgatagcactatggatactcggtatagcgggaaaaagtggccggcccccactgatactggaggcgaggaggacaccgaggaccaggggctgactggtgacgaggctgaaccctttcttgaccaaagtgggggccccggcgctccaactactccacgcaaactcccatctcggcccccgccacattaccccgggatcaaaagaaagcggtccgccccaactagccgcaagctcttgagcgacaagccccaggactttcagatccgagtgcaggttatcgaaggcagacaacttcctggagtcaacatcaagcctgtggtgaaagtcacggcggccggccagaccaagagaaccagaatccacaaaggtaacagccccctgttcaacgagactctgttttttaacttgtttgactcacctggtgagctgtttgatgagccaatctttatcacagtagtcgatagccgcagtctccgcactgacgctctgctgggagaatttaggatggatgttgggaccatctatcgagagcctcgccatgcctatcttaggaagtggctgttattatcggatcccgatgatttttccgccggtgccagggggtacttaaagacaagcctgtgtgttctcggccctggcgatgaagcccccctggaacgcaaagacccttcggaggataaagaggacatcgagtccaatttactgagaccaaccggagtcgccctccgcggtgcacacttctgtctgaaagttttccgggccgaggacttacctcaaatggatgacgcagtgatggacaacgtgaaacaaatctttggcttcgagtcaaacaaaaaaaatctggttgaccctttcgttgaagtcagcttcgctggcaagatgttgtgcagtaaaatcctggagaaaacagctaaccctcagtggaatcagaacataactctgcctgccatgtttccctctatgtgcgaaaagatgaggataagaattatcgattgggacagattgacacacaacgatattgtggcaacaacttacctgtccatgtcaaaaattagcgctcctgggggcgaaatcgaggaagagcctgccggcgccgtcaaacccagtaaggcatccgatctcgacgattatctcggatttttacccaccttcggcccctgctatatcaatctgtacggaagccctcgggagttcaccgggttccctgacccatacacagagctgaacacaggaaaaggggagggggtggcctaccggggccgccttctccttagcttggaaaccaaacttgtggaacattcagaacagaaagtggaagacctgcctgcagatgacatcttaagagttgagaaatacttgcgtcggcgaaagtactcattgttcgccgccttttatagcgcgactatgctgcaggacgtggatgatgctattcaatttgaggtgtctatcggtaattacggcaacaagttcgatatgacatgtcttcctctcgcctctacaacacagtattcaagagctgtgttcgacgggtgtcattactactatctcccctggggcaatgtgaaacccgtggtcgttctatctagctactgggaagatatcagtcaccgcatagaaactcaaaaccaactcttagggatcgccgaccggttggaagcaggactcgagcaagtgcacctggccctcaaagctcagtgtagcaccgaagatgtggatagtctggtagcacagctaaccgacgaactgattgctgggtgttcacaaccactgggagatatacacgagacccccagcgcaacacatctggaccagtacctctatcaactcagaacccaccacctcagtcagatcacagaagctgccctcgctctgaagctgggccactccgagctgccagccgctcttgagcaagctgaggactggctgctgagactgcgggcgctagctgaggaaccccagaactctctgcccgacattgtgatttggatgctgcagggtgataagcgcgtcgcctaccaacgcgtgcccgcccaccaagtgctgttctcacgacggggggctaattactgtggcaaaaactgcggcaagctgcagactatttttctgaaatatccaatggaaaaagtccccggcgcaaggatgcccgtgcaaattcgggttaagctctggttcggactcagtgtggacgagaaagagtttaaccagtttgccgagggcaagttgtccgtcttcgctgagacttacgagaatgaaactaagttagctctcgtgggtaattgggggaccaccggcttgacctaccctaagtttagcgatgtaacaggaaaaatcaagctgccaaaagatagtttcagaccgagcgccgggtggacttgggctggagattggttcgtgtgccccgagaagaccttactccacgacatggacgcggggcacctgtccttcgttgaagaagtgttcgagaaccagacgaggctaccaggcggacagtggatctatatgagtgacaactacaccgacgtgaatggagaaaaagtcttgcctaaggacgacattgagtgtccattaggttggaaatgggaggatgaggagtggtcaactgatctcaatagggctgtcgacgaacagggatgggaatacagcatcaccattcctccagagcgaaagcctaagcactgggtgcctgctgaaaagatgtactacacacaccgccgtcgaaggtgggttcgcctccgcagaagagacctgtcacaaatggaagccttgaaaaggcataggcaagcggaagcggagggggaaggctgggaatatgcatccttgttcggctggaagtttcacttggagtatcgaaagacagatgccttccgaaggcgaagatggagaagacggatggagccgttggagaaaactggacctgccgccgtattcgcactggagggtgccctcggcggcgtcatggatgataagtcagaggactccatgtctgtctcaacattatctttcggagtaaatcgtcccactatttcatgtatcttcgactatggcaaccgctatcatttgcgttgctacatgtatcaagcgcgtgatctggctgcaatggacaaggatagttttagcgatccgtacgccatcgtgtctttcttgcaccagagtcagaagaccgtcgttgttaagaacacgttaaaccctacatgggaccaaactctaatcttctacgaaatcgagatttttggggagcccgcaaccgtcgctgaacaacccccctctatcgtggtggaactttacgaccacgacacatacggtgccgacgagtttatgggtaggtgtatctgccagccttcacttgagaggatgcctcggctggcctggttccctctcacccgcggaagccagccctctggcgaattgcttgcctctttcgagctgatacagcgggagaagccggcgattcatcacatacccggttttgaggtccaagagacatcgcgaatcttggacgaaagtgaggataccgacttgccttacccaccaccacagagagaggcaaatatatacatggtaccgcagaatatcaagcccgcacttcagagaacagcaatagaaattctagcctggggcctaaggaacatgaaatcctaccaacttgccaatatcagctccccgtcactcgtggtggagtgtggcgggcagactgtgcagagttgcgttattagaaacctgagaaaaaatcctaacttcgacatatgtactctattcatggaggtgatgctaccgagggaggagctttactgtcccccaatcacggtaaaggtgatcgataatcggcagttcggacggcggcccgtggtggggcagtgtaccataaggagtctggagtcattcctgtgtgatccgtactcggccgaatctccaagtccccagggaggcccggatgatgtctcgctgctgagccctggagaggacgtccttatcgacatcgatgacaaggaacctctcattcccatccaggaggaagagttcattgactggtggtctaaattctttgcatctataggagagcgagagaagtgtggctcttacctggaaaaagactttgacacattgaaggtctacgacacgcagctggagaatgtagaggcttttgagggtctgtcagacttctgcaatacattcaagctctatcgcggcaagacacaagaggagactgaagatccatccgtgatcggtgagttcaagggcctcttcaagatctatcctctccctgaggatcctgccattcctatgccccctaggcagttccaccaactggcggcgcaagggccccaagaatgtctggttaggatttatattgtcagagcgttcggtttgcagcctaaagaccctaacggtaaatgcgatccgtacatcaagatttctattggaaagaagagtgtaagtgaccaggacaattatattccctgtaccctggagccggtgtttggcaaaatgttcgaactgacatgtacactgcctcttgagaaagaccttaaaattaccctttatgattatgatttgctcagtaaggacgagaagattggcgaaaccgtcgtggatttagaaaaccgactgctttctaaattcggggcccgatgcggcctccctcagacgtactgcgtctccggcccaaatcagtggcgcgaccagctcagaccctcacaattactgcacttgttttgccagcagcatagagtcaaagcccccgtatataggacggatcgagttatgttccaggacaaggagtacagcattgaggagattgaggctggcaggattcccaaccctcacctgggccccgtcgaagaaagacttgcactgcatgttctgcaacagcagggtctggtgcccgaacacgtggagtcacggcccctgtatagccctctccagcccgatattgagcaaggaaaattacagatgtgggtggacctatttcccaaagcactaggtcggcctggtcctcctttcaacatcacaccccgacgagcaagacgcttctttttgcgatgtataatttggaacactcgtgacgttatcctcgacgacctgagtctgaccggagagaaaatgagcgatatctacgtgaagggctggatgattggatttgaggagcataagcagaaaaccgatgtccattaccgatccttgggaggtgagggcaatttcaactggcgatttattttcccctttgactacctgccagctgaacaggtatgtacgatcgccaaaaaggacgcattctggcggctcgataagactgagagcaaaataccagcacgcgtggtgtttcagatctgggataatgacaagtttagcttcgacgattttctgggctccctgcagctggatctgaatcgtatgccaaaaccggcaaagaccgccaagaaatgctcgcttgaccagttggacgatgccttccacccagaatggttcgtaagcctgttcgagcagaaaactgtgaaaggctggtggccttgcgtggcagaagagggagaaaaaaagatactcgccggtaaactggagatgaccctggagattgtggcagagagcgaacacgaagagcgacccgccggacaaggccgcgatgaacccaacatgaatccaaagctcgaagatccacgacgtccagacacttccttcctctggttcacgtctccctataagactatgaagttcatactctggaggagatttaggtgggctatcattctgtttattatcttattcattttgctgctgtttttggccattttcatctacgccttcccaaactacgccgctatgaagcttgttaaacctttcagctag

SEQ ID NO: 49013 - DNA, 6339 bp, Artificial Sequence
  derived and/or modified sequence
atgctctgttgcctcttagtccgtgctagcaatctgccaagtgcgaagaaagacaggcgttcagacccagtggcaagcctcacgttccggggggtcaaaaaaagaacaaaggtcataaaaaattcagtcaaccctgtctggaatgaagggtttgagtgggatctgaagggaataccgttagaccagggaagtgagctccacgtggttgttaaggaccatgagacgatgggtagaaaccgatttctaggcgaggccaaggtaccactgcgggaagtgctggcaactccatcactaagcgcttctttcaatgcccccttgctcgataccaaaaagcagcctaccggggcaagtcttgtcctccaagtgtcctacaccccactgccaggtgcggtacccctcttcccccccccgacaccactcgaaccttcgcctaccctccctgaccttgacgtcgtcgctggcggcggtcagagtcgcgccgagacttggtccctgctttcagattcaactatggatacacgctattcaggcaaaaaatggcctgcccctaccgacaccggcggagaagaggacaccgaagaccaaggtttaacgggcgatgaagctgagccattccttgaccagtccggtgggcccggtgcacccaccactcctagaaaacttcccagccggccccctccccactacccaggcatcaaacgaaaaagatccgctcccacgtccagaaagctcttgtccgataaaccccaggacttccaaattagagttcaggtcattgaaggtcggcagcttcccggcgtgaatattaagcccgtggtcaaagtcaccgccgctgggcaaactaagcgaacccgaatccacaagggcaattctccattgttcaatgaaactcttttttttaacctgttcgattctcccggcgagctcttcgatgagcccatattcattactgttgtcgactctcgaagtttgagaactgatgcgttattgggagagttccgtatggacgtgggcaccatttatagagaaccccgccatgcctacctcagaaagtggttgctattatcagatcctgacgatttctctgccggggcccgtggctacttaaagacttccctctgtgttctcgggccaggagatgaagccccacttgaacgcaaggatccttccgaagacaaagaagatatcgaaagtaatttgctaaggccaacgggtgtcgccctcagaggagcccatttttgtcttaaggtatttcgggccgaggaccttccccaaatggacgacgccgtgatggataatgtgaaacagatctttgggttcgagagcaacaagaaaaacctggtggacccattcgttgaggtttcttttgccggaaagatgctctgtagcaagatactggagaaaacagccaatccccaatggaaccagaacattaccctgccagcaatgtttccgtctatgtgtgagaaaatgaggataaggataatcgactgggacagactgacacacaatgatatcgtggctaccacctacctgtctatgagcaagatcagcgcccctggaggggaaatcgaagaagagccagctggagccgttaagccttcaaaggcctctgaccttgatgattacctcggatttctacctacatttggaccatgctacatcaacctctacggatccccgcgcgagtttacaggctttccggatccttacacagagttaaatacgggtaagggcgagggagttgcctaccgggggcgtctcttactttctctggaaacaaaactagttgagcatagcgagcaaaaagtggaggatcttcccgccgacgatatcctccgggtcgaaaaataccttcgcagacgaaaatacagccttttcgctgccttttattccgctacaatgctgcaagatgtagacgacgctatccagtttgaagtatctataggcaattacggcaataaatttgacatgacatgcctgcctctcgcgtccacaacgcagtatagccgcgcggtcttcgacggctgtcattattactatcttccatggggtaacgttaagcctgtcgtggtgctctccagctattgggaggacatttcacaccggattgagacccagaaccagctgctcggaatcgcggacagattagaggctggcctcgagcaggtgcacctcgcgcttaaggctcagtgtagcaccgaagacgtggactccctggtcgcacaactcacagatgagctgatcgccggatgtagccagcccttaggagatatacatgaaacgccgtcagctacacacctcgaccagtacctatatcagctaagaacacaccatttgtctcagatcaccgaagccgctctcgcactaaagctcggtcacagcgaactcccagccgccctggaacaggccgaggactggttgttgcgactcagggctctcgctgaagaaccacagaactcactacccgacatcgtgatctggatgcttcaaggagacaagcgtgtagcttaccagcgcgtgcctgctcatcaagtgctgttcagccggcgcggtgctaactattgtggcaaaaactgtgggaaactccagaccatatttctcaagtacccaatggagaaggtgcctggtgcccgtatgcccgtgcagatcagagttaaattatggttcggtttgagcgtagatgaaaaggaatttaatcaatttgccgagggaaaattaagcgtgttcgcagaaacttacgaaaacgagacaaagttagccctcgtgggcaattgggggacgaccggactgacataccccaaattcagcgacgtcaccgggaaaattaagctccctaaggacagcttcagaccaagcgccggttggacctgggccggagattggttcgtatgtccagaaaagacactactgcatgacatggatgccggccacttatcattcgtggaggaggtcttcgaaaaccagaccaggctgccaggcgggcaatggatatacatgagtgacaactacaccgacgtcaatggagaaaaggtcctgccaaaggatgatatcgaatgtcctctgggttggaagtgggaggatgaggaatggagtactgacctcaatagagccgtagacgaacaaggttgggaatacagcattaccatcccccctgaacggaagccaaaacactgggtaccagcagaaaagatgtattatactcatcgcagacgaagatgggtccggttaaggagaagagacctgtcccagatggaagcactaaagagacatcgccaagctgaggccgaaggtgaaggatgggagtatgctagtctgtttggttggaaatttcatcttgaatacaggaaaaccgatgcattcagacgccggcgatggagaagaagaatggagccgctggagaagacagggccagctgctgtgtttgcattggagggcgcgctgggaggtgtgatggacgataagagtgaggatagtatgtccgtgtctaccctgtcatttggagtcaacaggcctacaatttcatgtatttttgattatggtaatcggtaccacctcagatgctatatgtatcaggctagggacctggccgctatggataaagattctttttccgacccttacgccatagtgtctttcctccatcagagccagaaaacagtagttgttaaaaatacactcaatcccacctgggaccaaaccctgattttctatgagatcgaaatattcggcgagcctgctaccgttgctgaacaaccaccaagcatagtagtcgagttgtatgatcacgacacatacggtgccgatgaattcatgggacggtgcatttgccagcctagtctggaaaggatgccaaggctagcgtggttccccctcacaagaggaagccaaccttcaggagagcttttggcttctttcgagctgatccaaagagagaaaccagccatccaccacatccccggattcgaagtccaggaaaccagtaggattctcgacgagagtgaagacacagatttaccgtatccaccaccacagagggaagcgaatatctacatggtgccgcagaatattaagcccgcgttgcagagaactgccatagaaatcttagcttggggactgaggaatatgaagtcgtaccagttagccaatatatctagtccctccctcgtggtcgagtgtgggggccaaactgtccagtcctgtgtgatccgaaacctacgtaagaacccaaactttgatatctgcactttgttcatggaggtgatgctgccacgagaagaactgtattgcccccctataaccgtaaaagtgatcgataacaggcagttcggacgtcgcccagtggtgggtcagtgtacgatcaggtcacttgagagcttcctgtgcgacccctattcagccgagagcccatctccacaaggtggccccgacgacgtgtctcttctgtcccccggagaggacgtccttattgacatagatgacaaggagcctttaatccccatccaagaagaagaatttatagactggtggagcaagttcttcgccagtatcggagaacgggaaaaatgtgggtcataccttgaaaaagactttgacacactgaaagtgtacgacactcagttggaaaacgtggaagcttttgaaggcctctcagatttctgcaacacctttaagttataccggggaaagacacaggaagaaacagaagatcccagcgtaattggcgaatttaaaggcctgttcaaaatataccccctccccgaggaccccgccatccccatgccaccgagacagtttcatcaactggcggcgcaagggccccaagaatgtctggttaggatttatattgtcagagcgttcggtttgcagcctaaagaccctaacggtaaatgcgatccgtacatcaagatttctattggaaagaagagtgtaagtgaccaggacaattatattccctgtaccctggagccggtgtttggcaaaatgttcgaactgacatgtacactgcctcttgagaaagaccttaaaattaccctttatgattatgatttgctcagtaaggacgagaagattggcgaaaccgtcgtggatttagaaaaccgccttctgtctaaatttggcgctcgctgtggactgcctcagacttactgtgtgtccgggccaaatcagtggcgggaccagcttagaccctcccagctcctccacctcttttgtcagcagcacagggtcaaggccccagtgtacagaaccgaccgcgtgatgttccaggataaagaatacagtatcgaagaaatcgaagccgggcgtatacccaatccacacctcgggcctgttgaggaacggctggcgctgcacgtcttgcaacaacagggactagttcccgaacatgtcgaaagccgtcctctgtattcacctctacagccggacattgagcagggaaaactgcagatgtgggtcgaccttttccccaaggctctcggacgccccgggcctcctttcaacatcacacccaggagggcaaggcgcttcttcttacgctgcatcatttggaatacacgagatgtgatcctggacgatctatcgctgacgggtgaaaaaatgagtgatatatacgtaaaaggatggatgataggatttgaggaacataagcagaaaaccgacgtgcattaccgttctcttggcggggaaggaaacttcaactggagattcatattccccttcgattatcttccagcagaacaggtttgtactatcgccaaaaaggatgcattctggagactcgataaaacagaaagcaagatccccgccagagtcgtgttccagatctgggataacgataagttctcttttgatgacttcttaggttcgttgcaactcgatctcaatagaatgccaaaaccggcaaaaactgccaagaagtgtagtttggaccagttagatgatgctttccatcccgaatggtttgtcagtcttttcgagcagaaaactgtaaagggttggtggccatgtgtggccgaagagggggagaaaaaaattttagccggcaagctggaaatgacactggaaatcgtggccgagtccgagcacgaagaaagacccgctgggcaaggccgagacgagcccaatatgaatcctaaactggaagaccctcggcggcctgacacctccttcttgtggtttacatctccatataagaccatgaagttcattctgtggcgacgttttcgatgggcaatcatacttttcatcatactgttcattcttctcctgtttctcgcaatcttcatttacgcttttcccaattacgcagccatgaagttagttaaaccattctcatag

SEQ ID NO: 49014 - RNA, 6339 nt, Artificial Sequence
  derived and/or modified sequence
augcugugcugucuucucguccgcgcuagcaaucuccccagugccaagaaggaccgccgaucagaccccguugcuagcuugacuuuccgcggaguuaaaaaacggacuaagguaauuaagaauucugucaaccccguguggaaugaaggcuucgagugggaccugaaagggauaccacuggaucaggggucugagcugcaugugguugugaaagaccaugaaacaauggggcggaauagauuucuaggugaagccaagguuccguugcgagaggugcucgcuacuccaucucugagugcaagcuuuaacgcgccccuguuagacaccaagaagcaacccaccggcgccucucugguacugcaaguuuccuauacaccgcucccaggugcugucccucuguuuccuccaccaaccccucuugagccgagcccgacacuucccgacuuggacguugucgccgguggcggucagaguagagcugagacguggagccuauugagcgauagcacuauggauacucgguauagcgggaaaaaguggccggcccccacugauacuggaggcgaggaggacaccgaggaccaggggcugacuggugacgaggcugaacccuuucuugaccaaagugggggccccggcgcuccaacuacuccacgcaaacucccaucucggcccccgccacauuaccccgggaucaaaagaaagcgguccgccccaacuagccgcaagcucuugagcgacaagccccaggacuuucagauccgagugcagguuaucgaaggcagacaacuuccuggagucaacaucaagccuguggugaaagucacggcggccggccagaccaagagaaccagaauccacaaagguaacagcccccuguucaacgagacucuguuuuuuaacuuguuugacucaccuggugagcuguuugaugagccaaucuuuaucacaguagucgauagccgcagucuccgcacugacgcucugcugggagaauuuaggauggauguugggaccaucuaucgagagccucgccaugccuaucuuaggaaguggcuguuauuaucggaucccgaugauuuuuccgccggugccaggggguacuuaaagacaagccuguguguucucggcccuggcgaugaagccccccuggaacgcaaagacccuucggaggauaaagaggacaucgaguccaauuuacugagaccaaccggagucgcccuccgcggugcacacuucugucugaaaguuuuccgggccgaggacuuaccucaaauggaugacgcagugauggacaacgugaaacaaaucuuuggcuucgagucaaacaaaaaaaaucugguugacccuuucguugaagucagcuucgcuggcaagauguugugcaguaaaauccuggagaaaacagcuaacccucaguggaaucagaacauaacucugccugccauguuucccucuaugugcgaaaagaugaggauaagaauuaucgauugggacagauugacacacaacgauauuguggcaacaacuuaccuguccaugucaaaaauuagcgcuccugggggcgaaaucgaggaagagccugccggcgccgucaaacccaguaaggcauccgaucucgacgauuaucucggauuuuuacccaccuucggccccugcuauaucaaucuguacggaagcccucgggaguucaccggguucccugacccauacacagagcugaacacaggaaaaggggaggggguggccuaccggggccgccuucuccuuagcuuggaaaccaaacuuguggaacauucagaacagaaaguggaagaccugccugcagaugacaucuuaagaguugagaaauacuugcgucggcgaaaguacucauuguucgccgccuuuuauagcgcgacuaugcugcaggacguggaugaugcuauucaauuugaggugucuaucgguaauuacggcaacaaguucgauaugacaugucuuccucucgccucuacaacacaguauucaagagcuguguucgacgggugucauuacuacuaucuccccuggggcaaugugaaacccguggucguucuaucuagcuacugggaagauaucagucaccgcauagaaacucaaaaccaacucuuagggaucgccgaccgguuggaagcaggacucgagcaagugcaccuggcccucaaagcucaguguagcaccgaagauguggauagucugguagcacagcuaaccgacgaacugauugcuggguguucacaaccacugggagauauacacgagacccccagcgcaacacaucuggaccaguaccucuaucaacucagaacccaccaccucagucagaucacagaagcugcccucgcucugaagcugggccacuccgagcugccagccgcucuugagcaagcugaggacuggcugcugagacugcgggcgcuagcugaggaaccccagaacucucugcccgacauugugauuuggaugcugcagggugauaagcgcgucgccuaccaacgcgugcccgcccaccaagugcuguucucacgacggggggcuaauuacuguggcaaaaacugcggcaagcugcagacuauuuuucugaaauauccaauggaaaaaguccccggcgcaaggaugcccgugcaaauucggguuaagcucugguucggacucaguguggacgagaaagaguuuaaccaguuugccgagggcaaguuguccgucuucgcugagacuuacgagaaugaaacuaaguuagcucucguggguaauugggggaccaccggcuugaccuacccuaaguuuagcgauguaacaggaaaaaucaagcugccaaaagauaguuucagaccgagcgccggguggacuugggcuggagauugguucgugugccccgagaagaccuuacuccacgacauggacgcggggcaccuguccuucguugaagaaguguucgagaaccagacgaggcuaccaggcggacaguggaucuauaugagugacaacuacaccgacgugaauggagaaaaagucuugccuaaggacgacauugaguguccauuagguuggaaaugggaggaugaggaguggucaacugaucucaauagggcugucgacgaacagggaugggaauacagcaucaccauuccuccagagcgaaagccuaagcacugggugccugcugaaaagauguacuacacacaccgccgucgaagguggguucgccuccgcagaagagaccugucacaaauggaagccuugaaaaggcauaggcaagcggaagcggagggggaaggcugggaauaugcauccuuguucggcuggaaguuucacuuggaguaucgaaagacagaugccuuccgaaggcgaagauggagaagacggauggagccguuggagaaaacuggaccugccgccguauucgcacuggagggugcccucggcggcgucauggaugauaagucagaggacuccaugucugucucaacauuaucuuucggaguaaaucgucccacuauuucauguaucuucgacuauggcaaccgcuaucauuugcguugcuacauguaucaagcgcgugaucuggcugcaauggacaaggauaguuuuagcgauccguacgccaucgugucuuucuugcaccagagucagaagaccgucguuguuaagaacacguuaaacccuacaugggaccaaacucuaaucuucuacgaaaucgagauuuuuggggagcccgcaaccgucgcugaacaaccccccucuaucgugguggaacuuuacgaccacgacacauacggugccgacgaguuuauggguagguguaucugccagccuucacuugagaggaugccucggcuggccugguucccucucacccgcggaagccagcccucuggcgaauugcuugccucuuucgagcugauacagcgggagaagccggcgauucaucacauacccgguuuugagguccaagagacaucgcgaaucuuggacgaaagugaggauaccgacuugccuuacccaccaccacagagagaggcaaauauauacaugguaccgcagaauaucaagcccgcacuucagagaacagcaauagaaauucuagccuggggccuaaggaacaugaaauccuaccaacuugccaauaucagcuccccgucacucgugguggaguguggcgggcagacugugcagaguugcguuauuagaaaccugagaaaaaauccuaacuucgacauauguacucuauucauggaggugaugcuaccgagggaggagcuuuacugucccccaaucacgguaaaggugaucgauaaucggcaguucggacggcggcccgugguggggcaguguaccauaaggagucuggagucauuccugugugauccguacucggccgaaucuccaaguccccagggaggcccggaugaugucucgcugcugagcccuggagaggacguccuuaucgacaucgaugacaaggaaccucucauucccauccaggaggaagaguucauugacugguggucuaaauucuuugcaucuauaggagagcgagagaaguguggcucuuaccuggaaaaagacuuugacacauugaaggucuacgacacgcagcuggagaauguagaggcuuuugagggucugucagacuucugcaauacauucaagcucuaucgcggcaagacacaagaggagacugaagauccauccgugaucggugaguucaagggccucuucaagaucuauccucucccugaggauccugccauuccuaugcccccuaggcaguuccaccaacuggcggcgcaagggccccaagaaugucugguuaggauuuauauugucagagcguucgguuugcagccuaaagacccuaacgguaaaugcgauccguacaucaagauuucuauuggaaagaagaguguaagugaccaggacaauuauauucccuguacccuggagccgguguuuggcaaaauguucgaacugacauguacacugccucuugagaaagaccuuaaaauuacccuuuaugauuaugauuugcucaguaaggacgagaagauuggcgaaaccgucguggauuuagaaaaccgacugcuuucuaaauucggggcccgaugcggccucccucagacguacugcgucuccggcccaaaucaguggcgcgaccagcucagacccucacaauuacugcacuuguuuugccagcagcauagagucaaagcccccguauauaggacggaucgaguuauguuccaggacaaggaguacagcauugaggagauugaggcuggcaggauucccaacccucaccugggccccgucgaagaaagacuugcacugcauguucugcaacagcagggucuggugcccgaacacguggagucacggccccuguauagcccucuccagcccgauauugagcaaggaaaauuacagauguggguggaccuauuucccaaagcacuaggucggccugguccuccuuucaacaucacaccccgacgagcaagacgcuucuuuuugcgauguauaauuuggaacacucgugacguuauccucgacgaccugagucugaccggagagaaaaugagcgauaucuacgugaagggcuggaugauuggauuugaggagcauaagcagaaaaccgauguccauuaccgauccuugggaggugagggcaauuucaacuggcgauuuauuuuccccuuugacuaccugccagcugaacagguauguacgaucgccaaaaaggacgcauucuggcggcucgauaagacugagagcaaaauaccagcacgcgugguguuucagaucugggauaaugacaaguuuagcuucgacgauuuucugggcucccugcagcuggaucugaaucguaugccaaaaccggcaaagaccgccaagaaaugcucgcuugaccaguuggacgaugccuuccacccagaaugguucguaagccuguucgagcagaaaacugugaaaggcugguggccuugcguggcagaagagggagaaaaaaagauacucgccgguaaacuggagaugacccuggagauuguggcagagagcgaacacgaagagcgacccgccggacaaggccgcgaugaacccaacaugaauccaaagcucgaagauccacgacguccagacacuuccuuccucugguucacgucucccuauaagacuaugaaguucauacucuggaggagauuuaggugggcuaucauucuguuuauuaucuuauucauuuugcugcuguuuuuggccauuuucaucuacgccuucccaaacuacgccgcuaugaagcuuguuaaaccuuucagcuag

SEQ ID NO: 49015 - RNA, 6339 nt, Artificial Sequence
  derived and/or modified sequence
augcucuguugccucuuaguccgugcuagcaaucugccaagugcgaagaaagacaggcguucagacccaguggcaagccucacguuccggggggucaaaaaaagaacaaaggucauaaaaaauucagucaacccugucuggaaugaaggguuugagugggaucugaagggaauaccguuagaccagggaagugagcuccacgugguuguuaaggaccaugagacgauggguagaaaccgauuucuaggcgaggccaagguaccacugcgggaagugcuggcaacuccaucacuaagcgcuucuuucaaugcccccuugcucgauaccaaaaagcagccuaccggggcaagucuuguccuccaaguguccuacaccccacugccaggugcgguaccccucuucccccccccgacaccacucgaaccuucgccuacccucccugaccuugacgucgucgcuggcggcggucagagucgcgccgagacuuggucccugcuuucagauucaacuauggauacacgcuauucaggcaaaaaauggccugccccuaccgacaccggcggagaagaggacaccgaagaccaagguuuaacgggcgaugaagcugagccauuccuugaccaguccggugggcccggugcacccaccacuccuagaaaacuucccagccggcccccuccccacuacccaggcaucaaacgaaaaagauccgcucccacguccagaaagcucuuguccgauaaaccccaggacuuccaaauuagaguucaggucauugaaggucggcagcuucccggcgugaauauuaagcccguggucaaagucaccgccgcugggcaaacuaagcgaacccgaauccacaagggcaauucuccauuguucaaugaaacucuuuuuuuuaaccuguucgauucucccggcgagcucuucgaugagcccauauucauuacuguugucgacucucgaaguuugagaacugaugcguuauugggagaguuccguauggacgugggcaccauuuauagagaaccccgccaugccuaccucagaaagugguugcuauuaucagauccugacgauuucucugccggggcccguggcuacuuaaagacuucccucuguguucucgggccaggagaugaagccccacuugaacgcaaggauccuuccgaagacaaagaagauaucgaaaguaauuugcuaaggccaacgggugucgcccucagaggagcccauuuuugucuuaagguauuucgggccgaggaccuuccccaaauggacgacgccgugauggauaaugugaaacagaucuuuggguucgagagcaacaagaaaaaccugguggacccauucguugagguuucuuuugccggaaagaugcucuguagcaagauacuggagaaaacagccaauccccaauggaaccagaacauuacccugccagcaauguuuccgucuaugugugagaaaaugaggauaaggauaaucgacugggacagacugacacacaaugauaucguggcuaccaccuaccugucuaugagcaagaucagcgccccuggaggggaaaucgaagaagagccagcuggagccguuaagccuucaaaggccucugaccuugaugauuaccucggauuucuaccuacauuuggaccaugcuacaucaaccucuacggauccccgcgcgaguuuacaggcuuuccggauccuuacacagaguuaaauacggguaagggcgagggaguugccuaccgggggcgucucuuacuuucucuggaaacaaaacuaguugagcauagcgagcaaaaaguggaggaucuucccgccgacgauauccuccgggucgaaaaauaccuucgcagacgaaaauacagccuuuucgcugccuuuuauuccgcuacaaugcugcaagauguagacgacgcuauccaguuugaaguaucuauaggcaauuacggcaauaaauuugacaugacaugccugccucucgcguccacaacgcaguauagccgcgcggucuucgacggcugucauuauuacuaucuuccaugggguaacguuaagccugucguggugcucuccagcuauugggaggacauuucacaccggauugagacccagaaccagcugcucggaaucgcggacagauuagaggcuggccucgagcaggugcaccucgcgcuuaaggcucaguguagcaccgaagacguggacucccuggucgcacaacucacagaugagcugaucgccggauguagccagcccuuaggagauauacaugaaacgccgucagcuacacaccucgaccaguaccuauaucagcuaagaacacaccauuugucucagaucaccgaagccgcucucgcacuaaagcucggucacagcgaacucccagccgcccuggaacaggccgaggacugguuguugcgacucagggcucucgcugaagaaccacagaacucacuacccgacaucgugaucuggaugcuucaaggagacaagcguguagcuuaccagcgcgugccugcucaucaagugcuguucagccggcgcggugcuaacuauuguggcaaaaacugugggaaacuccagaccauauuucucaaguacccaauggagaaggugccuggugcccguaugcccgugcagaucagaguuaaauuaugguucgguuugagcguagaugaaaaggaauuuaaucaauuugccgagggaaaauuaagcguguucgcagaaacuuacgaaaacgagacaaaguuagcccucgugggcaauugggggacgaccggacugacauaccccaaauucagcgacgucaccgggaaaauuaagcucccuaaggacagcuucagaccaagcgccgguuggaccugggccggagauugguucguauguccagaaaagacacuacugcaugacauggaugccggccacuuaucauucguggaggaggucuucgaaaaccagaccaggcugccaggcgggcaauggauauacaugagugacaacuacaccgacgucaauggagaaaagguccugccaaaggaugauaucgaauguccucuggguuggaagugggaggaugaggaauggaguacugaccucaauagagccguagacgaacaagguugggaauacagcauuaccauccccccugaacggaagccaaaacacuggguaccagcagaaaagauguauuauacucaucgcagacgaagauggguccgguuaaggagaagagaccugucccagauggaagcacuaaagagacaucgccaagcugaggccgaaggugaaggaugggaguaugcuagucuguuugguuggaaauuucaucuugaauacaggaaaaccgaugcauucagacgccggcgauggagaagaagaauggagccgcuggagaagacagggccagcugcuguguuugcauuggagggcgcgcugggaggugugauggacgauaagagugaggauaguauguccgugucuacccugucauuuggagucaacaggccuacaauuucauguauuuuugauuaugguaaucgguaccaccucagaugcuauauguaucaggcuagggaccuggccgcuauggauaaagauucuuuuuccgacccuuacgccauagugucuuuccuccaucagagccagaaaacaguaguuguuaaaaauacacucaaucccaccugggaccaaacccugauuuucuaugagaucgaaauauucggcgagccugcuaccguugcugaacaaccaccaagcauaguagucgaguuguaugaucacgacacauacggugccgaugaauucaugggacggugcauuugccagccuagucuggaaaggaugccaaggcuagcgugguucccccucacaagaggaagccaaccuucaggagagcuuuuggcuucuuucgagcugauccaaagagagaaaccagccauccaccacauccccggauucgaaguccaggaaaccaguaggauucucgacgagagugaagacacagauuuaccguauccaccaccacagagggaagcgaauaucuacauggugccgcagaauauuaagcccgcguugcagagaacugccauagaaaucuuagcuuggggacugaggaauaugaagucguaccaguuagccaauauaucuagucccucccucguggucgagugugggggccaaacuguccaguccugugugauccgaaaccuacguaagaacccaaacuuugauaucugcacuuuguucauggaggugaugcugccacgagaagaacuguauugccccccuauaaccguaaaagugaucgauaacaggcaguucggacgucgcccaguggugggucaguguacgaucaggucacuugagagcuuccugugcgaccccuauucagccgagagcccaucuccacaagguggccccgacgacgugucucuucugucccccggagaggacguccuuauugacauagaugacaaggagccuuuaauccccauccaagaagaagaauuuauagacugguggagcaaguucuucgccaguaucggagaacgggaaaaaugugggucauaccuugaaaaagacuuugacacacugaaaguguacgacacucaguuggaaaacguggaagcuuuugaaggccucucagauuucugcaacaccuuuaaguuauaccggggaaagacacaggaagaaacagaagaucccagcguaauuggcgaauuuaaaggccuguucaaaauauacccccuccccgaggaccccgccauccccaugccaccgagacaguuucaucaacuggcggcgcaagggccccaagaaugucugguuaggauuuauauugucagagcguucgguuugcagccuaaagacccuaacgguaaaugcgauccguacaucaagauuucuauuggaaagaagaguguaagugaccaggacaauuauauucccuguacccuggagccgguguuuggcaaaauguucgaacugacauguacacugccucuugagaaagaccuuaaaauuacccuuuaugauuaugauuugcucaguaaggacgagaagauuggcgaaaccgucguggauuuagaaaaccgccuucugucuaaauuuggcgcucgcuguggacugccucagacuuacuguguguccgggccaaaucaguggcgggaccagcuuagacccucccagcuccuccaccucuuuugucagcagcacagggucaaggccccaguguacagaaccgaccgcgugauguuccaggauaaagaauacaguaucgaagaaaucgaagccgggcguauacccaauccacaccucgggccuguugaggaacggcuggcgcugcacgucuugcaacaacagggacuaguucccgaacaugucgaaagccguccucuguauucaccucuacagccggacauugagcagggaaaacugcagaugugggucgaccuuuuccccaaggcucucggacgccccgggccuccuuucaacaucacacccaggagggcaaggcgcuucuucuuacgcugcaucauuuggaauacacgagaugugauccuggacgaucuaucgcugacgggugaaaaaaugagugauauauacguaaaaggauggaugauaggauuugaggaacauaagcagaaaaccgacgugcauuaccguucucuuggcggggaaggaaacuucaacuggagauucauauuccccuucgauuaucuuccagcagaacagguuuguacuaucgccaaaaaggaugcauucuggagacucgauaaaacagaaagcaagauccccgccagagucguguuccagaucugggauaacgauaaguucucuuuugaugacuucuuagguucguugcaacucgaucucaauagaaugccaaaaccggcaaaaacugccaagaaguguaguuuggaccaguuagaugaugcuuuccaucccgaaugguuugucagucuuuucgagcagaaaacuguaaaggguugguggccauguguggccgaagagggggagaaaaaaauuuuagccggcaagcuggaaaugacacuggaaaucguggccgaguccgagcacgaagaaagacccgcugggcaaggccgagacgagcccaauaugaauccuaaacuggaagacccucggcggccugacaccuccuucuugugguuuacaucuccauauaagaccaugaaguucauucuguggcgacguuuucgaugggcaaucauacuuuucaucauacuguucauucuucuccuguuucucgcaaucuucauuuacgcuuuucccaauuacgcagccaugaaguuaguuaaaccauucucauag

SEQ ID NO: 49016 - protein, 2102 aa, Artificial Sequence
  derived and/or modified sequence
MLCCLLVRASNLPSAKKDRRSDPVASLTFRGVKKRTKVIKNSVNPVWNEGFEWDLKGIPLDQGSELHVVVKDHETMGRNRFLGEAKVPLREVLATPSLSASFNAPLLDTKKQPTGASLVLQVSYTPLPGAVPLFPPPTPLEPSPTLPDLDVVADTGGEEDTEDQGLTGDEAEPFLDQSGGPGAPTTPRKLPSRPPPHYPGIKRKRSAPTSRKLLSDKPQDFQIRVQVIEGRQLPGVNIKPVVKVTAAGQTKRTRIHKGNSPLFNETLFFNLFDSPGELFDEPIFITVVDSRSLRTDALLGEFRMDVGTIYREPRHAYLRKWLLLSDPDDFSAGARGYLKTSLCVLGPGDEAPLERKDPSEDKEDIESNLLRPTGVALRGAHFCLKVFRAEDLPQMDDAVMDNVKQIFGFESNKKNLVDPFVEVSFAGKMLCSKILEKTANPQWNQNITLPAMFPSMCEKMRIRIIDWDRLTHNDIVATTYLSMSKISAPGGEIEEEPAGAVKPSKASDLDDYLGFLPTFGPCYINLYGSPREFTGFPDPYTELNTGKGEGVAYRGRLLLSLETKLVEHSEQKVEDLPADDILRVEKYLRRRKYSLFAAFYSATMLQDVDDAIQFEVSIGNYGNKFDMTCLPLASTTQYSRAVFDGCHYYYLPWGNVKPVVVLSSYWEDISHRIETQNQLLGIADRLEAGLEQVHLALKAQCSTEDVDSLVAQLTDELIAGCSQPLGDIHETPSATHLDQYLYQLRTHHLSQITEAALALKLGHSELPAALEQAEDWLLRLRALAEEPQNSLPDIVIWMLQGDKRVAYQRVPAHQVLFSRRGANYCGKNCGKLQTIFLKYPMEKVPGARMPVQIRVKLWFGLSVDEKEFNQFAEGKLSVFAETYENETKLALVGNWGTTGLTYPKFSDVTGKIKLPKDSFRPSAGWTWAGDWFVCPEKTLLHDMDAGHLSFVEEVFENQTRLPGGQWIYMSDNYTDVNGEKVLPKDDIECPLGWKWEDEEWSTDLNRAVDEQGWEYSITIPPERKPKHWVPAEKMYYTHRRRRWVRLRRRDLSQMEALKRHRQAEAEGEGWEYASLFGWKFHLEYRKTDAFRRRRWRRRMEPLEKTGPAAVFALEGALGGVMDDKSEDSMSVSTLSFGVNRPTISCIFDYGNRYHLRCYMYQARDLAAMDKDSFSDPYAIVSFLHQSQKTVVVKNTLNPTWDQTLIFYEIEIFGEPATVAEQPPSIVVELYDHDTYGADEFMGRCICQPSLERMPRLAWFPLTRGSQPSGELLASFELIQREKPAIHHIPGFEVQETSRILDESEDTDLPYPPPQREANIYMVPQNIKPALQRTAIEILAWGLRNMKSYQLANISSPSLVVECGGQTVQSCVIRNLRKNPNFDICTLFMEVMLPREELYCPPITVKVIDNRQFGRRPVVGQCTIRSLESFLCDPYSAESPSPQGGPDDVSLLSPGEDVLIDIDDKEPLIPIQLADGLSSLAPTNTASPPSSPHEEEFIDWWSKFFASIGEREKCGSYLEKDFDTLKVYDTQLENVEAFEGLSDFCNTFKLYRGKTQEETEDPSVIGEFKGLFKIYPLPEDPAIPMPPRQFHQLAAQGPQECLVRIYIVRAFGLQPKDPNGKCDPYIKISIGKKSVSDQDNYIPCTLEPVFGKMFELTCTLPLEKDLKITLYDYDLLSKDEKIGETVVDLENRLLSKFGARCGLPQTYCVSGPNQWRDQLRPSQLLHLFCQQHRVKAPVYRTDRVMFQDKEYSIEEIEAGRIPNPHLGPVEERLALHVLQQQGLVPEHVESRPLYSPLQPDIEQGKLQMWVDLFPKALGRPGPPFNITPRRARRFFLRCIIWNTRDVILDDLSLTGEKMSDIYVKGWMIGFEEHKQKTDVHYRSLGGEGNFNWRFIFPFDYLPAEQVCTIAKKDAFWRLDKTESKIPARVVFQIWDNDKFSFDDFLGSLQLDLNRMPKPAKTAKKCSLDQLDDAFHPEWFVSLFEQKTVKGWWPCVAEEGEKKILAGKLEMTLEIVAESEHEERPAGQGRDEPNMNPKLEDPRRPDTSFLWFTSPYKTMKFILWRRFRWAIILFIILFILLLFLAIFIYAFPNYAAMKLVKPFS

SEQ ID NO: 49017 - DNA, 6721 bp, Artificial Sequence
  derived and/or modified sequence
tctccgcggaggagcagcgaaggcgacagctctcttggcgcggctgcctgggagccgggcgcttgctgggtgggtgctcgggcccggtgctcccgctcccgccctgactgcgcgcctgtgtgccgccggggctgcccagccatgctgtgctgcctgctggtgagggccagcaacctccccagtgcgaagaaggaccggcgcagcgaccctgtcgcaagcctgactttccgaggggtgaagaagagaaccaaagtcatcaagaacagcgtgaaccctgtatggaatgagggatttgaatgggacctcaagggcatccccctggaccagggctctgagcttcatgtggtggtcaaagaccatgagacgatggggaggaacaggttcctgggggaagccaaggtcccactccgagaggtcctcgccacccctagtctgtccgccagcttcaatgcccccctgctggacaccaagaagcagcccacaggggcctcgctggtcctgcaggtgtcctacacaccgctgcctggagctgtgcccctgttcccgccccctactcctctggagccctccccgactctgcctgacctggatgtagtggcagacacaggaggagaggaagacacagaggaccagggactcactggagatgaggcggagccattcctggatcaaagcggaggcccgggggctcccaccaccccaaggaaactaccttcacgtcctccgccccactaccccgggatcaaaagaaagcgaagtgcgcctacatctagaaagctgctgtcagacaaaccgcaggatttccagatcagggtccaggtgatcgaggggcgccagctgccgggggtgaacatcaagcctgtggtcaaggttaccgctgcagggcagaccaagcggacgcggatccacaagggaaacagcccactcttcaatgagactcttttcttcaacttgtttgactctcctggggagctgtttgatgagcccatctttatcacggtggtagactctcgttctctcaggacagatgctctcctcggggagttccggatggacgtgggcaccatttacagagagccccggcacgcctatctcaggaagtggctgctgctctcagaccctgatgacttctctgctggggccagaggctacctgaaaacaagcctttgtgtgctggggcctggggacgaagcgcctctggagagaaaagacccctctgaagacaaggaggacattgaaagcaacctgctccggcccacaggcgtagccctgcgaggagcccacttctgcctgaaggtcttccgggccgaggacttgccgcagatggacgatgccgtgatggacaacgtgaaacagatctttggcttcgagagtaacaagaagaacttggtggacccctttgtggaggtcagctttgcggggaaaatgctgtgcagcaagatcttggagaagacggccaaccctcagtggaaccagaacatcacactgcctgccatgtttccctccatgtgcgaaaaaatgaggattcgtatcatagactgggaccgcctgactcacaatgacatcgtggctaccacctacctgagtatgtcgaaaatctctgcccctggaggagaaatagaagaggagcctgcaggtgctgtcaagccttcgaaagcctcagacttggatgactacctgggcttcctccccacttttgggccctgctacatcaacctctatggcagtcccagagagttcacaggcttcccagacccctacacagagctcaacacaggcaagggggaaggtgtggcttatcgtggccggcttctgctctccctggagaccaagctggtggagcacagtgaacagaaggtggaggaccttcctgcggatgacatcctccgggtggagaagtaccttaggaggcgcaagtactccctgtttgcggccttctactcagccaccatgctgcaggatgtggatgatgccatccagtttgaggtcagcatcgggaactacgggaacaagttcgacatgacctgcctgccgctggcctccaccactcagtacagccgtgcagtctttgacgggtgccactactactacctaccctggggtaacgtgaaacctgtggtggtgctgtcatcctactgggaggacatcagccatagaatcgagactcagaaccagctgcttgggattgctgaccggctggaagctggcctggagcaggtccacctggccctgaaggcgcagtgctccacggaggacgtggactcgctggtggctcagctgacggatgagctcatcgcaggctgcagccagcctctgggtgacatccatgagacaccctctgccacccacctggaccagtacctgtaccagctgcgcacccatcacctgagccaaatcactgaggctgccctggccctgaagctcggccacagtgagctccctgcagctctggagcaggcggaggactggctcctgcgtctgcgtgccctggcagaggagccccagaacagcctgccggacatcgtcatctggatgctgcagggagacaagcgtgtggcataccagcgggtgcccgcccaccaagtcctcttctcccggcggggtgccaactactgtggcaagaattgtgggaagctacagacaatctttctgaaatatccgatggagaaggtgcctggcgcccggatgccagtgcagatacgggtcaagctgtggtttgggctctcagtggatgagaaggagttcaaccagtttgctgaggggaagctgtctgtctttgctgaaacctatgagaacgagactaagttggcccttgttgggaactggggcacaacgggcctcacctaccccaagttttctgacgtcacgggcaagatcaagctacccaaggacagcttccgcccctcggccggctggacctgggctggagattggttcgtgtgtccggagaagactctgctccatgacatggacgccggtcacctgagcttcgtggaagaggtgtttgagaaccagacccggcttcccggaggccagtggatctacatgagtgacaactacaccgatgtgaacggggagaaggtgcttcccaaggatgacattgagtgcccactgggctggaagtgggaagatgaggaatggtccacagacctcaaccgggctgtcgatgagcaaggctgggagtatagcatcaccatccccccggagcggaagccgaagcactgggtccctgctgagaagatgtactacacacaccgacggcggcgctgggtgcgcctgcgcaggagggatctcagccaaatggaagcactgaaaaggcacaggcaggcggaggcggagggcgagggctgggagtacgcctctctttttggctggaagttccacctcgagtaccgcaagacagatgccttccgccgccgccgctggcgccgtcgcatggagccactggagaagacggggcctgcagctgtgtttgcccttgagggggccctgggcggcgtgatggatgacaagagtgaagattccatgtccgtctccaccttgagcttcggtgtgaacagacccacgatttcctgcatattcgactatgggaaccgctaccatctacgctgctacatgtaccaggcccgggacctggctgcgatggacaaggactctttttctgatccctatgccatcgtctccttcctgcaccagagccagaagacggtggtggtgaagaacacccttaaccccacctgggaccagacgctcatcttctacgagatcgagatctttggcgagccggccacagttgctgagcaaccgcccagcattgtggtggagctgtacgaccatgacacttatggtgcagacgagtttatgggtcgctgcatctgtcaaccgagtctggaacggatgccacggctggcctggttcccactgacgaggggcagccagccgtcgggggagctgctggcctcttttgagctcatccagagagagaagccggccatccaccatattcctggttttgaggtgcaggagacatcaaggatcctggatgagtctgaggacacagacctgccctacccaccaccccagagggaggccaacatctacatggttcctcagaacatcaagccagcgctccagcgtaccgccatcgagatcctggcatggggcctgcggaacatgaagagttaccagctggccaacatctcctcccccagcctcgtggtagagtgtgggggccagacggtgcagtcctgtgtcatcaggaacctccggaagaaccccaactttgacatctgcaccctcttcatggaagtgatgctgcccagggaggagctctactgcccccccatcaccgtcaaggtcatcgataaccgccagtttggccgccggcctgtggtgggccagtgtaccatccgctccctggagagcttcctgtgtgacccctactcggcggagagtccatccccacagggtggcccagacgatgtgagcctactcagtcctggggaagacgtgctcatcgacattgatgacaaggagcccctcatccccatccagcttgcagacggtctgtcgagcttggcccccactaacacggcttctcctccatccagtcctcatgaggaagagttcatcgattggtggagcaaattctttgcctccataggggagagggaaaagtgcggctcctacctggagaaggattttgacaccctgaaggtctatgacacacagctggagaatgtggaggcctttgagggcctgtctgacttttgtaacaccttcaagctgtaccggggcaagacgcaggaggagacagaagatccatctgtgattggtgaatttaagggcctcttcaaaatttatcccctcccagaagacccagccatccccatgcccccaagacagttccaccagctggccgcccagggaccccaggagtgcttggtccgtatctacattgtccgagcatttggcctgcagcccaaggaccccaatggaaagtgtgatccttacatcaagatctccatagggaagaaatcagtgagtgaccaggataactacatcccctgcacgctggagcccgtatttggaaagatgttcgagctgacctgcactctgcctctggagaaggacctaaagatcactctctatgactatgacctcctctccaaggacgaaaagatcggtgagacggtcgtcgacctggagaacaggctgctgtccaagtttggggctcgctgtggactcccacagacctactgtgtctctggaccgaaccagtggcgggaccagctccgcccctcccagctcctccacctcttctgccagcagcatagagtcaaggcacctgtgtaccggacagaccgtgtaatgtttcaggataaagaatattccattgaagagatagaggctggcaggatcccaaacccacacctgggcccagtggaggagcgtctggctctgcatgtgcttcagcagcagggcctggtcccggagcacgtggagtcacggcccctctacagccccctgcagccagacatcgagcaggggaagctgcagatgtgggtcgacctatttccgaaggccctggggcggcctggacctcccttcaacatcaccccacggagagccagaaggtttttcctgcgttgtattatctggaataccagagatgtgatcctggatgacctgagcctcacgggggagaagatgagcgacatttatgtgaaaggttggatgattggctttgaagaacacaagcaaaagacagacgtgcattatcgttccctgggaggtgaaggcaacttcaactggaggttcattttccccttcgactacctgccagctgagcaagtctgtaccattgccaagaaggatgccttctggaggctggacaagactgagagcaaaatcccagcacgagtggtgttccagatctgggacaatgacaagttctcctttgatgattttctgggctccctgcagctcgatctcaaccgcatgcccaagccagccaagacagccaagaagtgctccttggaccagctggatgatgctttccacccagaatggtttgtgtccctttttgagcagaaaacagtgaagggctggtggccctgtgtagcagaagagggtgagaagaaaatactggcgggcaagctggaaatgaccttggagattgtagcagagagtgagcatgaggagcggcctgctggccagggccgggatgagcccaacatgaaccctaagcttgaggacccaaggcgccccgacacctccttcctgtggtttacctccccatacaagaccatgaagttcatcctgtggcggcgtttccggtgggccatcatcctcttcatcatcctcttcatcctgctgctgttcctggccatcttcatctacgccttcccgaactatgctgccatgaagctggtgaagcccttcagctgaggactctcctgccctgtagaaggggccgtggggtcccctccagcatgggactggcctgcctcctccgcccagctcggcgagctcctccagacctcctaggcctgattgtcctgccagggtgggcagacagacagatggaccggcccacactcccagagttgctaacatggagctctgagatcaccccacttccatcatttccttctcccccaacccaacgcttttttggatcagctcagacatatttcagtataaaacagttggaaccaca

SEQ ID NO: 49018 - DNA, 6306 bp, Artificial Sequence
  derived and/or modified sequence
atgctgtgctgcctgctggtgcgcgccagcaacctgcccagcgccaagaaggaccgccgcagcgaccccgtggccagcctgaccttccgcggcgtgaagaagcgcaccaaggtgatcaagaacagcgtgaaccccgtgtggaacgagggcttcgagtgggacctgaagggcatccccctggaccagggcagcgagctgcacgtggtggtgaaggaccacgagaccatgggccgcaaccgcttcctgggcgaggccaaggtgcccctgcgcgaggtgctggccacccccagcctgagcgccagcttcaacgcccccctgctggacaccaagaagcagcccaccggcgccagcctggtgctgcaggtgagctacacccccctgcccggcgccgtgcccctgttccccccccccacccccctggagcccagccccaccctgcccgacctggacgtggtggccgacaccggcggcgaggaggacaccgaggaccagggcctgaccggcgacgaggccgagcccttcctggaccagagcggcggccccggcgcccccaccaccccccgcaagctgcccagccgcccccccccccactaccccggcatcaagcgcaagcgcagcgcccccaccagccgcaagctgctgagcgacaagccccaggacttccagatccgcgtgcaggtgatcgagggccgccagctgcccggcgtgaacatcaagcccgtggtgaaggtgaccgccgccggccagaccaagcgcacccgcatccacaagggcaacagccccctgttcaacgagaccctgttcttcaacctgttcgacagccccggcgagctgttcgacgagcccatcttcatcaccgtggtggacagccgcagcctgcgcaccgacgccctgctgggcgagttccgcatggacgtgggcaccatctaccgcgagccccgccacgcctacctgcgcaagtggctgctgctgagcgaccccgacgacttcagcgccggcgcccgcggctacctgaagaccagcctgtgcgtgctgggccccggcgacgaggcccccctggagcgcaaggaccccagcgaggacaaggaggacatcgagagcaacctgctgcgccccaccggcgtggccctgcgcggcgcccacttctgcctgaaggtgttccgcgccgaggacctgccccagatggacgacgccgtgatggacaacgtgaagcagatcttcggcttcgagagcaacaagaagaacctggtggaccccttcgtggaggtgagcttcgccggcaagatgctgtgcagcaagatcctggagaagaccgccaacccccagtggaaccagaacatcaccctgcccgccatgttccccagcatgtgcgagaagatgcgcatccgcatcatcgactgggaccgcctgacccacaacgacatcgtggccaccacctacctgagcatgagcaagatcagcgcccccggcggcgagatcgaggaggagcccgccggcgccgtgaagcccagcaaggccagcgacctggacgactacctgggcttcctgcccaccttcggcccctgctacatcaacctgtacggcagcccccgcgagttcaccggcttccccgacccctacaccgagctgaacaccggcaagggcgagggcgtggcctaccgcggccgcctgctgctgagcctggagaccaagctggtggagcacagcgagcagaaggtggaggacctgcccgccgacgacatcctgcgcgtggagaagtacctgcgccgccgcaagtacagcctgttcgccgccttctacagcgccaccatgctgcaggacgtggacgacgccatccagttcgaggtgagcatcggcaactacggcaacaagttcgacatgacctgcctgcccctggccagcaccacccagtacagccgcgccgtgttcgacggctgccactactactacctgccctggggcaacgtgaagcccgtggtggtgctgagcagctactgggaggacatcagccaccgcatcgagacccagaaccagctgctgggcatcgccgaccgcctggaggccggcctggagcaggtgcacctggccctgaaggcccagtgcagcaccgaggacgtggacagcctggtggcccagctgaccgacgagctgatcgccggctgcagccagcccctgggcgacatccacgagacccccagcgccacccacctggaccagtacctgtaccagctgcgcacccaccacctgagccagatcaccgaggccgccctggccctgaagctgggccacagcgagctgcccgccgccctggagcaggccgaggactggctgctgcgcctgcgcgccctggccgaggagccccagaacagcctgcccgacatcgtgatctggatgctgcagggcgacaagcgcgtggcctaccagcgcgtgcccgcccaccaggtgctgttcagccgccgcggcgccaactactgcggcaagaactgcggcaagctgcagaccatcttcctgaagtaccccatggagaaggtgcccggcgcccgcatgcccgtgcagatccgcgtgaagctgtggttcggcctgagcgtggacgagaaggagttcaaccagttcgccgagggcaagctgagcgtgttcgccgagacctacgagaacgagaccaagctggccctggtgggcaactggggcaccaccggcctgacctaccccaagttcagcgacgtgaccggcaagatcaagctgcccaaggacagcttccgccccagcgccggctggacctgggccggcgactggttcgtgtgccccgagaagaccctgctgcacgacatggacgccggccacctgagcttcgtggaggaggtgttcgagaaccagacccgcctgcccggcggccagtggatctacatgagcgacaactacaccgacgtgaacggcgagaaggtgctgcccaaggacgacatcgagtgccccctgggctggaagtgggaggacgaggagtggagcaccgacctgaaccgcgccgtggacgagcagggctgggagtacagcatcaccatcccccccgagcgcaagcccaagcactgggtgcccgccgagaagatgtactacacccaccgccgccgccgctgggtgcgcctgcgccgccgcgacctgagccagatggaggccctgaagcgccaccgccaggccgaggccgagggcgagggctgggagtacgccagcctgttcggctggaagttccacctggagtaccgcaagaccgacgccttccgccgccgccgctggcgccgccgcatggagcccctggagaagaccggccccgccgccgtgttcgccctggagggcgccctgggcggcgtgatggacgacaagagcgaggacagcatgagcgtgagcaccctgagcttcggcgtgaaccgccccaccatcagctgcatcttcgactacggcaaccgctaccacctgcgctgctacatgtaccaggcccgcgacctggccgccatggacaaggacagcttcagcgacccctacgccatcgtgagcttcctgcaccagagccagaagaccgtggtggtgaagaacaccctgaaccccacctgggaccagaccctgatcttctacgagatcgagatcttcggcgagcccgccaccgtggccgagcagccccccagcatcgtggtggagctgtacgaccacgacacctacggcgccgacgagttcatgggccgctgcatctgccagcccagcctggagcgcatgccccgcctggcctggttccccctgacccgcggcagccagcccagcggcgagctgctggccagcttcgagctgatccagcgcgagaagcccgccatccaccacatccccggcttcgaggtgcaggagaccagccgcatcctggacgagagcgaggacaccgacctgccctacccccccccccagcgcgaggccaacatctacatggtgccccagaacatcaagcccgccctgcagcgcaccgccatcgagatcctggcctggggcctgcgcaacatgaagagctaccagctggccaacatcagcagccccagcctggtggtggagtgcggcggccagaccgtgcagagctgcgtgatccgcaacctgcgcaagaaccccaacttcgacatctgcaccctgttcatggaggtgatgctgccccgcgaggagctgtactgcccccccatcaccgtgaaggtgatcgacaaccgccagttcggccgccgccccgtggtgggccagtgcaccatccgcagcctggagagcttcctgtgcgacccctacagcgccgagagccccagcccccagggcggccccgacgacgtgagcctgctgagccccggcgaggacgtgctgatcgacatcgacgacaaggagcccctgatccccatccagctggccgacggcctgagcagcctggcccccaccaacaccgccagcccccccagcagcccccacgaggaggagttcatcgactggtggagcaagttcttcgccagcatcggcgagcgcgagaagtgcggcagctacctggagaaggacttcgacaccctgaaggtgtacgacacccagctggagaacgtggaggccttcgagggcctgagcgacttctgcaacaccttcaagctgtaccgcggcaagacccaggaggagaccgaggaccccagcgtgatcggcgagttcaagggcctgttcaagatctaccccctgcccgaggaccccgccatccccatgcccccccgccagttccaccagctggccgcccagggcccccaggagtgcctggtgcgcatctacatcgtgcgcgccttcggcctgcagcccaaggaccccaacggcaagtgcgacccctacatcaagatcagcatcggcaagaagagcgtgagcgaccaggacaactacatcccctgcaccctggagcccgtgttcggcaagatgttcgagctgacctgcaccctgcccctggagaaggacctgaagatcaccctgtacgactacgacctgctgagcaaggacgagaagatcggcgagaccgtggtggacctggagaaccgcctgctgagcaagttcggcgcccgctgcggcctgccccagacctactgcgtgagcggccccaaccagtggcgcgaccagctgcgccccagccagctgctgcacctgttctgccagcagcaccgcgtgaaggcccccgtgtaccgcaccgaccgcgtgatgttccaggacaaggagtacagcatcgaggagatcgaggccggccgcatccccaacccccacctgggccccgtggaggagcgcctggccctgcacgtgctgcagcagcagggcctggtgcccgagcacgtggagagccgccccctgtacagccccctgcagcccgacatcgagcagggcaagctgcagatgtgggtggacctgttccccaaggccctgggccgccccggcccccccttcaacatcaccccccgccgcgcccgccgcttcttcctgcgctgcatcatctggaacacccgcgacgtgatcctggacgacctgagcctgaccggcgagaagatgagcgacatctacgtgaagggctggatgatcggcttcgaggagcacaagcagaagaccgacgtgcactaccgcagcctgggcggcgagggcaacttcaactggcgcttcatcttccccttcgactacctgcccgccgagcaggtgtgcaccatcgccaagaaggacgccttctggcgcctggacaagaccgagagcaagatccccgcccgcgtggtgttccagatctgggacaacgacaagttcagcttcgacgacttcctgggcagcctgcagctggacctgaaccgcatgcccaagcccgccaagaccgccaagaagtgcagcctggaccagctggacgacgccttccaccccgagtggttcgtgagcctgttcgagcagaagaccgtgaagggctggtggccctgcgtggccgaggagggcgagaagaagatcctggccggcaagctggagatgaccctggagatcgtggccgagagcgagcacgaggagcgccccgccggccagggccgcgacgagcccaacatgaaccccaagctggaggacccccgccgccccgacaccagcttcctgtggttcaccagcccctacaagaccatgaagttcatcctgtggcgccgcttccgctgggccatcatcctgttcatcatcctgttcatcctgctgctgttcctggccatcttcatctacgccttccccaactacgccgccatgaagctggtgaagcccttcagc

SEQ ID NO: 49019 - DNA, 6309 bp, Artificial Sequence
  derived and/or modified sequence
atgctgtgctgcctgctggtgagagccagcaacctgcccagcgccaagaaggacagaagaagcgaccccgtggccagcctgaccttcagaggcgtgaagaagagaaccaaggtgatcaagaacagcgtgaaccccgtgtggaacgagggcttcgagtgggacctgaagggcatccccctggaccagggcagcgagctgcacgtggtggtgaaggaccacgagaccatgggcagaaacagattcctgggcgaggccaaggtgcccctgagagaggtgctggccacccccagcctgagcgccagcttcaacgcccccctgctggacaccaagaagcagcccaccggcgccagcctggtgctgcaggtgagctacacccccctgcccggcgccgtgcccctgttccccccccccacccccctggagcccagccccaccctgcccgacctggacgtggtggccgacaccggcggcgaggaggacaccgaggaccagggcctgaccggcgacgaggccgagcccttcctggaccagagcggcggccccggcgcccccaccacccccagaaagctgcccagcagaccccccccccactaccccggcatcaagagaaagagaagcgcccccaccagcagaaagctgctgagcgacaagccccaggacttccagatcagagtgcaggtgatcgagggcagacagctgcccggcgtgaacatcaagcccgtggtgaaggtgaccgccgccggccagaccaagagaaccagaatccacaagggcaacagccccctgttcaacgagaccctgttcttcaacctgttcgacagccccggcgagctgttcgacgagcccatcttcatcaccgtggtggacagcagaagcctgagaaccgacgccctgctgggcgagttcagaatggacgtgggcaccatctacagagagcccagacacgcctacctgagaaagtggctgctgctgagcgaccccgacgacttcagcgccggcgccagaggctacctgaagaccagcctgtgcgtgctgggccccggcgacgaggcccccctggagagaaaggaccccagcgaggacaaggaggacatcgagagcaacctgctgagacccaccggcgtggccctgagaggcgcccacttctgcctgaaggtgttcagagccgaggacctgccccagatggacgacgccgtgatggacaacgtgaagcagatcttcggcttcgagagcaacaagaagaacctggtggaccccttcgtggaggtgagcttcgccggcaagatgctgtgcagcaagatcctggagaagaccgccaacccccagtggaaccagaacatcaccctgcccgccatgttccccagcatgtgcgagaagatgagaatcagaatcatcgactgggacagactgacccacaacgacatcgtggccaccacctacctgagcatgagcaagatcagcgcccccggcggcgagatcgaggaggagcccgccggcgccgtgaagcccagcaaggccagcgacctggacgactacctgggcttcctgcccaccttcggcccctgctacatcaacctgtacggcagccccagagagttcaccggcttccccgacccctacaccgagctgaacaccggcaagggcgagggcgtggcctacagaggcagactgctgctgagcctggagaccaagctggtggagcacagcgagcagaaggtggaggacctgcccgccgacgacatcctgagagtggagaagtacctgagaagaagaaagtacagcctgttcgccgccttctacagcgccaccatgctgcaggacgtggacgacgccatccagttcgaggtgagcatcggcaactacggcaacaagttcgacatgacctgcctgcccctggccagcaccacccagtacagcagagccgtgttcgacggctgccactactactacctgccctggggcaacgtgaagcccgtggtggtgctgagcagctactgggaggacatcagccacagaatcgagacccagaaccagctgctgggcatcgccgacagactggaggccggcctggagcaggtgcacctggccctgaaggcccagtgcagcaccgaggacgtggacagcctggtggcccagctgaccgacgagctgatcgccggctgcagccagcccctgggcgacatccacgagacccccagcgccacccacctggaccagtacctgtaccagctgagaacccaccacctgagccagatcaccgaggccgccctggccctgaagctgggccacagcgagctgcccgccgccctggagcaggccgaggactggctgctgagactgagagccctggccgaggagccccagaacagcctgcccgacatcgtgatctggatgctgcagggcgacaagagagtggcctaccagagagtgcccgcccaccaggtgctgttcagcagaagaggcgccaactactgcggcaagaactgcggcaagctgcagaccatcttcctgaagtaccccatggagaaggtgcccggcgccagaatgcccgtgcagatcagagtgaagctgtggttcggcctgagcgtggacgagaaggagttcaaccagttcgccgagggcaagctgagcgtgttcgccgagacctacgagaacgagaccaagctggccctggtgggcaactggggcaccaccggcctgacctaccccaagttcagcgacgtgaccggcaagatcaagctgcccaaggacagcttcagacccagcgccggctggacctgggccggcgactggttcgtgtgccccgagaagaccctgctgcacgacatggacgccggccacctgagcttcgtggaggaggtgttcgagaaccagaccagactgcccggcggccagtggatctacatgagcgacaactacaccgacgtgaacggcgagaaggtgctgcccaaggacgacatcgagtgccccctgggctggaagtgggaggacgaggagtggagcaccgacctgaacagagccgtggacgagcagggctgggagtacagcatcaccatcccccccgagagaaagcccaagcactgggtgcccgccgagaagatgtactacacccacagaagaagaagatgggtgagactgagaagaagagacctgagccagatggaggccctgaagagacacagacaggccgaggccgagggcgagggctgggagtacgccagcctgttcggctggaagttccacctggagtacagaaagaccgacgccttcagaagaagaagatggagaagaagaatggagcccctggagaagaccggccccgccgccgtgttcgccctggagggcgccctgggcggcgtgatggacgacaagagcgaggacagcatgagcgtgagcaccctgagcttcggcgtgaacagacccaccatcagctgcatcttcgactacggcaacagataccacctgagatgctacatgtaccaggccagagacctggccgccatggacaaggacagcttcagcgacccctacgccatcgtgagcttcctgcaccagagccagaagaccgtggtggtgaagaacaccctgaaccccacctgggaccagaccctgatcttctacgagatcgagatcttcggcgagcccgccaccgtggccgagcagccccccagcatcgtggtggagctgtacgaccacgacacctacggcgccgacgagttcatgggcagatgcatctgccagcccagcctggagagaatgcccagactggcctggttccccctgaccagaggcagccagcccagcggcgagctgctggccagcttcgagctgatccagagagagaagcccgccatccaccacatccccggcttcgaggtgcaggagaccagcagaatcctggacgagagcgaggacaccgacctgccctacccccccccccagagagaggccaacatctacatggtgccccagaacatcaagcccgccctgcagagaaccgccatcgagatcctggcctggggcctgagaaacatgaagagctaccagctggccaacatcagcagccccagcctggtggtggagtgcggcggccagaccgtgcagagctgcgtgatcagaaacctgagaaagaaccccaacttcgacatctgcaccctgttcatggaggtgatgctgcccagagaggagctgtactgcccccccatcaccgtgaaggtgatcgacaacagacagttcggcagaagacccgtggtgggccagtgcaccatcagaagcctggagagcttcctgtgcgacccctacagcgccgagagccccagcccccagggcggccccgacgacgtgagcctgctgagccccggcgaggacgtgctgatcgacatcgacgacaaggagcccctgatccccatccagctggccgacggcctgagcagcctggcccccaccaacaccgccagcccccccagcagcccccacgaggaggagttcatcgactggtggagcaagttcttcgccagcatcggcgagagagagaagtgcggcagctacctggagaaggacttcgacaccctgaaggtgtacgacacccagctggagaacgtggaggccttcgagggcctgagcgacttctgcaacaccttcaagctgtacagaggcaagacccaggaggagaccgaggaccccagcgtgatcggcgagttcaagggcctgttcaagatctaccccctgcccgaggaccccgccatccccatgccccccagacagttccaccagctggccgcccagggcccccaggagtgcctggtgagaatctacatcgtgagagccttcggcctgcagcccaaggaccccaacggcaagtgcgacccctacatcaagatcagcatcggcaagaagagcgtgagcgaccaggacaactacatcccctgcaccctggagcccgtgttcggcaagatgttcgagctgacctgcaccctgcccctggagaaggacctgaagatcaccctgtacgactacgacctgctgagcaaggacgagaagatcggcgagaccgtggtggacctggagaacagactgctgagcaagttcggcgccagatgcggcctgccccagacctactgcgtgagcggccccaaccagtggagagaccagctgagacccagccagctgctgcacctgttctgccagcagcacagagtgaaggcccccgtgtacagaaccgacagagtgatgttccaggacaaggagtacagcatcgaggagatcgaggccggcagaatccccaacccccacctgggccccgtggaggagagactggccctgcacgtgctgcagcagcagggcctggtgcccgagcacgtggagagcagacccctgtacagccccctgcagcccgacatcgagcagggcaagctgcagatgtgggtggacctgttccccaaggccctgggcagacccggcccccccttcaacatcacccccagaagagccagaagattcttcctgagatgcatcatctggaacaccagagacgtgatcctggacgacctgagcctgaccggcgagaagatgagcgacatctacgtgaagggctggatgatcggcttcgaggagcacaagcagaagaccgacgtgcactacagaagcctgggcggcgagggcaacttcaactggagattcatcttccccttcgactacctgcccgccgagcaggtgtgcaccatcgccaagaaggacgccttctggagactggacaagaccgagagcaagatccccgccagagtggtgttccagatctgggacaacgacaagttcagcttcgacgacttcctgggcagcctgcagctggacctgaacagaatgcccaagcccgccaagaccgccaagaagtgcagcctggaccagctggacgacgccttccaccccgagtggttcgtgagcctgttcgagcagaagaccgtgaagggctggtggccctgcgtggccgaggagggcgagaagaagatcctggccggcaagctggagatgaccctggagatcgtggccgagagcgagcacgaggagagacccgccggccagggcagagacgagcccaacatgaaccccaagctggaggaccccagaagacccgacaccagcttcctgtggttcaccagcccctacaagaccatgaagttcatcctgtggagaagattcagatgggccatcatcctgttcatcatcctgttcatcctgctgctgttcctggccatcttcatctacgccttccccaactacgccgccatgaagctggtgaagcccttcagctag

SEQ ID NO: 49020 - DNA, 6309 bp, Artificial Sequence
  derived and/or modified sequence
atgctgtgttgcctactagtgcgagcgagcaatctccccagtgctaaaaaggatcgacggtcagatccagtggcgtccctcacatttcgaggagtgaaaaaacgcacaaaggtcatcaaaaacagcgttaatccagtctggaatgaggggtttgaatgggacctgaaaggaatacctttggatcaggggtccgaactccacgtggtcgtgaaggaccacgaaactatggggcggaaccggtttcttggggaggcaaaagtaccactgcgtgaagtacttgctaccccgtcgctttccgcttccttcaacgctccattattggataccaagaagcagccaacaggggcttcccttgtgctccaagttagctacactcccctgccaggcgccgtgcccctttttccacctcccacccccctggaacccagccctactctccctgatttggatgtggtggcagatactggaggggaggaagatactgaagaccagggtctgaccggagatgaagctgagccatttctagaccagagcggcgggccaggtgcacccacaacaccaagaaagctcccgtcacgaccgcccccccactatccggggatcaagcggaaacggtcagctcccacatcacgcaagctgctctccgataaacctcaagattttcagatcagagtccaggttatcgaaggccgccaattgcctggagtcaacataaagcccgtcgtcaaggttaccgctgccggccaaactaaaagaacaagaatccataagggaaactccccactctttaatgaaactctgttctttaaccttttcgacagcccgggtgagttatttgatgagccaatcttcatcacagtggtggattcgcggtctctaagaaccgatgctctcctgggcgaattccgtatggatgtgggcactatctatagggagccccggcatgcctacctaagaaaatggctgcttctcagcgaccctgacgattttagcgcaggcgcccgcggctacctcaagaccagcctgtgcgtcctgggacccggggacgaagcacccctggaacgcaaggatccctcagaggataaggaggatattgagagcaacttacttcgtcctactggtgtagccctacgtggcgctcacttttgtctcaaagtgttccgcgctgaggacttacctcagatggatgacgcggtgatggataacgtcaagcaaatcttcggattcgagtcaaacaaaaaaaatctggttgacccatttgttgaggtgagtttcgctggcaaaatgctctgctctaaaatcctggagaaaaccgccaatccccagtggaatcagaatatcaccctgccggcaatgtttcccagtatgtgtgagaagatgcggattcgtattattgactgggatcggctaacccataacgatattgtcgccactacttatttgtctatgtcaaagatcagtgctcctgggggcgaaatcgaggaggaaccggccggagccgtcaagcctagcaaagcctcagacctcgatgactatctggggttccttcccacatttggaccgtgctacatcaatctttatggatctcccagggagttcaccggcttccctgatccgtatactgagctgaacaccggaaagggagaaggcgtggcttaccggggcagactcctgctctcattggaaacgaagctggtcgaacactcagaacagaaggtagaggacctccccgccgatgacatcttaagagtggaaaagtatctgaggagacgcaaatactcgctgtttgctgcattctactcagccactatgctccaggacgtcgacgacgccattcagttcgaagtgtcaattgggaactacgggaataaatttgacatgacctgcctgcccctggcttcaacgacgcagtactcacgagctgtttttgatgggtgccattattattatttaccgtggggaaacgtgaagcccgtagtcgtactgtcctcgtactgggaggatatctctcacagaatcgaaacacagaatcagttacttggcatcgccgaccggttagaggctggcctggagcaggtccatttagcgttaaaagcacagtgtagtactgaggacgtggactctcttgtcgcacagctgacagacgaattaatagcggggtgttctcagcctttaggcgatattcacgagacgccaagcgcaacccacttggaccaatatttgtatcagcttcggactcatcacctctcacagatcacagaggccgccctcgccctgaaactgggtcattcggagctacctgcagcacttgagcaagccgaggattggttgttgagattgcgtgcccttgcggaagagccacaaaactctctcccagacattgtgatatggatgctacagggggacaaacgtgtggcctatcagcgcgtgccagcacatcaggtgttattcagccgccgaggagctaattactgtgggaaaaactgcgggaaactccaaactatcttcctgaagtatcctatggaaaaagtgcccggcgcccgcatgcccgtccagattagagtcaagctctggttcggcctgtctgttgacgagaaagaattcaaccagtttgccgagggcaaactcagtgtattcgcagaaacatacgagaacgaaacaaagcttgccctggtcggaaattggggtactaccggcctgacctatcccaaattttctgacgtgacgggtaagattaagcttcccaaggattctttccggccgtcagccggatggacatgggcgggggattggtttgtgtgccccgagaaaaccttgttgcatgacatggacgcagggcatctgtcttttgtcgaagaggtgtttgaaaatcaaaccagattgccagggggacagtggatttatatgagtgacaattacacagacgttaatggcgagaaggtgctgccaaaagatgatatcgaatgccctttgggatggaagtgggaggatgaagaatggtctaccgacctcaatcgcgccgtggatgagcagggatgggagtacagtatcacgattccccccgagcggaagcctaaacactgggttccagccgagaaaatgtactatacccaccgccgaaggagatgggtccgcttgaggaggcgagatctgtctcagatggaagccctgaaaaggcacaggcaagcagaggctgagggcgaggggtgggagtatgcctccctctttggctggaagttccacctcgagtacagaaaaacagatgccttccggaggcgccgatggaggaggcggatggagcccctcgaaaaaacagggcctgccgctgtatttgccctagaaggtgccctggggggcgttatggatgacaagagcgaagacagcatgtccgtatctaccctgtcctttggcgtgaaccgaccaacaatcagctgtattttcgactatggaaatcgatatcacctgagatgttatatgtaccaggccagagacctcgcagctatggacaaggacagtttcagcgacccctatgccatcgtgtcctttttacaccagagtcagaaaaccgtggtggtcaagaatactctgaatccgacatgggaccagactctgattttttacgagatagaaattttcggcgaaccagccaccgtggccgagcagccgccgagcattgtggttgaactgtacgaccatgacacatacggggcagacgagttcatgggtagatgtatctgtcagccctcactcgagcggatgccacggcttgcttggtttcctttaactcgtgggagtcagccgagcggagagttgttggcatcttttgagctgattcagagggaaaagcctgcaatacaccacatcccagggttcgaagtccaagaaacttcgcgtatcctggatgagtccgaggacacggacttaccataccccccaccacagagagaagccaacatttacatggtcccccaaaacatcaagcctgctctccaaagaacagcgattgagattttggcctgggggttgcgaaacatgaagtcttaccagttggcaaatatatcctcaccgagcctagtcgtggagtgtggcggacagactgttcagtcgtgcgtgatccgcaatcttagaaaaaaccctaattttgacatatgtacactctttatggaggtcatgctgccacgagaagagctttactgcccacccatcactgtgaaggttattgataatcgccaatttggacggagacccgtcgtagggcagtgcacaattagatcgctggagtcttttctgtgcgatccatactcggcagagtcaccctcaccccagggaggaccagacgacgttagtctgctaagtcccggcgaggatgttttaatcgacattgatgataaagagccgttgatccccattcagctggcagacggcttgtcatccctggcgcccacaaatacagcttcgcctcctagctctccacatgaggaagaatttatcgattggtggtccaaattttttgccagcatcggcgaacgagagaagtgcggcagttacctggaaaaggacttcgacactttgaaagtgtacgatacacagttggagaacgtggaagcattcgaaggactgtcggacttttgtaacacctttaaactgtaccggggcaaaacacaggaggagaccgaggacccctcagtgatcggtgagttcaagggcctgttcaagatatatcctctgcccgaggaccccgccatacctatgcctcctcggcagtttcaccagttggcggcccaaggcccacaggaatgcctcgtcaggatctatatcgtgagagcctttggcctacagccaaaagatcctaacggcaaatgcgacccatacattaagatcagcattggcaaaaagagcgtatctgaccaggacaactacattccgtgcacactagaaccagtatttggcaagatgttcgagctgacatgtaccctcccactcgagaaagacttaaagatcacactttatgattacgatctgctctctaaggatgaaaaaattggagaaacggtcgtggatctggagaatagactgctttccaagtttggcgcccgctgtggccttcctcagacctattgcgtttctggtccaaaccagtggagggaccaactccggccaagtcaacttcttcacctgttctgtcaacagcaccgcgtgaaggccccagtttaccggaccgacagagtgatgttccaggacaaagagtactccatcgaagaaatagaagccgggaggatccccaatccccacctcggaccggtggaggagcggctcgctctccatgtgttacaacagcagggccttgtgcccgaacacgtggagagtaggccactgtattcaccacttcagcctgacattgagcaaggtaaactgcagatgtgggtggatttgttccctaaggccctgggtcgcccaggccctcctttcaacataaccccacgtcgtgcccgacggttctttttgcgttgcatcatctggaacactcgggacgttatcttagatgacctgtccctgaccggggagaaaatgtccgatatttacgtgaaggggtggatgataggattcgaagaacacaagcagaagacagatgtgcactaccgttccctcggaggtgagggaaattttaattggagattcatcttcccattcgattatcttccggctgaacaggtatgcacaattgccaagaaagacgccttctggagactggacaaaacagagagcaagattcctgcgcgagtggtctttcaaatttgggacaacgacaagttctccttcgacgatttcctgggaagtctccaactggacctgaacagaatgccaaaaccagcaaaaaccgctaagaagtgctctctggatcagctggatgatgcctttcatcctgagtggttcgtctccctctttgagcaaaagactgtgaaaggctggtggccatgcgtggcggaggaaggcgaaaaaaagatcctggcaggcaaactggaaatgactctggagatagtcgcagagtctgaacatgaggaaagaccagcgggtcagggtagagacgagcccaacatgaatccgaagcttgaagatcctcgacgcccagatactagttttctgtggttcacttctccatacaagaccatgaaatttatactctggagacgcttccggtgggctatcattttgttcatcattctcttcatcctgcttctgtttctcgctatcttcatctatgctttcccaaactatgcggcgatgaaattagttaagcctttctcctag

SEQ ID NO: 49021 - DNA, 6309 bp, Artificial Sequence
  derived and/or modified sequence
atgctgtgctgcctgctggtgcgggccagcaacctgcccagcgccaagaaggacagaagaagtgaccctgtggccagcctgaccttccggggcgtgaagaagaggaccaaggtgatcaagaacagcgtgaaccctgtgtggaatgaaggatttgagtgggacctgaagggcatccccctggaccagggcagcgagctgcacgtggtggtgaaggaccacgagaccatgggcaggaaccgcttcctgggggaggccaaggtgcccctgcgggaggtgctggccacccccagcctgagcgccagcttcaatgcccccctgctggacaccaagaagcagcccaccggggccagcctggtgctgcaggtgtcctacacccccctgcccggggctgtgcccctcttccccccacccacccccctggagcccagccccaccctgcctgacctggatgtggtggccgacacaggaggagaggaggacacagaggaccagggcctgactggagatgaagctgagcccttcctggaccagagcggcggccctggggcccccaccacccccaggaagctgcccagccggcccccaccccactacccaggcatcaagaggaagaggtctgcccccaccagcaggaagctgctgagtgacaagccccaggacttccagatccgggtgcaggtgattgagggccggcagctgcccggggtgaacatcaagcctgtggtgaaggtgacagctgctggccagaccaagaggacccgcatccacaagggcaacagccccctcttcaatgagaccctcttcttcaacctgtttgacagccctggagagctgtttgatgagcccatcttcatcaccgtggtggacagccgcagcctgaggacagatgccctgctgggggagttcaggatggatgtgggcaccatctaccgggagcccaggcatgcctacctgaggaagtggctgctgctgagtgaccctgatgacttctctgctggggcccggggctacctgaagaccagcctgtgtgtgctgggccctggagatgaggcccccctggagaggaaggaccccagcgaggacaaggaggacatcgagagcaacctgctgcggcccactggagtggccctgcggggggcccacttctgcctgaaggtgttccgggcagaggacctgccccagatggatgatgctgtgatggacaacgtgaagcagatctttggatttgagagcaacaagaagaacctggtggacccctttgtggaggtgtcctttgctgggaagatgctgtgcagcaagatcctggagaagacagccaacccccagtggaaccagaacatcaccctgcctgccatgttccccagcatgtgtgagaagatgaggatccgcatcatcgactgggaccggctgacccacaatgacatcgtggccaccacctacctgtccatgagcaagatcagcgcccctggaggagaaattgaggaggagcctgctggagctgtgaagcccagcaaggccagtgacctggatgactacctgggcttcctgcccaccttcggcccctgctacatcaacctgtatggcagcccccgggagttcaccggcttcccagacccctacacagagctgaacacaggaaaaggagagggcgtggcctaccggggccgcctgctgctgagcctggagaccaagctggtggagcacagcgagcagaaggtggaggacctgcctgcagatgacatcctgcgggtggagaagtacctgcggcggaggaagtacagcctgtttgctgccttctacagcgccaccatgctgcaggatgtggatgatgccatccagtttgaggtgtccatcggcaactacggcaacaagtttgacatgacctgcctgcccctggccagcaccacccagtacagcagagctgtgtttgatggctgccactactactacctgccctggggcaatgtgaagcctgtggtggtgctgagcagctactgggaggacatcagccacagaattgagacccagaaccagctgctgggcattgctgaccggctggaggccggcctggagcaggtgcacctggccctgaaggcccagtgcagcacagaagatgtggacagcctggtggcccagctgacagatgagctgattgctggctgcagccagcccctgggggacatccacgagaccccatctgccacccacctggaccagtacctgtaccagctgcggacccaccacctgagccagatcacagaagctgccctggccctgaagctgggccacagcgagctgcctgctgccctggagcaggccgaggactggctgctgcggctgcgggccctggccgaggagccccagaacagcctgcctgacatcgtcatctggatgctgcagggcgacaagagggtggcctaccagagggtgcctgcccaccaggtgctcttcagcagaagaggagccaactactgcggcaagaactgtgggaagctgcagaccatcttcctgaagtaccccatggagaaggtgcctggggccaggatgcctgtgcagatccgggtgaagctgtggtttggcctgtctgtggatgagaaggagttcaaccagtttgctgagggcaagctgtctgtgtttgctgagacctatgaaaatgagaccaagctggccctggtgggcaactggggcaccaccggcctgacctaccccaagttcagtgatgtgacaggcaagatcaagctgcccaaggacagcttccggcccagcgctggctggacctgggccggggactggtttgtgtgcccagagaagaccctgctgcatgacatggatgctggccacctgagctttgtggaggaggtgtttgagaaccagacccggctgcccggcggccagtggatctacatgtctgacaactacacagatgtgaatggagagaaggtgctgcccaaggatgacatcgagtgccccctgggctggaagtgggaggatgaggagtggagcacagacctgaacagagctgtggatgagcagggctgggagtacagcatcaccatccccccagagaggaagcccaagcactgggtgcctgctgagaagatgtactacacccacagaagaagacgctgggtgcggctgcggcggcgggacctgagccagatggaggccctgaagaggcaccggcaggccgaggccgagggggagggctgggagtatgccagcctgtttggctggaagttccacctggagtacaggaagacagatgccttcagaagaagacgctggaggaggaggatggagcccctggagaagacaggccctgctgctgtgtttgccctggagggcgccctgggcggcgtgatggatgacaagtctgaggacagcatgtctgtgtccaccctgagctttggagtgaaccggcccaccatcagctgcatctttgattatggcaaccgctaccacctgcgctgctacatgtaccaggcccgggacctggccgccatggacaaggacagcttcagtgacccctatgccatcgtgtccttcctgcaccagagccagaagacagtggtggtgaagaacaccctgaaccccacctgggaccagaccctcatcttctatgaaattgagatctttggagagcccgccaccgtggccgagcagccccccagcatcgtggtggagctgtatgaccatgacacctatggagcagatgagttcatgggccgctgcatctgccagcccagcctggagaggatgccccggctggcctggttccccctgacccggggcagccagcccagcggggagctgctggccagctttgagctgatccagcgggagaagccagccatccaccacatccctggctttgaggtgcaggagaccagccgcatcctggatgaaagtgaggacacagacctgccctaccccccaccccagcgggaggccaacatctacatggtgccccagaacatcaagccagccctgcagaggacagccatcgagatcctggcctggggcctgaggaacatgaagagctaccagctggccaacatcagcagccccagcctggtggtggagtgtggcggccagacagtgcagagctgtgtgatccggaacctgaggaagaaccccaactttgacatctgcaccctcttcatggaggtgatgctgccccgggaggagctgtactgcccccccatcaccgtgaaggtgattgacaaccggcagtttggccggcggcctgtggtgggccagtgcaccatccgcagcctggagagcttcctgtgtgacccctacagcgctgagagccccagcccccagggcggcccagatgatgtgtccctgctgagccctggagaagatgtgctgattgatattgatgacaaggagcccctcatccccatccagctggctgatggcctgagcagcctggcccccaccaacacagccagcccccccagcagcccccatgaggaggagttcatcgactggtggagcaagttctttgccagcattggagagcgggagaagtgtggcagctacctggagaaggactttgacaccctgaaggtgtatgacacccagctggagaatgtggaggcctttgagggcctgagtgacttctgcaacaccttcaagctgtaccggggcaagacccaggaggagacagaggaccccagcgtcatcggggagttcaagggcctcttcaagatctaccccctgcctgaggaccctgccatccccatgccaccccggcagttccaccagctggccgcccagggcccccaggagtgcctggtgcgcatctacatcgtgcgggccttcggcctgcagcccaaggaccccaacgggaaatgtgacccctacatcaagatcagcatcggcaagaagtctgtgtctgaccaggacaactacatcccctgcaccctggagcctgtgtttgggaagatgtttgagctgacctgcaccctgcccctggagaaggacctgaagatcaccctgtatgactatgacctgctgagcaaggatgagaagattggagagaccgtggtggacctggagaaccggctgctgagcaagtttggagcccgctgtggcctgccccagacctactgtgtgtctggccccaaccagtggagggaccagctgcggcccagccagctgctgcacctgttctgccagcagcaccgggtgaaggcccctgtgtacagaacagacagagtgatgttccaggacaaggagtacagcattgaggagattgaagctggccgcatccccaacccccacctgggccctgtggaggagcggctggccctgcacgtgctgcagcagcagggcctggtgcctgagcacgtggagagccggcccctgtacagccccctgcagcctgacatcgagcagggcaagctgcagatgtgggtggacctcttccccaaggccctgggccggcccggcccccccttcaacatcaccccccggcgggcccggcgcttcttcctgcgctgcatcatctggaacaccagagatgtgatcctggatgacctgagcctgactggagagaagatgtctgacatctacgtgaagggctggatgattggatttgaggagcacaagcagaagacagatgtgcactaccgcagcctgggcggggagggcaacttcaactggaggttcatcttcccctttgactacctgcctgctgagcaggtgtgcaccatcgccaagaaggatgccttctggaggctggacaagacagagagcaagatcccagcccgggtggtgttccagatctgggacaatgacaagttctcctttgatgacttcctgggcagcctgcagctggacctgaacaggatgcccaagccagccaagacagccaagaagtgcagcctggaccagctggatgatgccttccaccctgagtggtttgtgtccctgtttgagcagaagacagtgaagggctggtggccctgtgtggccgaggagggggagaagaagatcctggccggcaagctggagatgaccctggagatcgtggccgagagcgagcacgaggagaggcctgctggccagggcagagatgagcccaacatgaaccccaagctggaggaccccaggaggccagacaccagcttcctgtggttcaccagcccctacaagaccatgaagttcatcctgtggaggcgcttccgctgggccatcatcctcttcatcatcctcttcatcctgctgctcttcctggccatcttcatctatgccttccccaactatgctgccatgaagctggtgaagcccttctcctag

SEQ ID NO: 49022 - DNA, 6606 bp, Artificial Sequence
  derived and/or modified sequence
tctccgcggaggagcagcgaaggcgacagctctcttggcgcggctgcctgggagccgggcgcttgctgggtgggtgctcgggcccggtgctcccgctcccgccctgactgcgcgcctgtgtgccgccggggctgcccagccatgctgtgctgcctgctggtgagggccagcaacctccccagtgcgaagaaggaccggcgcagcgaccctgtcgcaagcctgactttccgaggggtgaagaagagaaccaaagtcatcaagaacagcgtgaaccctgtatggaatgagggatttgaatgggacctcaagggcatccccctggaccagggctctgagcttcatgtggtggtcaaagaccatgagacgatggggaggaacaggttcctgggggaagccaaggtcccactccgagaggtcctcgccacccctagtctgtccgccagcttcaatgcccccctgctggacaccaagaagcagcccacaggggcctcgctggtcctgcaggtgtcctacacaccgctgcctggagctgtgcccctgttcccgccccctactcctctggagccctccccgactctgcctgacctggatgtagtggcagacacaggaggagaggaagacacagaggaccagggactcactggagatgaggcggagccattcctggatcaaagcggaggcccgggggctcccaccaccccaaggaaactaccttcacgtcctccgccccactaccccgggatcaaaagaaagcgaagtgcgcctacatctagaaagctgctgtcagacaaaccgcaggatttccagatcagggtccaggtgatcgaggggcgccagctgccgggggtgaacatcaagcctgtggtcaaggttaccgctgcagggcagaccaagcggacgcggatccacaagggaaacagcccactcttcaatgagactcttttcttcaacttgtttgactctcctggggagctgtttgatgagcccatctttatcacggtggtagactctcgttctctcaggacagatgctctcctcggggagttccggatggacgtgggcaccatttacagagagccccggcacgcctatctcaggaagtggctgctgctctcagaccctgatgacttctctgctggggccagaggctacctgaaaacaagcctttgtgtgctggggcctggggacgaagcgcctctggagagaaaagacccctctgaagacaaggaggacattgaaagcaacctgctccggcccacaggcgtagccctgcgaggagcccacttctgcctgaaggtcttccgggccgaggacttgccgcagatggacgatgccgtgatggacaacgtgaaacagatctttggcttcgagagtaacaagaagaacttggtggacccctttgtggaggtcagctttgcggggaaaatgctgtgcagcaagatcttggagaagacggccaaccctcagtggaaccagaacatcacactgcctgccatgtttccctccatgtgcgaaaaaatgaggattcgtatcatagactgggaccgcctgactcacaatgacatcgtggctaccacctacctgagtatgtcgaaaatctctgcccctggaggagaaatagaagaggagcctgcaggtgctgtcaagccttcgaaagcctcagacttggatgactacctgggcttcctccccacttttgggccctgctacatcaacctctatggcagtcccagagagttcacaggcttcccagacccctacacagagctcaacacaggcaagggggaaggtgtggcttatcgtggccggcttctgctctccctggagaccaagctggtggagcacagtgaacagaaggtggaggaccttcctgcggatgacatcctccgggtggagaagtaccttaggaggcgcaagtactccctgtttgcggccttctactcagccaccatgctgcaggatgtggatgatgccatccagtttgaggtcagcatcgggaactacgggaacaagttcgacatgacctgcctgccgctggcctccaccactcagtacagccgtgcagtctttgacgggtgccactactactacctaccctggggtaacgtgaaacctgtggtggtgctgtcatcctactgggaggacatcagccatagaatcgagactcagaaccagctgcttgggattgctgaccggctggaagctggcctggagcaggtccacctggccctgaaggcgcagtgctccacggaggacgtggactcgctggtggctcagctgacggatgagctcatcgcaggctgcagccagcctctgggtgacatccatgagacaccctctgccacccacctggaccagtacctgtaccagctgcgcacccatcacctgagccaaatcactgaggctgccctggccctgaagctcggccacagtgagctccctgcagctctggagcaggcggaggactggctcctgcgtctgcgtgccctggcagaggagccccagaacagcctgccggacatcgtcatctggatgctgcagggagacaagcgtgtggcataccagcgggtgcccgcccaccaagtcctcttctcccggcggggtgccaactactgtggcaagaattgtgggaagctacagacaatctttctgaaatatccgatggagaaggtgcctggcgcccggatgccagtgcagatacgggtcaagctgtggtttgggctctcagtggatgagaaggagttcaaccagtttgctgaggggaagctgtctgtctttgctgaaacctatgagaacgagactaagttggcccttgttgggaactggggcacaacgggcctcacctaccccaagttttctgacgtcacgggcaagatcaagctacccaaggacagcttccgcccctcggccggctggacctgggctggagattggttcgtgtgtccggagaagactctgctccatgacatggacgccggtcacctgagcttcgtggaagaggtgtttgagaaccagacccggcttcccggaggccagtggatctacatgagtgacaactacaccgatgtgaacggggagaaggtgcttcccaaggatgacattgagtgcccactgggctggaagtgggaagatgaggaatggtccacagacctcaaccgggctgtcgatgagcaaggctgggagtatagcatcaccatccccccggagcggaagccgaagcactgggtccctgctgagaagatgtactacacacaccgacggcggcgctgggtgcgcctgcgcaggagggatctcagccaaatggaagcactgaaaaggcacaggcaggcggaggcggagggcgagggctgggagtacgcctctctttttggctggaagttccacctcgagtaccgcaagacagatgccttccgccgccgccgctggcgccgtcgcatggagccactggagaagacggggcctgcagctgtgtttgcccttgagggggccctgggcggcgtgatggatgacaagagtgaagattccatgtccgtctccaccttgagcttcggtgtgaacagacccacgatttcctgcatattcgactatgggaaccgctaccatctacgctgctacatgtaccaggcccgggacctggctgcgatggacaaggactctttttctgatccctatgccatcgtctccttcctgcaccagagccagaagacggtggtggtgaagaacacccttaaccccacctgggaccagacgctcatcttctacgagatcgagatctttggcgagccggccacagttgctgagcaaccgcccagcattgtggtggagctgtacgaccatgacacttatggtgcagacgagtttatgggtcgctgcatctgtcaaccgagtctggaacggatgccacggctggcctggttcccactgacgaggggcagccagccgtcgggggagctgctggcctcttttgagctcatccagagagagaagccggccatccaccatattcctggttttgaggtgcaggagacatcaaggatcctggatgagtctgaggacacagacctgccctacccaccaccccagagggaggccaacatctacatggttcctcagaacatcaagccagcgctccagcgtaccgccatcgagatcctggcatggggcctgcggaacatgaagagttaccagctggccaacatctcctcccccagcctcgtggtagagtgtgggggccagacggtgcagtcctgtgtcatcaggaacctccggaagaaccccaactttgacatctgcaccctcttcatggaagtgatgctgcccagggaggagctctactgcccccccatcaccgtcaaggtcatcgataaccgccagtttggccgccggcctgtggtgggccagtgtaccatccgctccctggagagcttcctgtgtgacccctactcggcggagagtccatccccacagggtggcccagacgatgtgagcctactcagtcctggggaagacgtgctcatcgacattgatgacaaggagcccctcatccccatccagcttgcagacggtctgtcgagcttggcccccactaacacggcttctcctccatccagtcctcatgaggaagagttcatcgattggtggagcaaattctttgcctccataggggagagggaaaagtgcggctcctacctggagaaggattttgacaccctgaaggtctatgacacacagctggagaatgtggaggcctttgagggcctgtctgacttttgtaacaccttcaagctgtaccggggcaagacgcaggaggagacagaagatccatctgtgattggtgaatttaagggcctcttcaaaatttatcccctcccagaagacccagccatccccatgcccccaagacagttccaccagctggccgcccagggaccccaggagtgcttggtccgtatctacattgtccgagcatttggcctgcagcccaaggaccccaatggaaagtgtgatccttacatcaagatctccatagggaagaaatcagtgagtgaccaggataactacatcccctgcacgctggagcccgtatttggaaagatgttcgagctgacctgcactctgcctctggagaaggacctaaagatcactctctatgactatgacctcctctccaaggacgaaaagatcggtgagacggtcgtcgacctggagaacaggctgctgtccaagtttggggctcgctgtggactcccacagacctactgtgtctctggaccgaaccagtggcgggaccagctccgcccctcccagctcctccacctcttctgccagcagcatagagtcaaggcacctgtgtaccggacagaccgtgtaatgtttcaggataaagaatattccattgaagagatagaggctggcaggatcccaaacccacacctgggcccagtggaggagcgtctggctctgcatgtgcttcagcagcagggcctggtcccggagcacgtggagtcacggcccctctacagccccctgcagccagacatcgagcaggggaagctgcagatgtgggtcgacctatttccgaaggccctggggcggcctggacctcccttcaacatcaccccacggagagccagaaggtttttcctgcgttgtattatctggaataccagagatgtgatcctggatgacctgagcctcacgggggagaagatgagcgacatttatgtgaaaggttggatgattggctttgaagaacacaagcaaaagacagacgtgcattatcgttccctgggaggtgaaggcaacttcaactggaggttcattttccccttcgactacctgccagctgagcaagtctgtaccattgccaagaaggatgccttctggaggctggacaagactgagagcaaaatcccagcacgagtggtgttccagatctgggacaatgacaagttctcctttgatgattttctgggctccctgcagctcgatctcaaccgcatgcccaagccagccaagacagccaagaagtgctccttggaccagctggatgatgctttccacccagaatggtttgtgtccctttttgagcagaaaacagtgaagggctggtggccctgtgtagcagaagagggtgagaagaaaatactggcgggcaagctggaaatgaccttggagattgtagcagagagtgagcatgaggagcggcctgctggccagggccgggatgagcccaacatgaaccctaagcttgaggacccaaggcgccccgacacctccttcctgtggtttacctccccatacaagaccatgaagttcatcctgtggcggcgtttccggtgggccatcatcctcttcatcatcctcttcatcctgctgctgttcctggccatcttcatctacgccttcccgaactatgctgccatgaagctggtgaagcccttcagctgaggactctcctgccctgtagaaggggccgtggggtcccctccagcatgggactggcctgcctcctccgcccagctcggcgagctcctccagacctcctaggcctgattgtcctgccagggtgggcagacagacagatggaccggcccacactcccag

SEQ ID NO: 49023 - DNA, 6309 bp, Artificial Sequence
  derived and/or modified sequence
atgctgtgctgcctgctggtgcgggccagcaacctgcccagcgccaagaaagatcgcaggtccgacccagtcgcctccttgaccttccgcggtgtgaaaaaacgcacaaaggtcatcaagaattctgtgaaccccgtgtggaacgaaggctttgagtgggacctgaagggaattcccctggatcaaggatccgaactgcacgttgtggtcaaagatcacgagacaatgggccggaataggttcctcggagaagcaaaagtcccactgcgtgaagtccttgccaccccgagcctgtccgccagttttaatgctcccctgctcgacactaagaagcagcctacaggggcttctcttgtgcttcaggtgagctatacgcccctgcccggggcagttcccctgttcccgcccccaacccccctggagccatcaccaaccctgcccgacttagacgttgtggccgacacagggggagaggaggacactgaagaccagggcctgacaggtgatgaagctgagcccttcctcgaccagtccgggggcccgggtgcacccaccacaccccgcaagttgccctccaggccacccccgcattaccccggtatcaagcggaagaggagtgctcctaccagcagaaagctcttgtcggacaagcctcaggatttccagattcgggttcaggtcatagagggccgtcagcttcccggcgtgaatataaagccggtggtaaaggttaccgccgccgggcaaacaaaaagaacgcggatccacaagggcaattcacctttgttcaatgaaactctcttctttaatctgttcgacagccccggcgaactcttcgatgagccaatcttcatcacagtggttgactcacgatcactgcgaacagatgctctactcggtgaattccgcatggacgtcgggacgatatatagggagcccaggcacgcctacctgcgaaagtggcttctcttgtcagaccctgatgacttcagtgccggtgcccggggctacctgaaaacttctctgtgtgtgctgggccccggggatgaagctcctctcgaaagaaaggacccctctgaggacaaggaagacatcgaatctaatttgcttagacccactggagtggcccttaggggcgcccacttctgtctgaaagtgtttagagcggaggatcttccccagatggacgacgcggtgatggataacgttaagcagatcttcgggttcgagagtaacaaaaagaacctggtggacccctttgtggaagtttcctttgcaggaaagatgctgtgcagtaagatcctcgagaagactgccaaccctcagtggaaccaaaatattaccttaccggccatgtttccctctatgtgtgagaagatgcggattcgtatcattgactgggataggctgactcacaatgacattgtcgccacaacatacctgtccatgtccaagataagtgcgcctgggggcgaaattgaagaagagcctgccggggccgtcaaacctagtaaagcaagtgacttagacgactacctgggttttttgcctacattcggaccttgctatataaacctgtacggttcccctcgcgagttcacaggattccctgacccgtatacggaactgaataccggcaagggagagggggtggcttacagggggcggttgctgctgtcactggagacaaagctcgtggagcactctgagcagaaggtggaggacctgcctgcagacgatatactgcgggtggagaagtatctgcgccgccgcaagtactctcttttcgctgccttctattctgctactatgctgcaggatgtcgatgacgcaatccagttcgaggtctccatcgggaattatggcaataaatttgacatgacctgtctgcctttggccagcacaacccagtacagccgagctgtattcgatggctgccactactattatctgccatgggggaacgtgaagcccgtggtcgtactctcctcttactgggaagatatctcacacaggatcgagactcaaaatcagttattaggtattgcagatcgactagaggcaggcctggaacaggtacatctggctctgaaagcacagtgcagtactgaggacgttgacagcctggtcgcccagttgacggacgaattaattgcaggctgctcccagcctctgggcgacattcacgagactcccagtgctacgcatctcgatcagtacctctatcagctgaggacacatcacctgagtcagataactgaagctgcgcttgccttaaagctggggcacagtgaactgccagcggccctcgaacaggcagaagattggttgctccgcttaagagcgttagccgaagagccccagaatagtttgcctgatatcgtgatttggatgcttcagggggacaaacgggtcgcttatcagagagtgccagctcaccaggtcttgttttctcgacgaggtgccaattattgtggtaaaaactgcgggaaattgcagactatattcctgaaatatccaatggagaaagtgcccggggctaggatgcctgtgcagatcagggtcaagctgtggttcggactgagcgtcgacgagaaggagttcaaccagttcgccgaaggtaagctgagcgtttttgcagaaacctatgaaaacgaaacaaaactggccctggttggtaactgggggacaacaggactgacataccccaagttttctgatgtgaccgggaagatcaaactgcctaaggatagttttaggccaagcgcaggatggacttgggccggagactggttcgtctgcccggaaaagacacttctgcacgatatggacgccggacatttgtcttttgtggaagaggtttttgaaaatcagacaagactgcctggcgggcagtggatttacatgagtgacaactataccgatgtaaatggcgagaaagtgctgccgaaagacgacatcgaatgcccacttgggtggaaatgggaagatgaggaatggagcactgacctgaatcgggctgtggatgagcaaggatgggagtattcgatcaccattccacctgaaaggaagcccaaacactgggttccagcagagaaaatgtattacacccacagacggcgacgctgggtacggctaagaagaagggatctctctcaaatggaggccttgaaacgccataggcaggccgaggcagagggggaaggctgggagtatgcgtccctgttcggctggaagttccacttagaatatcgtaaaaccgacgctttccggagacggaggtggagacgacggatggagccgttggaaaagaccggacctgcagcggtgtttgccctagagggtgctctgggcggtgtgatggatgataagagcgaagattctatgagcgtctccacattatcattcggcgtgaatcgtcccacaattagttgtatattcgactacggaaacaggtatcacctccgatgctatatgtatcaagcccgggacctagccgccatggacaaggatagtttcagcgacccctatgcgatcgttagctttctgcaccagagccaaaaaactgtggttgtgaaaaataccctcaatcccacctgggaccagacactgatattttatgaaattgagatcttcggcgaacctgccaccgttgctgaacagccaccgagcatcgtggtggagctgtacgaccacgacacttacggtgcagacgagttcatgggtcgctgtatctgtcaaccctcactggaacgtatgcccagattggcgtggttcccacttacacgggggtcccagccttctggagagctcctggcctctttcgaactaatccagcgcgagaaacccgcaattcatcacatccccgggtttgaggtccaggaaacatcacgtatcttggacgagagcgaggacactgacttaccttacccccctcctcaacgcgaggccaatatttatatggtgccccagaatatcaagccggcacttcaacgaaccgctatcgaaatcttagcatggggactccgcaatatgaagtcatatcaattggccaacataagctcccccagccttgtggtcgaatgtggtggccaaacggtccaaagttgcgttatccggaacctgaggaagaacccaaatttcgacatctgtacactttttatggaggtgatgctcccacgcgaagaactgtattgcccaccaatcactgtaaaagtaattgacaacagacagtttggacggagacctgttgtcggccagtgcaccatccggtccctggaatccttcttgtgtgacccctactccgccgagtctccatcacctcagggtgggccggatgatgtgagccttctgagccccggcgaagacgtcctgatagacattgatgataaggagccacttataccgatccagttggccgacggactgtccagcttggctcccaccaacaccgcatcccccccgtcaagccctcacgaggaggaattcatagactggtggtcaaagttctttgcgagtatcggggagcgggagaaatgcgggtcttacttggagaaggactttgacacgctgaaggtgtatgacacacagctggagaacgtagaggctttcgagggcctttctgatttctgtaacaccttcaagctctatcgcggcaagacccaggaggagacagaggacccctctgtgatcggcgagttcaaagggctgtttaagatctacccacttccggaggatcctgccattccgatgcccccgagacagtttcatcagctggctgcacagggcccccaggaatgcctcgtgcgcatatatatcgtgagggcatttggtcttcaacctaaggatcccaatgggaaatgcgacccttatatcaaaatctcaatcggaaagaagagcgtaagtgaccaggacaattatatcccatgcactctagaacccgtgtttggaaagatgttcgaacttacatgtacgctaccgctggagaaagacctaaagatcacactgtatgattatgatctgctgtccaaagatgaaaagatcggagagacagttgtggatctggagaaccgccttctgtccaaattcggagcccggtgtggactcccacagacatactgtgtctctggtcccaaccagtggcgcgaccagctccggccatcccagctgctgcacctgttctgccagcaacaccgagtcaaagctccggtctatcggactgaccgggttatgttccaggataaggagtatagcatcgaagagatcgaggctggtcgcattcccaaccctcaccttggcccggttgaggagcgccttgcgctacatgtcttgcaacagcagggcctggtgccggagcacgttgagagtcggcctctctattcccctcttcaaccagatatagagcaaggaaaacttcagatgtgggtcgacctctttcccaaagcactcgggcgtccaggcccaccttttaacattaccccaaggcgggcccggcgcttctttttaaggtgtataatctggaacacacgcgatgtgattctggatgacctgtctttgaccggcgagaaaatgtctgatatctacgtaaaggggtggatgataggttttgaggaacataagcaaaagaccgacgtccactatcgaagtctggggggcgaaggtaattttaactggcgcttcatcttccccttcgactacctccccgcggagcaggtgtgtactattgccaagaaggatgcattctggcgcctggacaaaactgagagcaaaattccagcacgtgtggtctttcaaatctgggacaacgacaaattttccttcgacgactttctgggatcactacagctggacctgaaccgcatgcccaagccagccaagacagccaagaagtgctcgctcgaccagctagacgacgcctttcatcctgagtggttcgttagtctgttcgaacagaagaccgtcaaaggctggtggccctgtgtggctgaggagggcgagaaaaagatcctggcagggaaactggagatgaccctcgaaatcgtcgccgagtccgaacacgaggagagaccagccggacagggacgggatgagccaaatatgaaccccaagcttgaggacccaagacggccagacactagtttcctttggttcactagtccatacaagaccatgaaattcatcctgtggaggcgttttcgttgggccattatcctctttatcattctttttatcctgctgctgtttcttgctatcttcatctatgcatttcctaattatgctgccatgaagctcgtgaagccgttctcctag

SEQ ID NO: 49024 - DNA, 6309 bp, Artificial Sequence
  derived and/or modified sequence
atgttatgctgtctgttggtccgtgcatcgaatctgccaagcgccaaaaaagaccggagaagcgatccagtggcttcactcacttttcgcggagtgaagaagagaaccaaggttatcaagaacagcgtgaaccccgtatggaatgaggggttcgaatgggacctaaaggggattccgctggatcaggggagcgagttacacgttgtggtgaaggatcacgagacaatgggcagaaaccggtttctgggggaggccaaggtgcccctccgtgaagtcttggcaactccatcgctctcagcaagcttcaacgcacccctcctggataccaagaagcagcccacaggcgcttcactggttctccaggtttcttacacccccttgcccggagccgtgcccctcttccctcctccaacgcccctcgagccttcccctacactgcccgatcttgatgtggtcgccgacaccggaggcgaagaagacacagaagatcagggtctgactggcgatgaggccgaacccttccttgaccagagtggtgggccaggcgcaccgaccacgcccagaaaactgccctctcggcctccaccacactatcccggtattaagcgtaaacgaagcgccccaacaagtaggaaactactaagtgacaagcctcaggatttccagattagagtgcaggtgatagaggggaggcaattgcccggtgttaacataaaaccagtggtcaaggtgaccgcggctggccagacaaagcgaacgcgaatccacaaggggaatagcccactcttcaatgaaacactttttttcaatctgttcgattccccgggagagctgtttgatgagcctatctttatcaccgtcgtggacagtagaagcctgcggaccgatgccctgttaggagaattcagaatggatgttggcacaatttaccgggagccacgccacgcttacttgcggaaatggttgctcctctccgatccagacgacttctcagccggtgccagggggtacctgaagacaagcctttgtgtgctcgggcctggagacgaggctcctctggagcgcaaggatccctctgaagataaagaggacatcgagtcaaacttgctgaggcccaccggcgtggctctaagaggagcccatttctgtctcaaagttttccgggcagaggacctcccccagatggatgatgctgtcatggataacgtaaagcagatctttggttttgagagtaataagaagaatttggttgacccgttcgtggaagtatcctttgccggtaaaatgttgtgctcaaaaattctggagaagaccgcaaatccgcaatggaaccagaatatcaccctccccgcaatgtttccttccatgtgcgaaaaaatgcgcatcaggattattgactgggatcgtctgacccacaacgatattgtggctacaacttacttgtcgatgtccaagatatccgcccctggtggagaaatcgaagaggagcccgcaggcgctgtcaaaccctctaaagcttctgatctcgacgattatttggggtttcttccgacctttgggccttgttacattaacctgtacggctcccccagggagttcactggatttcccgatccttatactgagttgaacaccgggaagggagaaggggtggcgtatcgaggccgtttactactctctttggagacaaagttggttgaacattccgaacagaaagtggaggacttacccgctgacgacattctaagagttgaaaaatacctgcgaagacgcaaatatagcctcttcgcagctttttatagcgcgaccatgttgcaggatgtggacgacgcaatccagtttgaggtttctataggcaattatggtaataaatttgacatgacatgtctacccctggcatctacaacacagtactccagggctgttttcgacgggtgtcattattactatctgccctggggaaacgttaaaccagttgttgtgctaagcagttactgggaagacatttcccacagaatcgagactcagaaccaactgctgggaattgccgatagactcgaggcaggactggagcaagtgcatttggctctcaaagcccagtgtagcaccgaggacgtggattcgcttgtggcgcagctgaccgatgagctgatcgccggatgttcgcagcctctgggagatatccacgaaactccaagtgctacacacctggaccaatacctgtatcaactgaggacccatcaccttagtcagatcacggaggcagctctggccctaaagctgggtcactcggagctccctgcagccctcgaacaggctgaggactggctgcttcggctccgggcactggcagaggagccacagaattcacttcccgacatagtcatctggatgcttcagggagacaagagagttgcttaccagcgcgtcccggctcaccaggtgctgttctcacgcagaggggcaaactactgtgggaagaattgcgggaaattgcagaccatattcttaaagtatcctatggaaaaagtcccgggagcaagaatgccagtgcaaatccgagtgaagctgtggtttggactgtcagtcgacgagaaagaatttaaccagtttgctgaaggcaaactttcggtgttcgccgaaacttacgaaaacgagactaagctagcgttagtcggcaattggggcactaccggccttacatacccaaaattctcagatgttacaggtaagatcaagctgccaaaagactcattccgccctagcgccggatggacctgggctggagattggttcgtgtgccccgagaaaaccctgctgcacgacatggatgccggtcacctgagttttgtggaggaagtttttgaaaaccagaccaggctaccaggcggtcaatggatttatatgagcgataattacacagatgttaacggagaaaaagtgttacccaaagacgacatcgagtgccctcttgggtggaagtgggaggatgaggaatggtctacagacttgaacagggcagtagacgaacaggggtgggagtatagtattacaatccctccagaaagaaaacccaagcattgggttcccgcagaaaagatgtactacactcatcgcaggcgccgttgggtgcgcttaaggagacgcgatttatctcagatggaggccttaaaaagacaccggcaggccgaggcagagggagaaggctgggaatacgcatctctttttggttggaagttccacctagagtatagaaaaacagacgccttcaggcggaggaggtggagacgacgtatggagccattggagaaaaccgggcctgccgctgtgtttgcactagagggggctcttggaggggttatggatgataagtcagaggacagcatgagtgttagcaccctctcatttggcgtgaatcgcccaactatctcctgcattttcgactatggtaatcggtaccatctcagatgctatatgtaccaggctagggaccttgcagctatggataaagactcattttcagatccctacgcaattgtctcatttctgcatcagagtcagaaaactgtggtggtgaaaaacacgctgaaccctacctgggaccagactctgatcttctacgagattgaaatatttggtgaacctgctacagtcgcagagcagcctccctcaatcgtggtggagctgtacgaccacgatacatacggtgccgatgagttcatgggacgctgcatctgtcagccttcactcgagcgtatgccgaggctcgcatggtttcccctcactcgaggctcacagccctccggagaactgctcgcttcctttgaactgatccagagagaaaaacccgctatccaccatattccaggctttgaggtgcaggagacctcaaggattctagatgagagcgaggacacagacctgccctatccaccgcctcagcgcgaggcaaatatttacatggttccccagaacatcaaaccggcacttcagcgaaccgccatcgagatcctggcttggggcctacgtaacatgaaatcataccagctcgccaatatttcctctcccagtctggtggtagagtgcggaggccaaaccgtccagtcatgcgtcattagaaatctgagaaaaaatccaaatttcgatatctgtactttatttatggaggtgatgctgcccagagaggagctttactgtccaccaatcactgtcaaggtgatagacaataggcaatttggccgaaggcccgttgttgggcagtgtaccattaggtcactggagtcctttctgtgcgatccctattctgctgagtcccctagtccacagggcggaccagatgacgtgagcctcttgtcccctggcgaagatgtgctgattgacatcgacgataaggaaccactgattcccatccagctcgctgacggcttatcctctctggcacctacaaataccgcctcgccacccagttcaccgcatgaggaagagtttattgattggtggagcaagtttttcgcatcgattggagagcgggaaaagtgcgggagttacctcgagaaagattttgataccttgaaggtgtatgatacacagctagagaacgtcgaggcctttgagggcttgtctgatttctgcaacacattcaagctgtatagaggtaagacacaagaagaaacagaagacccatctgttatcggcgagttcaagggactcttcaaaatatatccgctcccagaggaccctgcaatcccgatgcctccacgtcagttccatcagctcgcagcccaagggccacaagagtgcctagtccgcatctacattgtgagggcatttggtcttcagccaaaagaccctaacggaaagtgtgacccttacattaaaatttcaatcggtaagaaaagtgtttcagaccaggacaattacattccatgtactctcgaaccggtttttgggaaaatgttcgaactaacctgcaccctgccccttgagaaggatcttaagatcaccctgtacgactacgacctgctgtcaaaagatgagaagattggtgaaaccgtcgttgatctggagaatagactgttatcgaagttcggcgcaagatgtggactgccccagacatactgcgtgtctggccctaatcagtggcgggaccagctacgtccatcacagcttctgcaccttttttgccagcagcatagagtcaaggcaccggtgtaccggaccgatcgtgtgatgtttcaggataaagagtacagcatagaggaaattgaagccggacgaataccaaatccacatctgggaccagtcgaagagagattggcactccacgtcctccagcagcagggattagtgccagaacatgtagagtcccggcctctgtattcacccttgcagccagacatcgagcaggggaaactccagatgtgggtggatctgtttccaaaggcactgggcagacccggtccaccattcaacatcacaccgaggcgagccaggcggtttttccttcgctgcattatttggaacactcgagacgtgatattagatgatctttcacttactggagaaaagatgtccgacatttacgttaaaggctggatgatcggctttgaggaacataagcagaaaacggacgtgcactaccggtcacttggaggcgagggaaactttaattggcggttcatcttcccctttgattaccttcctgccgaacaggtatgtaccatcgccaagaaggatgcattttggcgtctcgacaagaccgagagtaaaatccctgctagggtggtcttccagatttgggacaacgataagttttcctttgatgattttctgggttcattacaattagatctcaaccgaatgccaaaaccagccaagacagcgaaaaagtgctccctggaccaactggatgacgctttccatcctgaatggttcgtctcgctgttcgaacaaaaaactgtgaaaggctggtggccctgcgtggcggaagagggagagaagaagatcctagcgggaaaactagagatgaccctcgagatcgtcgcggagtctgagcatgaggagcgacctgccggacagggtcgcgatgagccgaatatgaatcccaaattagaagatcctcggaggcccgataccagcttcctgtggtttacctccccatacaagaccatgaagttcatcctctggagaaggtttcggtgggccattatattgttcatcatcctgtttatccttctgctctttctggccatttttatatacgcatttcctaactatgcggctatgaaactggtaaaacctttttcttat

SEQ ID NO: 49025 - DNA, 6309 bp, Artificial Sequence
  derived and/or modified sequence
atgttgtgttgtcttttggtcagagcatcaaatctgccctcagccaagaaggacaggcgctctgacccagttgcctctctgacctttcgcggtgtgaagaaacgtactaaggttatcaagaattctgtgaaccctgtgtggaacgaggggtttgaatgggatttaaaaggcatcccactggaccaagggagtgaattgcacgtggtagtgaaagaccacgaaaccatgggaagaaatcggtttctgggggaggccaaggtccctctgcgtgaagtgctcgctacacctagcctgtccgcatctttcaacgcacctttattagacacaaagaagcaacctacaggtgcttccctggttctgcaggtgtcctatactccactgcctggcgcggtgcctctgttccctccaccaacgccactagaaccctccccaactctgcctgacctcgacgtcgtggcagacaccggaggcgaagaagacaccgaagatcagggcctgactggcgatgaggccgagccttttctggatcaaagcggcggtcccggagcccccaccaccccgagaaagctcccttctagacccccacctcattatcctggaataaagcggaagcgatctgcgccaacatctaggaagctactgagtgacaaaccccaggatttccaaattcgtgtgcaggtgattgagggacgacagctgcctggagtcaatatcaaacctgtggtcaaagttactgccgctggccagaccaaaaggacgaggatacacaaaggtaacagtcccttatttaatgagaccctgttttttaatttgttcgacagccctggggagctcttcgacgaacctatatttattacagtggtggatagtcggtctctacgtacagatgctttgctgggagaatttagaatggacgttggcacaatttaccgggagcctaggcatgcctacctcaggaaatggttattactgagcgaccctgatgacttctctgccggcgctaggggatatctcaaaaccagtctctgcgttctcggtccaggtgatgaagccccacttgaaagaaaagatccatccgaggataaagaggacattgagtctaacctcctccgaccaacaggcgtggccctccgcggggctcatttctgcctcaaggtttttcgggcggaggacttaccccagatggacgacgcagttatggacaacgtcaaacagatcttcggcttcgaatcaaacaaaaagaatctcgtggacccattcgtcgaagtgagctttgctgggaagatgctgtgcagcaagatcttagagaagaccgcaaacccacagtggaatcaaaacatcacccttccagcaatgtttccttcaatgtgtgaaaaaatgagaatcaggatcattgactgggatagactcacccacaacgatatcgtcgccactacatacctgagcatgtcaaaaatttccgcaccaggcggtgaaatcgaagaggagcctgccggcgccgtgaaaccgagcaaggcatcggacctggacgactatctgggctttctccctactttcggcccctgttacattaacctctacggttctccgcgggaatttacaggattccctgacccctatacggagctcaacacggggaagggcgaaggggtggcctatcggggacgtctgctactttcactggagacaaagctcgtcgaacacagcgaacaaaaagtggaagatcttccggctgacgatatcctgcgagtggaaaaatacctgcgccgccgaaagtattccttatttgcagccttctactcagccacaatgcttcaggacgtcgatgacgcaatacaattcgaggtaagcatcggcaattatggaaataagttcgacatgacttgcctgcccctcgcatcaaccacgcaatactcaagagctgtatttgacgggtgtcactattattatcttccgtggggaaacgtcaagcctgttgtcgtgctctcttcttattgggaggacatctcgcaccggatcgaaacacagaaccagctgcttggcatagcagataggctggaggctggcctagagcaggtccacctcgccttgaaggcccaatgctccacagaggatgtcgactcactcgtggcccagctgacggacgagctgatagccggatgttcacagccgttaggagacatccatgagactccttctgccactcatctagatcagtacctttaccagctcaggactcatcacctgtctcaaattaccgaagcggcactagccctgaagctaggacactctgagttgcccgcagctctggaacaggcagaggactggctgctgcgactccgcgctttagcggaggagccgcagaattctcttcccgacattgtcatctggatgctgcagggggacaagagagtggcctaccagcgggtgccagcgcaccaggtgctgttctcacgtcggggtgcaaactattgtggaaagaattgtggcaaactccagactatatttttgaaatacccgatggaaaaggttcctggggcccgcatgcctgtgcagattcgtgtgaaactttggtttggtttgtccgtggacgagaaagagtttaatcagttcgcagaaggaaagctcagtgtgttcgcagagacgtacgagaatgagacaaaacttgctctggtgggtaactggggaacaacaggactcacatacccaaagttcagtgatgtgacgggaaaaatcaagctccccaaagatagcttccgcccctccgctggctggacatgggctggagactggtttgtttgcccagagaagaccctcctgcacgatatggacgctggtcacttaagcttcgttgaggaggtgttcgaaaatcaaacgcgattgccaggggggcagtggatttacatgagcgataactacaccgacgtgaacggcgagaaggttttaccgaaggatgacatcgagtgcccccttggatggaagtgggaagatgaagagtggagtactgatctgaacagggctgtcgatgagcaaggttgggagtactccattactatccctccagagaggaagccaaaacactgggtgcctgctgaaaaaatgtattacacccatagaaggagaaggtgggtgagactgaggagacgggacctctcacaaatggaagccttgaaacgccatcgacaagccgaggccgaaggggaaggatgggaatacgcctccctattcggatggaagttccacctggagtacagaaagacggatgctttcaggcggagaaggtggcgcagacgaatggagcctttagaaaagactgggcctgcagctgtattcgctctggagggagcactcgggggtgtgatggatgacaagtctgaagacagcatgagcgtttccacgctttcctttggtgttaaccgtccaacaatctcttgcattttcgattatggtaaccggtaccatctcaggtgttatatgtatcaggccagggaccttgccgcaatggataaagacagcttctcggatccatatgctatcgttagcttcctccaccagagtcagaagaccgtggtcgtgaagaacaccttaaatccaacttgggaccaaactttaattttttacgaaatcgagatctttggggagcccgccacagtggccgagcagcctcctagtattgtggtcgaactgtacgatcacgacacctacggtgcagatgaatttatgggtagatgtatctgccagccctcactagagcgcatgcccagactggcttggttcccactgactcgaggatctcagccgagtggagaattactggccagcttcgagttgattcaaagggaaaaaccagccatacatcacatccccggctttgaggtgcaggagacatcacggatcctcgatgaaagtgaggacacagacctcccttaccctcccccacagcgcgaagccaatatctatatggtgccacagaacatcaagcccgctttgcagcgcacagccatcgaaatcctggcctggggactgcggaatatgaagagctatcaactggcaaacatctcaagccctagcctggtagttgaatgtggcgggcagaccgtgcaaagctgcgtgattcgaaacctgaggaagaaccccaatttcgatatttgcacacttttcatggaggttatgctgccaagggaagagctctactgcccacccatcacagtaaaggttattgacaaccgccagtttggaagacgcccagtggttggacagtgtacaattaggagcctggagtcctttctgtgtgatccttatagtgcagaatccccaagtccacaaggtggccccgatgatgtctcactgctgagtccaggtgaagacgtgctgatcgacatcgatgacaaggagcctctcatccccatccagcttgcagacgggctgagttctctggcccccactaataccgcaagcccgccctcatccccacacgaggaagaatttatcgactggtggagtaaattctttgctagcatcggagaaagggaaaagtgtgggagttacctggaaaaggatttcgatacgttgaaggtttatgacactcaattggagaatgtcgaggcattcgagggccttagcgatttctgcaacactttcaagctctaccgaggtaaaacacaggaagagacagaagatccctctgtcatcggcgaattcaaaggactgttcaagatttacccccttccagaagaccccgctatcccaatgcctcccagacagttccatcagctggccgcccaggggccacaggagtgcctcgtgcgtatttatattgtccgagcattcggattgcagccaaaagatcctaatggcaaatgcgacccctatattaaaatatcaatcggtaagaagtctgtgtccgaccaagacaactatatcccctgcactctggaaccggtttttggaaaaatgtttgagctgacatgtaccctacccctggaaaaggacttaaagatcacattgtatgactacgatctgctgtctaaggacgagaagataggggaaacggtggtagacctggagaacaggctgttgtctaaatttggcgcccgctgcggtctgccacagacgtattgtgtttccgggcctaatcaatggagagaccagttgagaccttcgcagctactccacttattctgtcaacagcaccgggtcaaggctccagtttaccgcaccgatcgggtaatgttccaggacaaggagtattcaatcgaagagatcgaagcaggaagaatcccaaacccccatctgggtccggttgaagagcgacttgccctgcacgtgcttcaacagcagggcttggtccctgaacatgttgaaagtaggccactctactcaccgctgcagcccgacattgaacagggaaagttgcaaatgtgggtggacttatttcccaaagcactcggtagacctggcccccccttcaacattactccacgacgagctagaaggtttttcttaagatgcattatttggaacacaagggacgtaattctggatgatctctcactcactggagaaaaaatgagcgacatctatgtgaaggggtggatgataggctttgaagagcataagcagaaaacggacgtccactataggagtctgggaggcgaaggtaattttaactggcggtttatctttccctttgactatcttcctgcagagcaggtgtgcaccattgcgaaaaaggatgcattttggcggttagataagaccgagtctaagatccccgctcgtgttgtgttccagatctgggataatgataagttcagcttcgacgacttccttggtagtctgcagcttgacctcaacaggatgccaaaacccgccaagacagccaaaaaatgctccctcgatcagctggacgacgcatttcaccccgaatggtttgttagtttgtttgagcaaaagaccgtgaaaggatggtggccctgcgtggccgaagagggagaaaagaagatccttgccgggaaactggagatgactctggaaatcgtggccgagagtgagcatgaagagcggccagcaggacagggaagggatgagccaaacatgaaccctaagctagaggatcccagaagaccagacacaagttttctgtggtttacctcgccctacaaaacaatgaaatttatattgtggcggcggtttcgctgggccatcatcttgttcatcatcctcttcatccttctgcttttcctggccatcttcatttatgcatttccaaactacgccgcaatgaaactcgtcaaacctttttcttag

SEQ ID NO: 49026 - DNA, 6309 bp, Artificial Sequence
  derived and/or modified sequence
atgctttgttgcctcctggtgagagcctcgaatctgcctagcgccaagaaagatcgtagaagtgacccagtggcctccctgacttttcggggcgtgaaaaagcgaaccaaagttatcaagaacagcgtcaacccagtgtggaacgaaggctttgagtgggacctcaagggcatccccctggatcagggctctgagctacatgtggttgttaaagaccatgagacgatgggcagaaacaggtttctaggagaagccaaggtccctctccgcgaagtcttagctactccttccctgagtgcctcttttaacgcccccctgctagatacaaaaaaacaacctacaggcgcatcactcgtcttgcaggtgagttacacaccactaccaggcgctgttcccctcttcccaccacccacacctctcgagccctccccaactctgcctgacctagatgttgtcgcggacaccggaggggaagaggataccgaagatcaaggtttgacaggagacgaagctgagcctttccttgaccaaagcggcggacctggggcacctacaacacccagaaagctgccttcccggcctccccctcattatccaggcatcaaacgaaagcgtagcgcacccacctcacgcaaacttttatctgacaagccccaggatttccagatacgggtgcaagtgattgagggaagacagctcccaggggtaaatatcaaaccagtagttaaagtgacagctgcaggccagaccaagcgcaccagaatccacaagggcaacagccccctgttcaatgaaacattgtttttcaacctcttcgatagtcctggcgaacttttcgatgaaccaatctttattacagtggtggatagcaggagtttgaggactgacgcgttgcttggtgagttccgaatggatgtggggactatttacagggaaccccggcatgcatatctgaggaaatggctgttactatctgatcctgatgatttctccgctggagcccgcggatatctgaaaacatctctttgcgtactcggaccaggtgacgaagctcccctcgaacggaaggatcccagcgaggacaaagaagacatcgagtccaaccttttacgccctactggagtggcacttcgcggcgcacatttctgtctgaaggtgtttcgagcagaagacttaccacaaatggacgatgccgtcatggacaatgtgaaacaaatttttggttttgagagcaacaaaaagaacctagttgatcccttcgttgaggtttctttcgccggcaagatgctttgttccaaaattctggagaagacagcaaatcctcagtggaatcagaatatcacccttcctgctatgttcccgtccatgtgtgaaaaaatgagaattcggatcattgactgggaccgactgacccacaatgatattgtcgccaccacctatctgtccatgagtaaaatatctgcgccaggaggagaaattgaggaagagcctgctggtgccgtgaaaccgagtaaggcctccgaccttgatgactaccttgggttccttcccacattcggaccctgttacataaacctctatggttctcctcgcgaattcactggattcccggacccttacaccgaacttaatacaggcaagggggagggcgtagcatatcggggtcgcctgctgctgtctctcgaaactaagctcgtggaacactctgaacaaaaagtcgaagacctccccgctgacgacatcctgagagtagagaaatatcttcgcagacgcaaatacagcttattcgcagccttctactcagcgacaatgctgcaggacgtggatgacgcgattcagttcgaagtgtccatcgggaattatggtaacaaatttgatatgacatgcctcccattggcatccaccacccaatattcaagagcagtctttgacggctgtcactactactacctgccgtggggcaacgttaaacccgtagtggtgctatccagctactgggaggacatttctcataggatcgaaacacagaaccagctattggggatcgccgacagactagaggccggactagaacaggtgcacctcgcccttaaagcccagtgctcgacagaagacgtggattctctagtggctcagctgaccgatgaactcattgctgggtgttcccaacctctcggcgacattcacgagaccccgtctgccacacacctcgaccagtatctctatcaactacgaacccaccatctctcacaaatcaccgaagctgcgttagcactgaaactgggtcattcagaactacctgctgccttggagcaagccgaggattggttattgagactcagggccctggcagaagagccccagaactccctgcccgatatcgttatttggatgttacaaggtgataaaagggtagcttatcaaagagtccctgcacaccaagttctctttagtagaaggggagcaaactattgcggaaaaaattgtggcaagctgcagaccattttcttgaaatatcccatggagaaagtacctggagcccggatgcccgttcagatcagagttaagctgtggttcggtctttccgtggacgaaaaagagtttaaccagttcgccgagggcaagttaagcgtgtttgctgagacttacgaaaacgagaccaagctggccttggttggaaactggggcacaactggactaacttaccccaaattcagcgatgtaaccgggaaaattaaactgcctaaagattctttcaggcccagcgctggttggacatgggcgggggattggttcgtctgcccagaaaagaccttgctacacgacatggatgccggccacctaagctttgtcgaggaggtgtttgaaaaccagaccagattacccggaggacagtggatttacatgagcgacaactatacagatgtgaacggagaaaaggtgttgccgaaagatgatattgagtgtccgcttgggtggaagtgggaagatgaagagtggtctaccgatcttaacagggctgtggacgaacaaggatgggagtattccataacgattccaccagagcgcaaacccaaacattgggtccccgctgaaaaaatgtattacacacaccgcagaagacgctgggtaaggctgagacgcagagacctaagtcagatggaggcacttaagagacataggcaggccgaggctgaaggcgaaggatgggagtacgcatctctgtttggatggaagtttcacctagaataccggaagactgatgcattcagacgtaggcggtggcgtcggaggatggagcctttagagaaaactggccccgccgcagtctttgcccttgaaggagccctagggggtgtcatggacgataaaagcgaggattcgatgtccgtatctacactgtccttcggagttaacagaccaaccataagttgcatcttcgattatgggaatagataccatcttagatgttatatgtatcaggcacgcgatctcgcagccatggacaaggactcattcagcgacccctacgcaatcgtgagctttttgcatcagtctcagaagaccgtcgtggtcaaaaacacactaaatcctacttgggatcaaacactgattttttacgagattgagattttcggcgagcctgctacagtggccgagcaacccccctcaatagtagttgaactttatgaccacgatacatatggtgctgacgagttcatggggaggtgcatctgccaaccatccctggagcgaatgccccgacttgcctggtttcctctgacacgaggctctcagccctccggagagttgctagctagctttgaactgatacagagagagaaacccgccattcaccatatccctggtttcgaagtccaagaaacgtctcgcatactcgacgagagcgaagacacagacctcccatacccgcctccccagagagaggccaacatctatatggtgccccaaaacataaaaccggccctccaacgcactgcaattgaaatactggcatggggtctgcgaaatatgaaatcgtaccagttggccaacatctcctctcctagtctggtcgttgaatgcgggggccaaacggtccagagctgcgtcatcagaaacctccgtaaaaaccctaattttgacatctgcacacttttcatggaggtgatgctgcctagagaagaactgtactgccctcctattacagtaaaggtaatcgacaaccgacagtttggacgacgcccagtggtcggacagtgcacaattcgctccctagaaagcttcttatgtgacccttacagcgccgagtcaccgtcaccacagggcggccctgatgacgtgtccctcttatcacccggcgaggatgtactaattgacatagatgacaaggagccacttatcccaatccagttagccgacgggttgtcgagtttagcacccactaatacagcttcacctcccagttcaccccacgaagaagagtttatcgattggtggagtaagttttttgcctcgatcggagaaagagaaaaatgcggctcttacctggagaaggatttcgataccctgaaggtatacgacacccagcttgagaacgtggaggccttcgaagggctgtctgatttctgcaatacatttaaactttaccgtgggaagacgcaagaagagaccgaggatccttctgttatcggcgaattcaaaggactgtttaaaatctatccactgccagaggaccctgctatcccgatgccacctcgtcagttccaccagttagctgctcaaggccctcaagaatgcttggtgcggatctacatcgtgcgagctttcggccttcagccaaaagaccctaatggcaaatgcgatccatacattaaaatcagcatcggtaaaaagtcagtttcagatcaggataattacataccatgcacactggagccggtctttgggaaaatgttcgaactcacctgtacacttccactggagaaggatctgaaaattacactctacgactacgatcttctgtcaaaagatgagaaaattggcgaaactgtcgtcgatcttgagaatagactgctgtcgaagtttggcgcaaggtgcggattgccacagacttattgcgtttccggacccaaccagtggcgggatcagctgagaccgagccagcttcttcacctattttgccagcagcatcgagtgaaggccccagtttatagaaccgatcgcgttatgttccaggataaggaatactctatcgaggaaatcgaagccggccggatcccaaaccctcatctggggcctgtagaagagagactcgctctgcatgtcctacagcagcagggactcgttccagaacacgtagaaagccgtcccctctacagtccacttcagccggatatcgagcagggcaagcttcagatgtgggtggatttattccccaaagccttggggcggcccggaccccctttcaacattacccctagacgggccagaaggttctttctcagatgtattatttggaacaccagagatgtgatactcgatgacctctctttaactggtgaaaaaatgagcgacatatatgttaagggatggatgattggattcgaggaacataaacaaaagacagacgttcactacaggtctctcggcggcgagggcaactttaattggagatttatatttcccttcgactaccttccagctgagcaggtttgtaccattgctaagaaagatgccttttggagactcgataaaactgaaagcaagattcctgcccgcgtagtctttcaaatatgggataatgataagttctcttttgacgacttcttaggatctctccagttggatctcaacagaatgccgaaaccagccaaaacagccaagaaatgttctctcgatcaactggatgacgcttttcacccagaatggttcgtgagtctgttcgagcagaagaccgtaaaaggttggtggccatgtgtggccgaggagggggaaaagaagatactcgccggcaaattagaaatgacattggaaatcgttgctgagagcgagcatgaggaacgccctgccggccagggccgcgatgagcctaatatgaaccccaaattggaggatcctagaagacccgacaccagctttctgtggttcaccagtccttacaaaactatgaagtttattttgtggagacgatttcgttgggccattatcctatttatcattcttttcatcctcttactgtttctggccatattcatctacgctttcccgaattatgcagctatgaaactcgtgaaacctttctcctag

SEQ ID NO: 49027 - RNA, 6309 nt, Artificial Sequence
  derived and/or modified sequence
auguuguguugucuuuuggucagagcaucaaaucugcccucagccaagaaggacaggcgcucugacccaguugccucucugaccuuucgcggugugaagaaacguacuaagguuaucaagaauucugugaacccuguguggaacgagggguuugaaugggauuuaaaaggcaucccacuggaccaagggagugaauugcacgugguagugaaagaccacgaaaccaugggaagaaaucgguuucugggggaggccaaggucccucugcgugaagugcucgcuacaccuagccuguccgcaucuuucaacgcaccuuuauuagacacaaagaagcaaccuacaggugcuucccugguucugcagguguccuauacuccacugccuggcgcggugccucuguucccuccaccaacgccacuagaacccuccccaacucugccugaccucgacgucguggcagacaccggaggcgaagaagacaccgaagaucagggccugacuggcgaugaggccgagccuuuucuggaucaaagcggcggucccggagcccccaccaccccgagaaagcucccuucuagacccccaccucauuauccuggaauaaagcggaagcgaucugcgccaacaucuaggaagcuacugagugacaaaccccaggauuuccaaauucgugugcaggugauugagggacgacagcugccuggagucaauaucaaaccuguggucaaaguuacugccgcuggccagaccaaaaggacgaggauacacaaagguaacagucccuuauuuaaugagacccuguuuuuuaauuuguucgacagcccuggggagcucuucgacgaaccuauauuuauuacagugguggauagucggucucuacguacagaugcuuugcugggagaauuuagaauggacguuggcacaauuuaccgggagccuaggcaugccuaccucaggaaaugguuauuacugagcgacccugaugacuucucugccggcgcuaggggauaucucaaaaccagucucugcguucucgguccaggugaugaagccccacuugaaagaaaagauccauccgaggauaaagaggacauugagucuaaccuccuccgaccaacaggcguggcccuccgcggggcucauuucugccucaagguuuuucgggcggaggacuuaccccagauggacgacgcaguuauggacaacgucaaacagaucuucggcuucgaaucaaacaaaaagaaucucguggacccauucgucgaagugagcuuugcugggaagaugcugugcagcaagaucuuagagaagaccgcaaacccacaguggaaucaaaacaucacccuuccagcaauguuuccuucaaugugugaaaaaaugagaaucaggaucauugacugggauagacucacccacaacgauaucgucgccacuacauaccugagcaugucaaaaauuuccgcaccaggcggugaaaucgaagaggagccugccggcgccgugaaaccgagcaaggcaucggaccuggacgacuaucugggcuuucucccuacuuucggccccuguuacauuaaccucuacgguucuccgcgggaauuuacaggauucccugaccccuauacggagcucaacacggggaagggcgaagggguggccuaucggggacgucugcuacuuucacuggagacaaagcucgucgaacacagcgaacaaaaaguggaagaucuuccggcugacgauauccugcgaguggaaaaauaccugcgccgccgaaaguauuccuuauuugcagccuucuacucagccacaaugcuucaggacgucgaugacgcaauacaauucgagguaagcaucggcaauuauggaaauaaguucgacaugacuugccugccccucgcaucaaccacgcaauacucaagagcuguauuugacgggugucacuauuauuaucuuccguggggaaacgucaagccuguugucgugcucucuucuuauugggaggacaucucgcaccggaucgaaacacagaaccagcugcuuggcauagcagauaggcuggaggcuggccuagagcagguccaccucgccuugaaggcccaaugcuccacagaggaugucgacucacucguggcccagcugacggacgagcugauagccggauguucacagccguuaggagacauccaugagacuccuucugccacucaucuagaucaguaccuuuaccagcucaggacucaucaccugucucaaauuaccgaagcggcacuagcccugaagcuaggacacucugaguugcccgcagcucuggaacaggcagaggacuggcugcugcgacuccgcgcuuuagcggaggagccgcagaauucucuucccgacauugucaucuggaugcugcagggggacaagagaguggccuaccagcgggugccagcgcaccaggugcuguucucacgucggggugcaaacuauuguggaaagaauuguggcaaacuccagacuauauuuuugaaauacccgauggaaaagguuccuggggcccgcaugccugugcagauucgugugaaacuuugguuugguuuguccguggacgagaaagaguuuaaucaguucgcagaaggaaagcucaguguguucgcagagacguacgagaaugagacaaaacuugcucugguggguaacuggggaacaacaggacucacauacccaaaguucagugaugugacgggaaaaaucaagcuccccaaagauagcuuccgccccuccgcuggcuggacaugggcuggagacugguuuguuugcccagagaagacccuccugcacgauauggacgcuggucacuuaagcuucguugaggagguguucgaaaaucaaacgcgauugccaggggggcaguggauuuacaugagcgauaacuacaccgacgugaacggcgagaagguuuuaccgaaggaugacaucgagugcccccuuggauggaagugggaagaugaagaguggaguacugaucugaacagggcugucgaugagcaagguugggaguacuccauuacuaucccuccagagaggaagccaaaacacugggugccugcugaaaaaauguauuacacccauagaaggagaaggugggugagacugaggagacgggaccucucacaaauggaagccuugaaacgccaucgacaagccgaggccgaaggggaaggaugggaauacgccucccuauucggauggaaguuccaccuggaguacagaaagacggaugcuuucaggcggagaagguggcgcagacgaauggagccuuuagaaaagacugggccugcagcuguauucgcucuggagggagcacucgggggugugauggaugacaagucugaagacagcaugagcguuuccacgcuuuccuuugguguuaaccguccaacaaucucuugcauuuucgauuaugguaaccgguaccaucucagguguuauauguaucaggccagggaccuugccgcaauggauaaagacagcuucucggauccauaugcuaucguuagcuuccuccaccagagucagaagaccguggucgugaagaacaccuuaaauccaacuugggaccaaacuuuaauuuuuuacgaaaucgagaucuuuggggagcccgccacaguggccgagcagccuccuaguauuguggucgaacuguacgaucacgacaccuacggugcagaugaauuuauggguagauguaucugccagcccucacuagagcgcaugcccagacuggcuugguucccacugacucgaggaucucagccgaguggagaauuacuggccagcuucgaguugauucaaagggaaaaaccagccauacaucacauccccggcuuugaggugcaggagacaucacggauccucgaugaaagugaggacacagaccucccuuacccucccccacagcgcgaagccaauaucuauauggugccacagaacaucaagcccgcuuugcagcgcacagccaucgaaauccuggccuggggacugcggaauaugaagagcuaucaacuggcaaacaucucaagcccuagccugguaguugaauguggcgggcagaccgugcaaagcugcgugauucgaaaccugaggaagaaccccaauuucgauauuugcacacuuuucauggagguuaugcugccaagggaagagcucuacugcccacccaucacaguaaagguuauugacaaccgccaguuuggaagacgcccagugguuggacaguguacaauuaggagccuggaguccuuucugugugauccuuauagugcagaauccccaaguccacaagguggccccgaugaugucucacugcugaguccaggugaagacgugcugaucgacaucgaugacaaggagccucucauccccauccagcuugcagacgggcugaguucucuggcccccacuaauaccgcaagcccgcccucauccccacacgaggaagaauuuaucgacugguggaguaaauucuuugcuagcaucggagaaagggaaaagugugggaguuaccuggaaaaggauuucgauacguugaagguuuaugacacucaauuggagaaugucgaggcauucgagggccuuagcgauuucugcaacacuuucaagcucuaccgagguaaaacacaggaagagacagaagaucccucugucaucggcgaauucaaaggacuguucaagauuuacccccuuccagaagaccccgcuaucccaaugccucccagacaguuccaucagcuggccgcccaggggccacaggagugccucgugcguauuuauauuguccgagcauucggauugcagccaaaagauccuaauggcaaaugcgaccccuauauuaaaauaucaaucgguaagaagucuguguccgaccaagacaacuauauccccugcacucuggaaccgguuuuuggaaaaauguuugagcugacauguacccuaccccuggaaaaggacuuaaagaucacauuguaugacuacgaucugcugucuaaggacgagaagauaggggaaacggugguagaccuggagaacaggcuguugucuaaauuuggcgcccgcugcggucugccacagacguauuguguuuccgggccuaaucaauggagagaccaguugagaccuucgcagcuacuccacuuauucugucaacagcaccgggucaaggcuccaguuuaccgcaccgaucggguaauguuccaggacaaggaguauucaaucgaagagaucgaagcaggaagaaucccaaacccccaucuggguccgguugaagagcgacuugcccugcacgugcuucaacagcagggcuuggucccugaacauguugaaaguaggccacucuacucaccgcugcagcccgacauugaacagggaaaguugcaaauguggguggacuuauuucccaaagcacucgguagaccuggcccccccuucaacauuacuccacgacgagcuagaagguuuuucuuaagaugcauuauuuggaacacaagggacguaauucuggaugaucucucacucacuggagaaaaaaugagcgacaucuaugugaagggguggaugauaggcuuugaagagcauaagcagaaaacggacguccacuauaggagucugggaggcgaagguaauuuuaacuggcgguuuaucuuucccuuugacuaucuuccugcagagcaggugugcaccauugcgaaaaaggaugcauuuuggcgguuagauaagaccgagucuaagauccccgcucguguuguguuccagaucugggauaaugauaaguucagcuucgacgacuuccuugguagucugcagcuugaccucaacaggaugccaaaacccgccaagacagccaaaaaaugcucccucgaucagcuggacgacgcauuucaccccgaaugguuuguuaguuuguuugagcaaaagaccgugaaaggaugguggcccugcguggccgaagagggagaaaagaagauccuugccgggaaacuggagaugacucuggaaaucguggccgagagugagcaugaagagcggccagcaggacagggaagggaugagccaaacaugaacccuaagcuagaggaucccagaagaccagacacaaguuuucugugguuuaccucgcccuacaaaacaaugaaauuuauauuguggcggcgguuucgcugggccaucaucuuguucaucauccucuucauccuucugcuuuuccuggccaucuucauuuaugcauuuccaaacuacgccgcaaugaaacucgucaaaccuuuuucuuag

SEQ ID NO: 49028 - RNA, 6309 nt, Artificial Sequence
  derived and/or modified sequence
augcuuuguugccuccuggugagagccucgaaucugccuagcgccaagaaagaucguagaagugacccaguggccucccugacuuuucggggcgugaaaaagcgaaccaaaguuaucaagaacagcgucaacccaguguggaacgaaggcuuugagugggaccucaagggcaucccccuggaucagggcucugagcuacaugugguuguuaaagaccaugagacgaugggcagaaacagguuucuaggagaagccaaggucccucuccgcgaagucuuagcuacuccuucccugagugccucuuuuaacgccccccugcuagauacaaaaaaacaaccuacaggcgcaucacucgucuugcaggugaguuacacaccacuaccaggcgcuguuccccucuucccaccacccacaccucucgagcccuccccaacucugccugaccuagauguugucgcggacaccggaggggaagaggauaccgaagaucaagguuugacaggagacgaagcugagccuuuccuugaccaaagcggcggaccuggggcaccuacaacacccagaaagcugccuucccggccucccccucauuauccaggcaucaaacgaaagcguagcgcacccaccucacgcaaacuuuuaucugacaagccccaggauuuccagauacgggugcaagugauugagggaagacagcucccagggguaaauaucaaaccaguaguuaaagugacagcugcaggccagaccaagcgcaccagaauccacaagggcaacagcccccuguucaaugaaacauuguuuuucaaccucuucgauaguccuggcgaacuuuucgaugaaccaaucuuuauuacagugguggauagcaggaguuugaggacugacgcguugcuuggugaguuccgaauggauguggggacuauuuacagggaaccccggcaugcauaucugaggaaauggcuguuacuaucugauccugaugauuucuccgcuggagcccgcggauaucugaaaacaucucuuugcguacucggaccaggugacgaagcuccccucgaacggaaggaucccagcgaggacaaagaagacaucgaguccaaccuuuuacgcccuacuggaguggcacuucgcggcgcacauuucugucugaagguguuucgagcagaagacuuaccacaaauggacgaugccgucauggacaaugugaaacaaauuuuugguuuugagagcaacaaaaagaaccuaguugaucccuucguugagguuucuuucgccggcaagaugcuuuguuccaaaauucuggagaagacagcaaauccucaguggaaucagaauaucacccuuccugcuauguucccguccaugugugaaaaaaugagaauucggaucauugacugggaccgacugacccacaaugauauugucgccaccaccuaucuguccaugaguaaaauaucugcgccaggaggagaaauugaggaagagccugcuggugccgugaaaccgaguaaggccuccgaccuugaugacuaccuuggguuccuucccacauucggacccuguuacauaaaccucuaugguucuccucgcgaauucacuggauucccggacccuuacaccgaacuuaauacaggcaagggggagggcguagcauaucggggucgccugcugcugucucucgaaacuaagcucguggaacacucugaacaaaaagucgaagaccuccccgcugacgacauccugagaguagagaaauaucuucgcagacgcaaauacagcuuauucgcagccuucuacucagcgacaaugcugcaggacguggaugacgcgauucaguucgaaguguccaucgggaauuaugguaacaaauuugauaugacaugccucccauuggcauccaccacccaauauucaagagcagucuuugacggcugucacuacuacuaccugccguggggcaacguuaaacccguaguggugcuauccagcuacugggaggacauuucucauaggaucgaaacacagaaccagcuauuggggaucgccgacagacuagaggccggacuagaacaggugcaccucgcccuuaaagcccagugcucgacagaagacguggauucucuaguggcucagcugaccgaugaacucauugcuggguguucccaaccucucggcgacauucacgagaccccgucugccacacaccucgaccaguaucucuaucaacuacgaacccaccaucucucacaaaucaccgaagcugcguuagcacugaaacugggucauucagaacuaccugcugccuuggagcaagccgaggauugguuauugagacucagggcccuggcagaagagccccagaacucccugcccgauaucguuauuuggauguuacaaggugauaaaaggguagcuuaucaaagagucccugcacaccaaguucucuuuaguagaaggggagcaaacuauugcggaaaaaauuguggcaagcugcagaccauuuucuugaaauaucccauggagaaaguaccuggagcccggaugcccguucagaucagaguuaagcugugguucggucuuuccguggacgaaaaagaguuuaaccaguucgccgagggcaaguuaagcguguuugcugagacuuacgaaaacgagaccaagcuggccuugguuggaaacuggggcacaacuggacuaacuuaccccaaauucagcgauguaaccgggaaaauuaaacugccuaaagauucuuucaggcccagcgcugguuggacaugggcgggggauugguucgucugcccagaaaagaccuugcuacacgacauggaugccggccaccuaagcuuugucgaggagguguuugaaaaccagaccagauuacccggaggacaguggauuuacaugagcgacaacuauacagaugugaacggagaaaagguguugccgaaagaugauauugaguguccgcuuggguggaagugggaagaugaagaguggucuaccgaucuuaacagggcuguggacgaacaaggaugggaguauuccauaacgauuccaccagagcgcaaacccaaacauuggguccccgcugaaaaaauguauuacacacaccgcagaagacgcuggguaaggcugagacgcagagaccuaagucagauggaggcacuuaagagacauaggcaggccgaggcugaaggcgaaggaugggaguacgcaucucuguuuggauggaaguuucaccuagaauaccggaagacugaugcauucagacguaggcgguggcgucggaggauggagccuuuagagaaaacuggccccgccgcagucuuugcccuugaaggagcccuagggggugucauggacgauaaaagcgaggauucgauguccguaucuacacuguccuucggaguuaacagaccaaccauaaguugcaucuucgauuaugggaauagauaccaucuuagauguuauauguaucaggcacgcgaucucgcagccauggacaaggacucauucagcgaccccuacgcaaucgugagcuuuuugcaucagucucagaagaccgucguggucaaaaacacacuaaauccuacuugggaucaaacacugauuuuuuacgagauugagauuuucggcgagccugcuacaguggccgagcaaccccccucaauaguaguugaacuuuaugaccacgauacauauggugcugacgaguucauggggaggugcaucugccaaccaucccuggagcgaaugccccgacuugccugguuuccucugacacgaggcucucagcccuccggagaguugcuagcuagcuuugaacugauacagagagagaaacccgccauucaccauaucccugguuucgaaguccaagaaacgucucgcauacucgacgagagcgaagacacagaccucccauacccgccuccccagagagaggccaacaucuauauggugccccaaaacauaaaaccggcccuccaacgcacugcaauugaaauacuggcauggggucugcgaaauaugaaaucguaccaguuggccaacaucuccucuccuagucuggucguugaaugcgggggccaaacgguccagagcugcgucaucagaaaccuccguaaaaacccuaauuuugacaucugcacacuuuucauggaggugaugcugccuagagaagaacuguacugcccuccuauuacaguaaagguaaucgacaaccgacaguuuggacgacgcccaguggucggacagugcacaauucgcucccuagaaagcuucuuaugugacccuuacagcgccgagucaccgucaccacagggcggcccugaugacgugucccucuuaucacccggcgaggauguacuaauugacauagaugacaaggagccacuuaucccaauccaguuagccgacggguugucgaguuuagcacccacuaauacagcuucaccucccaguucaccccacgaagaagaguuuaucgauugguggaguaaguuuuuugccucgaucggagaaagagaaaaaugcggcucuuaccuggagaaggauuucgauacccugaagguauacgacacccagcuugagaacguggaggccuucgaagggcugucugauuucugcaauacauuuaaacuuuaccgugggaagacgcaagaagagaccgaggauccuucuguuaucggcgaauucaaaggacuguuuaaaaucuauccacugccagaggacccugcuaucccgaugccaccucgucaguuccaccaguuagcugcucaaggcccucaagaaugcuuggugcggaucuacaucgugcgagcuuucggccuucagccaaaagacccuaauggcaaaugcgauccauacauuaaaaucagcaucgguaaaaagucaguuucagaucaggauaauuacauaccaugcacacuggagccggucuuugggaaaauguucgaacucaccuguacacuuccacuggagaaggaucugaaaauuacacucuacgacuacgaucuucugucaaaagaugagaaaauuggcgaaacugucgucgaucuugagaauagacugcugucgaaguuuggcgcaaggugcggauugccacagacuuauugcguuuccggacccaaccaguggcgggaucagcugagaccgagccagcuucuucaccuauuuugccagcagcaucgagugaaggccccaguuuauagaaccgaucgcguuauguuccaggauaaggaauacucuaucgaggaaaucgaagccggccggaucccaaacccucaucuggggccuguagaagagagacucgcucugcauguccuacagcagcagggacucguuccagaacacguagaaagccguccccucuacaguccacuucagccggauaucgagcagggcaagcuucagauguggguggauuuauuccccaaagccuuggggcggcccggacccccuuucaacauuaccccuagacgggccagaagguucuuucucagauguauuauuuggaacaccagagaugugauacucgaugaccucucuuuaacuggugaaaaaaugagcgacauauauguuaagggauggaugauuggauucgaggaacauaaacaaaagacagacguucacuacaggucucucggcggcgagggcaacuuuaauuggagauuuauauuucccuucgacuaccuuccagcugagcagguuuguaccauugcuaagaaagaugccuuuuggagacucgauaaaacugaaagcaagauuccugcccgcguagucuuucaaauaugggauaaugauaaguucucuuuugacgacuucuuaggaucucuccaguuggaucucaacagaaugccgaaaccagccaaaacagccaagaaauguucucucgaucaacuggaugacgcuuuucacccagaaugguucgugagucuguucgagcagaagaccguaaaagguugguggccauguguggccgaggagggggaaaagaagauacucgccggcaaauuagaaaugacauuggaaaucguugcugagagcgagcaugaggaacgcccugccggccagggccgcgaugagccuaauaugaaccccaaauuggaggauccuagaagacccgacaccagcuuucugugguucaccaguccuuacaaaacuaugaaguuuauuuuguggagacgauuucguugggccauuauccuauuuaucauucuuuucauccucuuacuguuucuggccauauucaucuacgcuuucccgaauuaugcagcuaugaaacucgugaaaccuuucuccuag

SEQ ID NO: 49029 - protein, 2088 aa, Artificial Sequence
  derived and/or modified sequence
MLCCLLVRASNLPSAKKDRRSDPVASLTFRGVKKRTKVIKNSVNPVWNEGFEWDLKGIPLDQGSELHVVVKDHETMGRNRFLGEAKVPLREVLATPSLSASFNAPLLDTKKQPTGASLVLQVSYTPLPGAVPLFPPPTPLEPSPTLPDLDVVADTGGEEDTEDQGLTGDEAEPFLDQSGGPGAPTTPRKLPSRPPPHYPGIKRKRSAPTSRKLLSDKPQDFQIRVQVIEGRQLPGVNIKPVVKVTAAGQTKRTRIHKGNSPLFNETLFFNLFDSPGELFDEPIFITVVDSRSLRTDALLGEFRMDVGTIYREPRHAYLRKWLLLSDPDDFSAGARGYLKTSLCVLGPGDEAPLERKDPSEDKEDIESNLLRPTGVALRGAHFCLKVFRAEDLPQMDDAVMDNVKQIFGFESNKKNLVDPFVEVSFAGKMLCSKILEKTANPQWNQNITLPAMFPSMCEKMRIRIIDWDRLTHNDIVATTYLSMSKISAPGGEIEVDDYLGFLPTFGPCYINLYGSPREFTGFPDPYTELNTGKGEGVAYRGRLLLSLETKLVEHSEQKVEDLPADDILRVEKYLRRRKYSLFAAFYSATMLQDVDDAIQFEVSIGNYGNKFDMTCLPLASTTQYSRAVFDGCHYYYLPWGNVKPVVVLSSYWEDISHRIETQNQLLGIADRLEAGLEQVHLALKAQCSTEDVDSLVAQLTDELIAGCSQPLGDIHETPSATHLDQYLYQLRTHHLSQITEAALALKLGHSELPAALEQAEDWLLRLRALAEEPQNSLPDIVIWMLQGDKRVAYQRVPAHQVLFSRRGANYCGKNCGKLQTIFLKYPMEKVPGARMPVQIRVKLWFGLSVDEKEFNQFAEGKLSVFAETYENETKLALVGNWGTTGLTYPKFSDVTGKIKLPKDSFRPSAGWTWAGDWFVCPEKTLLHDMDAGHLSFVEEVFENQTRLPGGQWIYMSDNYTDVNGEKVLPKDDIECPLGWKWEDEEWSTDLNRAVDEQGWEYSITIPPERKPKHWVPAEKMYYTHRRRRWVRLRRRDLSQMEALKRHRQAEAEGEGWEYASLFGWKFHLEYRKTDAFRRRRWRRRMEPLEKTGPAAVFALEGALGGVMDDKSEDSMSVSTLSFGVNRPTISCIFDYGNRYHLRCYMYQARDLAAMDKDSFSDPYAIVSFLHQSQKTVVVKNTLNPTWDQTLIFYEIEIFGEPATVAEQPPSIVVELYDHDTYGADEFMGRCICQPSLERMPRLAWFPLTRGSQPSGELLASFELIQREKPAIHHIPGFEVQETSRILDESEDTDLPYPPPQREANIYMVPQNIKPALQRTAIEILAWGLRNMKSYQLANISSPSLVVECGGQTVQSCVIRNLRKNPNFDICTLFMEVMLPREELYCPPITVKVIDNRQFGRRPVVGQCTIRSLESFLCDPYSAESPSPQGGPDDVSLLSPGEDVLIDIDDKEPLIPIQLADGLSSLAPTNTASPPSSPHEEEFIDWWSKFFASIGEREKCGSYLEKDFDTLKVYDTQLENVEAFEGLSDFCNTFKLYRGKTQEETEDPSVIGEFKGLFKIYPLPEDPAIPMPPRQFHQLAAQGPQECLVRIYIVRAFGLQPKDPNGKCDPYIKISIGKKSVSDQDNYIPCTLEPVFGKMFELTCTLPLEKDLKITLYDYDLLSKDEKIGETVVDLENRLLSKFGARCGLPQTYCVSGPNQWRDQLRPSQLLHLFCQQHRVKAPVYRTDRVMFQDKEYSIEEIEAGRIPNPHLGPVEERLALHVLQQQGLVPEHVESRPLYSPLQPDIEQGKLQMWVDLFPKALGRPGPPFNITPRRARRFFLRCIIWNTRDVILDDLSLTGEKMSDIYVKGWMIGFEEHKQKTDVHYRSLGGEGNFNWRFIFPFDYLPAEQVCTIAKKDAFWRLDKTESKIPARVVFQIWDNDKFSFDDFLGSLQLDLNRMPKPAKTAKKCSLDQLDDAFHPEWFVSLFEQKTVKGWWPCVAEEGEKKILAGKLEMTLEIVAESEHEERPAGQGRDEPNMNPKLEDPRRPDTSFLWFTSPYKTMKFILWRRFRWAIILFIILFILLLFLAIFIYAFPNYAAMKLVKPFS

SEQ ID NO: 49030 - DNA, 6679 bp, Artificial Sequence
  derived and/or modified sequence
tctccgcggaggagcagcgaaggcgacagctctcttggcgcggctgcctgggagccgggcgcttgctgggtgggtgctcgggcccggtgctcccgctcccgccctgactgcgcgcctgtgtgccgccggggctgcccagccatgctgtgctgcctgctggtgagggccagcaacctccccagtgcgaagaaggaccggcgcagcgaccctgtcgcaagcctgactttccgaggggtgaagaagagaaccaaagtcatcaagaacagcgtgaaccctgtatggaatgagggatttgaatgggacctcaagggcatccccctggaccagggctctgagcttcatgtggtggtcaaagaccatgagacgatggggaggaacaggttcctgggggaagccaaggtcccactccgagaggtcctcgccacccctagtctgtccgccagcttcaatgcccccctgctggacaccaagaagcagcccacaggggcctcgctggtcctgcaggtgtcctacacaccgctgcctggagctgtgcccctgttcccgccccctactcctctggagccctccccgactctgcctgacctggatgtagtggcagacacaggaggagaggaagacacagaggaccagggactcactggagatgaggcggagccattcctggatcaaagcggaggcccgggggctcccaccaccccaaggaaactaccttcacgtcctccgccccactaccccgggatcaaaagaaagcgaagtgcgcctacatctagaaagctgctgtcagacaaaccgcaggatttccagatcagggtccaggtgatcgaggggcgccagctgccgggggtgaacatcaagcctgtggtcaaggttaccgctgcagggcagaccaagcggacgcggatccacaagggaaacagcccactcttcaatgagactcttttcttcaacttgtttgactctcctggggagctgtttgatgagcccatctttatcacggtggtagactctcgttctctcaggacagatgctctcctcggggagttccggatggacgtgggcaccatttacagagagccccggcacgcctatctcaggaagtggctgctgctctcagaccctgatgacttctctgctggggccagaggctacctgaaaacaagcctttgtgtgctggggcctggggacgaagcgcctctggagagaaaagacccctctgaagacaaggaggacattgaaagcaacctgctccggcccacaggcgtagccctgcgaggagcccacttctgcctgaaggtcttccgggccgaggacttgccgcagatggacgatgccgtgatggacaacgtgaaacagatctttggcttcgagagtaacaagaagaacttggtggacccctttgtggaggtcagctttgcggggaaaatgctgtgcagcaagatcttggagaagacggccaaccctcagtggaaccagaacatcacactgcctgccatgtttccctccatgtgcgaaaaaatgaggattcgtatcatagactgggaccgcctgactcacaatgacatcgtggctaccacctacctgagtatgtcgaaaatctctgcccctggaggagaaatagaagtggatgactacctgggcttcctccccacttttgggccctgctacatcaacctctatggcagtcccagagagttcacaggcttcccagacccctacacagagctcaacacaggcaagggggaaggtgtggcttatcgtggccggcttctgctctccctggagaccaagctggtggagcacagtgaacagaaggtggaggaccttcctgcggatgacatcctccgggtggagaagtaccttaggaggcgcaagtactccctgtttgcggccttctactcagccaccatgctgcaggatgtggatgatgccatccagtttgaggtcagcatcgggaactacgggaacaagttcgacatgacctgcctgccgctggcctccaccactcagtacagccgtgcagtctttgacgggtgccactactactacctaccctggggtaacgtgaaacctgtggtggtgctgtcatcctactgggaggacatcagccatagaatcgagactcagaaccagctgcttgggattgctgaccggctggaagctggcctggagcaggtccacctggccctgaaggcgcagtgctccacggaggacgtggactcgctggtggctcagctgacggatgagctcatcgcaggctgcagccagcctctgggtgacatccatgagacaccctctgccacccacctggaccagtacctgtaccagctgcgcacccatcacctgagccaaatcactgaggctgccctggccctgaagctcggccacagtgagctccctgcagctctggagcaggcggaggactggctcctgcgtctgcgtgccctggcagaggagccccagaacagcctgccggacatcgtcatctggatgctgcagggagacaagcgtgtggcataccagcgggtgcccgcccaccaagtcctcttctcccggcggggtgccaactactgtggcaagaattgtgggaagctacagacaatctttctgaaatatccgatggagaaggtgcctggcgcccggatgccagtgcagatacgggtcaagctgtggtttgggctctcagtggatgagaaggagttcaaccagtttgctgaggggaagctgtctgtctttgctgaaacctatgagaacgagactaagttggcccttgttgggaactggggcacaacgggcctcacctaccccaagttttctgacgtcacgggcaagatcaagctacccaaggacagcttccgcccctcggccggctggacctgggctggagattggttcgtgtgtccggagaagactctgctccatgacatggacgccggtcacctgagcttcgtggaagaggtgtttgagaaccagacccggcttcccggaggccagtggatctacatgagtgacaactacaccgatgtgaacggggagaaggtgcttcccaaggatgacattgagtgcccactgggctggaagtgggaagatgaggaatggtccacagacctcaaccgggctgtcgatgagcaaggctgggagtatagcatcaccatccccccggagcggaagccgaagcactgggtccctgctgagaagatgtactacacacaccgacggcggcgctgggtgcgcctgcgcaggagggatctcagccaaatggaagcactgaaaaggcacaggcaggcggaggcggagggcgagggctgggagtacgcctctctttttggctggaagttccacctcgagtaccgcaagacagatgccttccgccgccgccgctggcgccgtcgcatggagccactggagaagacggggcctgcagctgtgtttgcccttgagggggccctgggcggcgtgatggatgacaagagtgaagattccatgtccgtctccaccttgagcttcggtgtgaacagacccacgatttcctgcatattcgactatgggaaccgctaccatctacgctgctacatgtaccaggcccgggacctggctgcgatggacaaggactctttttctgatccctatgccatcgtctccttcctgcaccagagccagaagacggtggtggtgaagaacacccttaaccccacctgggaccagacgctcatcttctacgagatcgagatctttggcgagccggccacagttgctgagcaaccgcccagcattgtggtggagctgtacgaccatgacacttatggtgcagacgagtttatgggtcgctgcatctgtcaaccgagtctggaacggatgccacggctggcctggttcccactgacgaggggcagccagccgtcgggggagctgctggcctcttttgagctcatccagagagagaagccggccatccaccatattcctggttttgaggtgcaggagacatcaaggatcctggatgagtctgaggacacagacctgccctacccaccaccccagagggaggccaacatctacatggttcctcagaacatcaagccagcgctccagcgtaccgccatcgagatcctggcatggggcctgcggaacatgaagagttaccagctggccaacatctcctcccccagcctcgtggtagagtgtgggggccagacggtgcagtcctgtgtcatcaggaacctccggaagaaccccaactttgacatctgcaccctcttcatggaagtgatgctgcccagggaggagctctactgcccccccatcaccgtcaaggtcatcgataaccgccagtttggccgccggcctgtggtgggccagtgtaccatccgctccctggagagcttcctgtgtgacccctactcggcggagagtccatccccacagggtggcccagacgatgtgagcctactcagtcctggggaagacgtgctcatcgacattgatgacaaggagcccctcatccccatccagcttgcagacggtctgtcgagcttggcccccactaacacggcttctcctccatccagtcctcatgaggaagagttcatcgattggtggagcaaattctttgcctccataggggagagggaaaagtgcggctcctacctggagaaggattttgacaccctgaaggtctatgacacacagctggagaatgtggaggcctttgagggcctgtctgacttttgtaacaccttcaagctgtaccggggcaagacgcaggaggagacagaagatccatctgtgattggtgaatttaagggcctcttcaaaatttatcccctcccagaagacccagccatccccatgcccccaagacagttccaccagctggccgcccagggaccccaggagtgcttggtccgtatctacattgtccgagcatttggcctgcagcccaaggaccccaatggaaagtgtgatccttacatcaagatctccatagggaagaaatcagtgagtgaccaggataactacatcccctgcacgctggagcccgtatttggaaagatgttcgagctgacctgcactctgcctctggagaaggacctaaagatcactctctatgactatgacctcctctccaaggacgaaaagatcggtgagacggtcgtcgacctggagaacaggctgctgtccaagtttggggctcgctgtggactcccacagacctactgtgtctctggaccgaaccagtggcgggaccagctccgcccctcccagctcctccacctcttctgccagcagcatagagtcaaggcacctgtgtaccggacagaccgtgtaatgtttcaggataaagaatattccattgaagagatagaggctggcaggatcccaaacccacacctgggcccagtggaggagcgtctggctctgcatgtgcttcagcagcagggcctggtcccggagcacgtggagtcacggcccctctacagccccctgcagccagacatcgagcaggggaagctgcagatgtgggtcgacctatttccgaaggccctggggcggcctggacctcccttcaacatcaccccacggagagccagaaggtttttcctgcgttgtattatctggaataccagagatgtgatcctggatgacctgagcctcacgggggagaagatgagcgacatttatgtgaaaggttggatgattggctttgaagaacacaagcaaaagacagacgtgcattatcgttccctgggaggtgaaggcaacttcaactggaggttcattttccccttcgactacctgccagctgagcaagtctgtaccattgccaagaaggatgccttctggaggctggacaagactgagagcaaaatcccagcacgagtggtgttccagatctgggacaatgacaagttctcctttgatgattttctgggctccctgcagctcgatctcaaccgcatgcccaagccagccaagacagccaagaagtgctccttggaccagctggatgatgctttccacccagaatggtttgtgtccctttttgagcagaaaacagtgaagggctggtggccctgtgtagcagaagagggtgagaagaaaatactggcgggcaagctggaaatgaccttggagattgtagcagagagtgagcatgaggagcggcctgctggccagggccgggatgagcccaacatgaaccctaagcttgaggacccaaggcgccccgacacctccttcctgtggtttacctccccatacaagaccatgaagttcatcctgtggcggcgtttccggtgggccatcatcctcttcatcatcctcttcatcctgctgctgttcctggccatcttcatctacgccttcccgaactatgctgccatgaagctggtgaagcccttcagctgaggactctcctgccctgtagaaggggccgtggggtcccctccagcatgggactggcctgcctcctccgcccagctcggcgagctcctccagacctcctaggcctgattgtcctgccagggtgggcagacagacagatggaccggcccacactcccagagttgctaacatggagctctgagatcaccccacttccatcatttccttctcccccaacccaacgcttttttggatcagctcagacatatttcagtataaaacagttggaaccaca

SEQ ID NO: 49031 - DNA, 6264 bp, Artificial Sequence
  derived and/or modified sequence
atgctgtgctgcctgctggtgcgcgccagcaacctgcccagcgccaagaaggaccgccgcagcgaccccgtggccagcctgaccttccgcggcgtgaagaagcgcaccaaggtgatcaagaacagcgtgaaccccgtgtggaacgagggcttcgagtgggacctgaagggcatccccctggaccagggcagcgagctgcacgtggtggtgaaggaccacgagaccatgggccgcaaccgcttcctgggcgaggccaaggtgcccctgcgcgaggtgctggccacccccagcctgagcgccagcttcaacgcccccctgctggacaccaagaagcagcccaccggcgccagcctggtgctgcaggtgagctacacccccctgcccggcgccgtgcccctgttccccccccccacccccctggagcccagccccaccctgcccgacctggacgtggtggccgacaccggcggcgaggaggacaccgaggaccagggcctgaccggcgacgaggccgagcccttcctggaccagagcggcggccccggcgcccccaccaccccccgcaagctgcccagccgcccccccccccactaccccggcatcaagcgcaagcgcagcgcccccaccagccgcaagctgctgagcgacaagccccaggacttccagatccgcgtgcaggtgatcgagggccgccagctgcccggcgtgaacatcaagcccgtggtgaaggtgaccgccgccggccagaccaagcgcacccgcatccacaagggcaacagccccctgttcaacgagaccctgttcttcaacctgttcgacagccccggcgagctgttcgacgagcccatcttcatcaccgtggtggacagccgcagcctgcgcaccgacgccctgctgggcgagttccgcatggacgtgggcaccatctaccgcgagccccgccacgcctacctgcgcaagtggctgctgctgagcgaccccgacgacttcagcgccggcgcccgcggctacctgaagaccagcctgtgcgtgctgggccccggcgacgaggcccccctggagcgcaaggaccccagcgaggacaaggaggacatcgagagcaacctgctgcgccccaccggcgtggccctgcgcggcgcccacttctgcctgaaggtgttccgcgccgaggacctgccccagatggacgacgccgtgatggacaacgtgaagcagatcttcggcttcgagagcaacaagaagaacctggtggaccccttcgtggaggtgagcttcgccggcaagatgctgtgcagcaagatcctggagaagaccgccaacccccagtggaaccagaacatcaccctgcccgccatgttccccagcatgtgcgagaagatgcgcatccgcatcatcgactgggaccgcctgacccacaacgacatcgtggccaccacctacctgagcatgagcaagatcagcgcccccggcggcgagatcgaggtggacgactacctgggcttcctgcccaccttcggcccctgctacatcaacctgtacggcagcccccgcgagttcaccggcttccccgacccctacaccgagctgaacaccggcaagggcgagggcgtggcctaccgcggccgcctgctgctgagcctggagaccaagctggtggagcacagcgagcagaaggtggaggacctgcccgccgacgacatcctgcgcgtggagaagtacctgcgccgccgcaagtacagcctgttcgccgccttctacagcgccaccatgctgcaggacgtggacgacgccatccagttcgaggtgagcatcggcaactacggcaacaagttcgacatgacctgcctgcccctggccagcaccacccagtacagccgcgccgtgttcgacggctgccactactactacctgccctggggcaacgtgaagcccgtggtggtgctgagcagctactgggaggacatcagccaccgcatcgagacccagaaccagctgctgggcatcgccgaccgcctggaggccggcctggagcaggtgcacctggccctgaaggcccagtgcagcaccgaggacgtggacagcctggtggcccagctgaccgacgagctgatcgccggctgcagccagcccctgggcgacatccacgagacccccagcgccacccacctggaccagtacctgtaccagctgcgcacccaccacctgagccagatcaccgaggccgccctggccctgaagctgggccacagcgagctgcccgccgccctggagcaggccgaggactggctgctgcgcctgcgcgccctggccgaggagccccagaacagcctgcccgacatcgtgatctggatgctgcagggcgacaagcgcgtggcctaccagcgcgtgcccgcccaccaggtgctgttcagccgccgcggcgccaactactgcggcaagaactgcggcaagctgcagaccatcttcctgaagtaccccatggagaaggtgcccggcgcccgcatgcccgtgcagatccgcgtgaagctgtggttcggcctgagcgtggacgagaaggagttcaaccagttcgccgagggcaagctgagcgtgttcgccgagacctacgagaacgagaccaagctggccctggtgggcaactggggcaccaccggcctgacctaccccaagttcagcgacgtgaccggcaagatcaagctgcccaaggacagcttccgccccagcgccggctggacctgggccggcgactggttcgtgtgccccgagaagaccctgctgcacgacatggacgccggccacctgagcttcgtggaggaggtgttcgagaaccagacccgcctgcccggcggccagtggatctacatgagcgacaactacaccgacgtgaacggcgagaaggtgctgcccaaggacgacatcgagtgccccctgggctggaagtgggaggacgaggagtggagcaccgacctgaaccgcgccgtggacgagcagggctgggagtacagcatcaccatcccccccgagcgcaagcccaagcactgggtgcccgccgagaagatgtactacacccaccgccgccgccgctgggtgcgcctgcgccgccgcgacctgagccagatggaggccctgaagcgccaccgccaggccgaggccgagggcgagggctgggagtacgccagcctgttcggctggaagttccacctggagtaccgcaagaccgacgccttccgccgccgccgctggcgccgccgcatggagcccctggagaagaccggccccgccgccgtgttcgccctggagggcgccctgggcggcgtgatggacgacaagagcgaggacagcatgagcgtgagcaccctgagcttcggcgtgaaccgccccaccatcagctgcatcttcgactacggcaaccgctaccacctgcgctgctacatgtaccaggcccgcgacctggccgccatggacaaggacagcttcagcgacccctacgccatcgtgagcttcctgcaccagagccagaagaccgtggtggtgaagaacaccctgaaccccacctgggaccagaccctgatcttctacgagatcgagatcttcggcgagcccgccaccgtggccgagcagccccccagcatcgtggtggagctgtacgaccacgacacctacggcgccgacgagttcatgggccgctgcatctgccagcccagcctggagcgcatgccccgcctggcctggttccccctgacccgcggcagccagcccagcggcgagctgctggccagcttcgagctgatccagcgcgagaagcccgccatccaccacatccccggcttcgaggtgcaggagaccagccgcatcctggacgagagcgaggacaccgacctgccctacccccccccccagcgcgaggccaacatctacatggtgccccagaacatcaagcccgccctgcagcgcaccgccatcgagatcctggcctggggcctgcgcaacatgaagagctaccagctggccaacatcagcagccccagcctggtggtggagtgcggcggccagaccgtgcagagctgcgtgatccgcaacctgcgcaagaaccccaacttcgacatctgcaccctgttcatggaggtgatgctgccccgcgaggagctgtactgcccccccatcaccgtgaaggtgatcgacaaccgccagttcggccgccgccccgtggtgggccagtgcaccatccgcagcctggagagcttcctgtgcgacccctacagcgccgagagccccagcccccagggcggccccgacgacgtgagcctgctgagccccggcgaggacgtgctgatcgacatcgacgacaaggagcccctgatccccatccagctggccgacggcctgagcagcctggcccccaccaacaccgccagcccccccagcagcccccacgaggaggagttcatcgactggtggagcaagttcttcgccagcatcggcgagcgcgagaagtgcggcagctacctggagaaggacttcgacaccctgaaggtgtacgacacccagctggagaacgtggaggccttcgagggcctgagcgacttctgcaacaccttcaagctgtaccgcggcaagacccaggaggagaccgaggaccccagcgtgatcggcgagttcaagggcctgttcaagatctaccccctgcccgaggaccccgccatccccatgcccccccgccagttccaccagctggccgcccagggcccccaggagtgcctggtgcgcatctacatcgtgcgcgccttcggcctgcagcccaaggaccccaacggcaagtgcgacccctacatcaagatcagcatcggcaagaagagcgtgagcgaccaggacaactacatcccctgcaccctggagcccgtgttcggcaagatgttcgagctgacctgcaccctgcccctggagaaggacctgaagatcaccctgtacgactacgacctgctgagcaaggacgagaagatcggcgagaccgtggtggacctggagaaccgcctgctgagcaagttcggcgcccgctgcggcctgccccagacctactgcgtgagcggccccaaccagtggcgcgaccagctgcgccccagccagctgctgcacctgttctgccagcagcaccgcgtgaaggcccccgtgtaccgcaccgaccgcgtgatgttccaggacaaggagtacagcatcgaggagatcgaggccggccgcatccccaacccccacctgggccccgtggaggagcgcctggccctgcacgtgctgcagcagcagggcctggtgcccgagcacgtggagagccgccccctgtacagccccctgcagcccgacatcgagcagggcaagctgcagatgtgggtggacctgttccccaaggccctgggccgccccggcccccccttcaacatcaccccccgccgcgcccgccgcttcttcctgcgctgcatcatctggaacacccgcgacgtgatcctggacgacctgagcctgaccggcgagaagatgagcgacatctacgtgaagggctggatgatcggcttcgaggagcacaagcagaagaccgacgtgcactaccgcagcctgggcggcgagggcaacttcaactggcgcttcatcttccccttcgactacctgcccgccgagcaggtgtgcaccatcgccaagaaggacgccttctggcgcctggacaagaccgagagcaagatccccgcccgcgtggtgttccagatctgggacaacgacaagttcagcttcgacgacttcctgggcagcctgcagctggacctgaaccgcatgcccaagcccgccaagaccgccaagaagtgcagcctggaccagctggacgacgccttccaccccgagtggttcgtgagcctgttcgagcagaagaccgtgaagggctggtggccctgcgtggccgaggagggcgagaagaagatcctggccggcaagctggagatgaccctggagatcgtggccgagagcgagcacgaggagcgccccgccggccagggccgcgacgagcccaacatgaaccccaagctggaggacccccgccgccccgacaccagcttcctgtggttcaccagcccctacaagaccatgaagttcatcctgtggcgccgcttccgctgggccatcatcctgttcatcatcctgttcatcctgctgctgttcctggccatcttcatctacgccttccccaactacgccgccatgaagctggtgaagcccttcagc

SEQ ID NO: 49032 - DNA, 6267 bp, Artificial Sequence
  derived and/or modified sequence
atgctgtgctgcctgctggtgagagccagcaacctgcccagcgccaagaaggacagaagaagcgaccccgtggccagcctgaccttcagaggcgtgaagaagagaaccaaggtgatcaagaacagcgtgaaccccgtgtggaacgagggcttcgagtgggacctgaagggcatccccctggaccagggcagcgagctgcacgtggtggtgaaggaccacgagaccatgggcagaaacagattcctgggcgaggccaaggtgcccctgagagaggtgctggccacccccagcctgagcgccagcttcaacgcccccctgctggacaccaagaagcagcccaccggcgccagcctggtgctgcaggtgagctacacccccctgcccggcgccgtgcccctgttccccccccccacccccctggagcccagccccaccctgcccgacctggacgtggtggccgacaccggcggcgaggaggacaccgaggaccagggcctgaccggcgacgaggccgagcccttcctggaccagagcggcggccccggcgcccccaccacccccagaaagctgcccagcagaccccccccccactaccccggcatcaagagaaagagaagcgcccccaccagcagaaagctgctgagcgacaagccccaggacttccagatcagagtgcaggtgatcgagggcagacagctgcccggcgtgaacatcaagcccgtggtgaaggtgaccgccgccggccagaccaagagaaccagaatccacaagggcaacagccccctgttcaacgagaccctgttcttcaacctgttcgacagccccggcgagctgttcgacgagcccatcttcatcaccgtggtggacagcagaagcctgagaaccgacgccctgctgggcgagttcagaatggacgtgggcaccatctacagagagcccagacacgcctacctgagaaagtggctgctgctgagcgaccccgacgacttcagcgccggcgccagaggctacctgaagaccagcctgtgcgtgctgggccccggcgacgaggcccccctggagagaaaggaccccagcgaggacaaggaggacatcgagagcaacctgctgagacccaccggcgtggccctgagaggcgcccacttctgcctgaaggtgttcagagccgaggacctgccccagatggacgacgccgtgatggacaacgtgaagcagatcttcggcttcgagagcaacaagaagaacctggtggaccccttcgtggaggtgagcttcgccggcaagatgctgtgcagcaagatcctggagaagaccgccaacccccagtggaaccagaacatcaccctgcccgccatgttccccagcatgtgcgagaagatgagaatcagaatcatcgactgggacagactgacccacaacgacatcgtggccaccacctacctgagcatgagcaagatcagcgcccccggcggcgagatcgaggtggacgactacctgggcttcctgcccaccttcggcccctgctacatcaacctgtacggcagccccagagagttcaccggcttccccgacccctacaccgagctgaacaccggcaagggcgagggcgtggcctacagaggcagactgctgctgagcctggagaccaagctggtggagcacagcgagcagaaggtggaggacctgcccgccgacgacatcctgagagtggagaagtacctgagaagaagaaagtacagcctgttcgccgccttctacagcgccaccatgctgcaggacgtggacgacgccatccagttcgaggtgagcatcggcaactacggcaacaagttcgacatgacctgcctgcccctggccagcaccacccagtacagcagagccgtgttcgacggctgccactactactacctgccctggggcaacgtgaagcccgtggtggtgctgagcagctactgggaggacatcagccacagaatcgagacccagaaccagctgctgggcatcgccgacagactggaggccggcctggagcaggtgcacctggccctgaaggcccagtgcagcaccgaggacgtggacagcctggtggcccagctgaccgacgagctgatcgccggctgcagccagcccctgggcgacatccacgagacccccagcgccacccacctggaccagtacctgtaccagctgagaacccaccacctgagccagatcaccgaggccgccctggccctgaagctgggccacagcgagctgcccgccgccctggagcaggccgaggactggctgctgagactgagagccctggccgaggagccccagaacagcctgcccgacatcgtgatctggatgctgcagggcgacaagagagtggcctaccagagagtgcccgcccaccaggtgctgttcagcagaagaggcgccaactactgcggcaagaactgcggcaagctgcagaccatcttcctgaagtaccccatggagaaggtgcccggcgccagaatgcccgtgcagatcagagtgaagctgtggttcggcctgagcgtggacgagaaggagttcaaccagttcgccgagggcaagctgagcgtgttcgccgagacctacgagaacgagaccaagctggccctggtgggcaactggggcaccaccggcctgacctaccccaagttcagcgacgtgaccggcaagatcaagctgcccaaggacagcttcagacccagcgccggctggacctgggccggcgactggttcgtgtgccccgagaagaccctgctgcacgacatggacgccggccacctgagcttcgtggaggaggtgttcgagaaccagaccagactgcccggcggccagtggatctacatgagcgacaactacaccgacgtgaacggcgagaaggtgctgcccaaggacgacatcgagtgccccctgggctggaagtgggaggacgaggagtggagcaccgacctgaacagagccgtggacgagcagggctgggagtacagcatcaccatcccccccgagagaaagcccaagcactgggtgcccgccgagaagatgtactacacccacagaagaagaagatgggtgagactgagaagaagagacctgagccagatggaggccctgaagagacacagacaggccgaggccgagggcgagggctgggagtacgccagcctgttcggctggaagttccacctggagtacagaaagaccgacgccttcagaagaagaagatggagaagaagaatggagcccctggagaagaccggccccgccgccgtgttcgccctggagggcgccctgggcggcgtgatggacgacaagagcgaggacagcatgagcgtgagcaccctgagcttcggcgtgaacagacccaccatcagctgcatcttcgactacggcaacagataccacctgagatgctacatgtaccaggccagagacctggccgccatggacaaggacagcttcagcgacccctacgccatcgtgagcttcctgcaccagagccagaagaccgtggtggtgaagaacaccctgaaccccacctgggaccagaccctgatcttctacgagatcgagatcttcggcgagcccgccaccgtggccgagcagccccccagcatcgtggtggagctgtacgaccacgacacctacggcgccgacgagttcatgggcagatgcatctgccagcccagcctggagagaatgcccagactggcctggttccccctgaccagaggcagccagcccagcggcgagctgctggccagcttcgagctgatccagagagagaagcccgccatccaccacatccccggcttcgaggtgcaggagaccagcagaatcctggacgagagcgaggacaccgacctgccctacccccccccccagagagaggccaacatctacatggtgccccagaacatcaagcccgccctgcagagaaccgccatcgagatcctggcctggggcctgagaaacatgaagagctaccagctggccaacatcagcagccccagcctggtggtggagtgcggcggccagaccgtgcagagctgcgtgatcagaaacctgagaaagaaccccaacttcgacatctgcaccctgttcatggaggtgatgctgcccagagaggagctgtactgcccccccatcaccgtgaaggtgatcgacaacagacagttcggcagaagacccgtggtgggccagtgcaccatcagaagcctggagagcttcctgtgcgacccctacagcgccgagagccccagcccccagggcggccccgacgacgtgagcctgctgagccccggcgaggacgtgctgatcgacatcgacgacaaggagcccctgatccccatccagctggccgacggcctgagcagcctggcccccaccaacaccgccagcccccccagcagcccccacgaggaggagttcatcgactggtggagcaagttcttcgccagcatcggcgagagagagaagtgcggcagctacctggagaaggacttcgacaccctgaaggtgtacgacacccagctggagaacgtggaggccttcgagggcctgagcgacttctgcaacaccttcaagctgtacagaggcaagacccaggaggagaccgaggaccccagcgtgatcggcgagttcaagggcctgttcaagatctaccccctgcccgaggaccccgccatccccatgccccccagacagttccaccagctggccgcccagggcccccaggagtgcctggtgagaatctacatcgtgagagccttcggcctgcagcccaaggaccccaacggcaagtgcgacccctacatcaagatcagcatcggcaagaagagcgtgagcgaccaggacaactacatcccctgcaccctggagcccgtgttcggcaagatgttcgagctgacctgcaccctgcccctggagaaggacctgaagatcaccctgtacgactacgacctgctgagcaaggacgagaagatcggcgagaccgtggtggacctggagaacagactgctgagcaagttcggcgccagatgcggcctgccccagacctactgcgtgagcggccccaaccagtggagagaccagctgagacccagccagctgctgcacctgttctgccagcagcacagagtgaaggcccccgtgtacagaaccgacagagtgatgttccaggacaaggagtacagcatcgaggagatcgaggccggcagaatccccaacccccacctgggccccgtggaggagagactggccctgcacgtgctgcagcagcagggcctggtgcccgagcacgtggagagcagacccctgtacagccccctgcagcccgacatcgagcagggcaagctgcagatgtgggtggacctgttccccaaggccctgggcagacccggcccccccttcaacatcacccccagaagagccagaagattcttcctgagatgcatcatctggaacaccagagacgtgatcctggacgacctgagcctgaccggcgagaagatgagcgacatctacgtgaagggctggatgatcggcttcgaggagcacaagcagaagaccgacgtgcactacagaagcctgggcggcgagggcaacttcaactggagattcatcttccccttcgactacctgcccgccgagcaggtgtgcaccatcgccaagaaggacgccttctggagactggacaagaccgagagcaagatccccgccagagtggtgttccagatctgggacaacgacaagttcagcttcgacgacttcctgggcagcctgcagctggacctgaacagaatgcccaagcccgccaagaccgccaagaagtgcagcctggaccagctggacgacgccttccaccccgagtggttcgtgagcctgttcgagcagaagaccgtgaagggctggtggccctgcgtggccgaggagggcgagaagaagatcctggccggcaagctggagatgaccctggagatcgtggccgagagcgagcacgaggagagacccgccggccagggcagagacgagcccaacatgaaccccaagctggaggaccccagaagacccgacaccagcttcctgtggttcaccagcccctacaagaccatgaagttcatcctgtggagaagattcagatgggccatcatcctgttcatcatcctgttcatcctgctgctgttcctggccatcttcatctacgccttccccaactacgccgccatgaagctggtgaagcccttcagctag

SEQ ID NO: 49033 - DNA, 6267 bp, Artificial Sequence
  derived and/or modified sequence
atgctctgctgcctactggttcgcgccagcaatctcccatcagcaaagaaagacagacggtcggatccagtggcgtctctgaccttccgcggagtcaaaaagagaacaaaggtcatcaagaatagtgtcaatccagtgtggaacgaaggctttgaatgggacctgaaaggtattcccttggaccagggtagcgaattgcatgtcgttgtgaaagaccacgagacgatgggaagaaatagatttctgggtgaggctaaagtgccccttcgcgaggtattggccacaccgtcactgagcgcgagtttcaatgctccattgctagatactaagaaacagcctactggtgcttctctcgtcctgcaggtgagttacacgccgttgcccggagctgtcccgctgttcccccctccaacccctttggagccctcccctaccctcccggatttggacgtcgtggctgacacagggggagaggaggacacagaagatcaggggctcacaggtgacgaagccgagccttttctggaccaatctggcgggcctggggcaccaacaactccacgcaaactgccatctaggcctccgccccactacccaggcattaagcggaagcggtccgcacccacatcccgtaaactattgagcgataagccccaggatttccagataagagtgcaggttatcgagggccgtcagcttcccggcgtgaacatcaagccagtcgtgaaagtgactgccgccggccagaccaaaagaaccaggattcacaagggaaacagtccattattcaatgagacgttgttctttaacctgtttgactccccaggtgagttgtttgacgagcctatcttcattactgtcgtggattccagaagcttgagaaccgatgccctgctgggtgagttccgcatggatgttggtaccatttatcgggaaccccgacatgcttacctgcgtaagtggttgcttttgtccgatccagatgacttcagcgcgggggcccgaggctatttgaaaacatctctgtgtgttctgggccccggagacgaggcgcctcttgaaagaaaggacccatccgaggacaaagaggacattgaatccaatttgctgagaccaacaggagttgcattgagaggcgcccacttctgtctgaaggtgttccgcgcagaagacttgccccaaatggatgatgctgttatggataatgtgaaacagatttttggctttgaatccaacaaaaagaacctggtggacccattcgttgaagtgtccttcgcgggtaaaatgctgtgtagcaagattctggaaaagactgctaacccgcagtggaaccagaacataactctgcctgccatgtttccatccatgtgtgagaagatgcggatcaggattatagactgggatagactgacccacaatgacatcgtcgctactacatacctgagtatgtcaaagataagtgctcccgggggggagattgaagtcgatgattatctgggattcttaccgacattcggcccatgttacatcaatttgtacggcagtccgcgcgaatttacaggattccccgacccctacactgagctaaataccgggaaaggagagggagtggcttatcgagggcggctactgctgagccttgagacaaagctggttgagcactctgagcagaaagtggaggacttacctgctgacgatatcctgagggtggagaaatacctccgcagacgcaaatacagccttttcgctgctttttatagtgctacaatgctccaggatgtggacgatgccattcagtttgaggtctccattggcaactacggaaataagttcgatatgacctgcttgccacttgcaagcactacacagtactcccgggccgtgttcgacggctgccattattattatctaccctgggggaacgtaaagcctgtggtcgtgctctcctcctattgggaggacatcagccatcgtatagaaactcagaatcaactgctcggtattgcagacaggttggaggccggacttgaacaagtccacttggccttaaaagctcagtgctctacagaggatgtagattctcttgtggcgcaactgacagacgagctgatcgcggggtgtagtcaaccactgggcgacatccacgagacaccttccgccacacatcttgaccagtatctgtaccagctgagaacccaccatctgtcacagattacagaagccgctttggctctcaaactgggccacagtgaactcccagctgccctggaacaggccgaggattggctgctgcggctgcgggcactggctgaagagccacagaactctctgccagacattgtgatttggatgttacagggggacaaacgagtcgcctaccagagagtgcccgctcaccaggtgttattctcccgaagaggtgccaattattgcggtaaaaattgcggcaagttacagacaatctttctgaaatatccaatggagaaggttcctggggccaggatgccggtccagatccgcgtcaaactctggttcggcctctcagtggacgaaaaggaatttaatcaatttgcagaaggcaagctcagcgtcttcgccgagacctacgaaaatgaaacaaagctggcactcgtgggaaattgggggactactgggttgacgtacccaaagtttagcgatgtgacgggtaaaatcaagttacccaaggacagcttccggccctccgctggatggacttgggccggggactggtttgtatgtcccgagaaaacgcttctgcatgatatggacgccggtcatctgagcttcgtggaggaagtattcgaaaaccagacccggttgccaggaggacagtggatatacatgtcagataactacactgatgtgaacggtgaaaaagtactgcctaaagacgacattgaatgtccgctgggctggaaatgggaggatgaggagtggtcgactgacctgaatcgggctgtcgacgagcaaggatgggaatactccattactatcccccctgagcgcaaacccaaacactgggtgcctgctgaaaagatgtactacacacaccgacgccggcgttgggtgcgtctgaggcggagagacctgtcccagatggaggctctaaagaggcaccggcaggctgaggcagagggtgaaggctgggaatacgccagtctgtttggatggaagtttcaccttgaatacagaaaaacagatgctttcagacgcaggagatggcgtcgacgaatggaacccctagagaagacaggccccgcagctgtgttcgcgcttgagggcgctctgggcggtgttatggacgataaaagcgaggactctatgagcgtatccaccttgtctttcggagtgaatcggcccactatctcgtgcatatttgattacggcaatcgatatcacctgcggtgttatatgtaccaggcccgtgacctagctgccatggataaagatagctttagcgacccatacgccatagtcagtttcctgcaccagagccagaaaacagtcgtcgtgaaaaatacgctcaatcctacatgggatcagactttaatattctacgagatcgaaatctttggggagccagcgaccgtcgccgaacaaccgccctccatcgtagttgaactatatgatcatgatacgtatggggctgatgagttcatgggacggtgtatctgccagccctcgctggagaggatgcctagactcgcctggtttcccctgacccgaggctcacagccatcaggtgaactgctagcaagttttgagcttatccagcgtgaaaaaccggccatccatcatataccgggtttcgaggtgcaggagacaagcagaatccttgatgagtctgaagatacagatctgccttatcccccgcctcaaagagaggctaacatttacatggtgccacaaaacattaagcccgcgctgcagaggaccgcaattgaaatcctggcctggggcctcaggaacatgaagtcctatcagcttgcaaatatatcctcacctagcctggtagttgagtgtggaggacagaccgtccaatcctgtgtcataagaaatctgagaaagaatccaaactttgacatctgcacactcttcatggaggtgatgctacctcgagaagaactctattgtccacctattacggtcaaagtgatcgacaatcggcagtttggtaggaggccggttgtcgggcagtgtaccatcagatctctggagagctttctttgcgatccatattctgcggaatcccctagtcctcaaggcgggccagacgacgtatcgctgttgagccccggtgaagacgtcctaattgacattgacgacaaggagcccttaatcccaatacaactggcagatgggctgtccagccttgccccaacgaataccgcatcaccaccctccagtccacatgaggaggagtttattgattggtggagcaagttcttcgcatcaattggagagcgggagaaatgcgggtcttacttggagaaggattttgacactctcaaggtctacgacacacaactggagaatgttgaagcatttgaggggctctccgacttttgtaatactttcaaactgtacagggggaagacccaggaggagactgaagacccttccgtgatcggggaattcaaaggactcttcaagatttatcctctgcctgaggaccctgcgatccccatgcctcctcgacaatttcatcaactggccgcacaaggaccgcaggagtgtctagtccgcatatacatcgtgcgcgccttcgggctccagcctaaagatcctaacggcaagtgtgatccgtatattaagatctctatcggcaagaagagcgtcagcgatcaagataattacattccctgcacacttgagcccgtctttggcaaaatgtttgaattgacttgcaccctaccactggaaaaggacttaaaaataaccctctacgactacgacttactgagtaaggacgaaaaaattggcgaaacggttgtggacctggaaaatcggctcttgtccaagtttggggcccgatgcggactgccccagacttactgtgtctccggccccaatcagtggcgggatcagttgaggccgagtcaactactccatctgttctgccagcagcaccgggtgaaggcgcctgtttacaggacagaccgcgtgatgttccaagataaagaatactcgattgaggagattgaggcaggccgcatcccaaaccctcaccttggccccgtggaggagaggcttgcgttgcacgtattacagcagcaaggtctggtcccggaacacgttgaatccagaccactgtacagtcctctccagcccgacatcgaacagggcaagcttcagatgtgggtggacttgttccctaaagccttgggtagacctggcccaccgttcaacataacaccacgcagggcccggcgcttttttctgaggtgtatcatatggaacactagggacgtaattctggatgacctctcgctcacgggcgaaaaaatgtcagatatatacgtgaaaggttggatgattggcttcgaggaacacaagcaaaaaacagacgtgcactacaggtccctaggaggagaaggaaacttcaactggcggtttatcttcccctttgattaccttcccgccgaacaggtttgtaccatcgccaagaaggatgcattctggcgcttggacaagactgagagcaaaatacccgctagagttgtgtttcaaatttgggacaatgacaagttttcctttgacgacttcttaggtagtcttcaactggacttgaacagaatgcccaaaccagcaaaaaccgccaagaagtgtagcttggaccagttggacgacgcgttccatccagaatggttcgtaagtctgttcgagcagaagacagtgaagggctggtggccgtgcgtggcagaggagggggagaagaaaatcctggccgggaaactcgagatgaccctggaaattgttgccgaatccgaacacgaagaacgcccagccggccagggaagagacgagcctaacatgaaccctaaactcgaagacccccgaaggccggacacatcttttctgtggttcactagcccatataagaccatgaagtttatcctgtggcggaggttccggtgggccatcatattgtttatcatacttttcattttgcttctgtttctggctatttttatttacgcattccctaactacgccgcgatgaagcttgtcaagcccttctcttag

SEQ ID NO: 49034 - DNA, 6267 bp, Artificial Sequence
  derived and/or modified sequence
atgctgtgctgcctgctggtgcgggccagcaacctgcccagcgccaagaaggacagaagaagtgaccctgtggccagcctgaccttccggggcgtgaagaagaggaccaaggtgatcaagaacagcgtgaaccctgtgtggaatgaaggatttgagtgggacctgaagggcatccccctggaccagggcagcgagctgcacgtggtggtgaaggaccacgagaccatgggcaggaaccgcttcctgggggaggccaaggtgcccctgcgggaggtgctggccacccccagcctgagcgccagcttcaatgcccccctgctggacaccaagaagcagcccaccggggccagcctggtgctgcaggtgtcctacacccccctgcccggggctgtgcccctcttccccccacccacccccctggagcccagccccaccctgcctgacctggatgtggtggccgacacaggaggagaggaggacacagaggaccagggcctgactggagatgaagctgagcccttcctggaccagagcggcggccctggggcccccaccacccccaggaagctgcccagccggcccccaccccactacccaggcatcaagaggaagaggtctgcccccaccagcaggaagctgctgagtgacaagccccaggacttccagatccgggtgcaggtgattgagggccggcagctgcccggggtgaacatcaagcctgtggtgaaggtgacagctgctggccagaccaagaggacccgcatccacaagggcaacagccccctcttcaatgagaccctcttcttcaacctgtttgacagccctggagagctgtttgatgagcccatcttcatcaccgtggtggacagccgcagcctgaggacagatgccctgctgggggagttcaggatggatgtgggcaccatctaccgggagcccaggcatgcctacctgaggaagtggctgctgctgagtgaccctgatgacttctctgctggggcccggggctacctgaagaccagcctgtgtgtgctgggccctggagatgaggcccccctggagaggaaggaccccagcgaggacaaggaggacatcgagagcaacctgctgcggcccactggagtggccctgcggggggcccacttctgcctgaaggtgttccgggcagaggacctgccccagatggatgatgctgtgatggacaacgtgaagcagatctttggatttgagagcaacaagaagaacctggtggacccctttgtggaggtgtcctttgctgggaagatgctgtgcagcaagatcctggagaagacagccaacccccagtggaaccagaacatcaccctgcctgccatgttccccagcatgtgtgagaagatgaggatccgcatcatcgactgggaccggctgacccacaatgacatcgtggccaccacctacctgtccatgagcaagatcagcgcccctggaggagaaattgaggtggatgactacctgggcttcctgcccaccttcggcccctgctacatcaacctgtatggcagcccccgggagttcaccggcttcccagacccctacacagagctgaacacaggaaaaggagagggcgtggcctaccggggccgcctgctgctgagcctggagaccaagctggtggagcacagcgagcagaaggtggaggacctgcctgcagatgacatcctgcgggtggagaagtacctgcggcggaggaagtacagcctgtttgctgccttctacagcgccaccatgctgcaggatgtggatgatgccatccagtttgaggtgtccatcggcaactacggcaacaagtttgacatgacctgcctgcccctggccagcaccacccagtacagcagagctgtgtttgatggctgccactactactacctgccctggggcaatgtgaagcctgtggtggtgctgagcagctactgggaggacatcagccacagaattgagacccagaaccagctgctgggcattgctgaccggctggaggccggcctggagcaggtgcacctggccctgaaggcccagtgcagcacagaagatgtggacagcctggtggcccagctgacagatgagctgattgctggctgcagccagcccctgggggacatccacgagaccccatctgccacccacctggaccagtacctgtaccagctgcggacccaccacctgagccagatcacagaagctgccctggccctgaagctgggccacagcgagctgcctgctgccctggagcaggccgaggactggctgctgcggctgcgggccctggccgaggagccccagaacagcctgcctgacatcgtcatctggatgctgcagggcgacaagagggtggcctaccagagggtgcctgcccaccaggtgctcttcagcagaagaggagccaactactgcggcaagaactgtgggaagctgcagaccatcttcctgaagtaccccatggagaaggtgcctggggccaggatgcctgtgcagatccgggtgaagctgtggtttggcctgtctgtggatgagaaggagttcaaccagtttgctgagggcaagctgtctgtgtttgctgagacctatgaaaatgagaccaagctggccctggtgggcaactggggcaccaccggcctgacctaccccaagttcagtgatgtgacaggcaagatcaagctgcccaaggacagcttccggcccagcgctggctggacctgggccggggactggtttgtgtgcccagagaagaccctgctgcatgacatggatgctggccacctgagctttgtggaggaggtgtttgagaaccagacccggctgcccggcggccagtggatctacatgtctgacaactacacagatgtgaatggagagaaggtgctgcccaaggatgacatcgagtgccccctgggctggaagtgggaggatgaggagtggagcacagacctgaacagagctgtggatgagcagggctgggagtacagcatcaccatccccccagagaggaagcccaagcactgggtgcctgctgagaagatgtactacacccacagaagaagacgctgggtgcggctgcggcggcgggacctgagccagatggaggccctgaagaggcaccggcaggccgaggccgagggggagggctgggagtatgccagcctgtttggctggaagttccacctggagtacaggaagacagatgccttcagaagaagacgctggaggaggaggatggagcccctggagaagacaggccctgctgctgtgtttgccctggagggcgccctgggcggcgtgatggatgacaagtctgaggacagcatgtctgtgtccaccctgagctttggagtgaaccggcccaccatcagctgcatctttgattatggcaaccgctaccacctgcgctgctacatgtaccaggcccgggacctggccgccatggacaaggacagcttcagtgacccctatgccatcgtgtccttcctgcaccagagccagaagacagtggtggtgaagaacaccctgaaccccacctgggaccagaccctcatcttctatgaaattgagatctttggagagcccgccaccgtggccgagcagccccccagcatcgtggtggagctgtatgaccatgacacctatggagcagatgagttcatgggccgctgcatctgccagcccagcctggagaggatgccccggctggcctggttccccctgacccggggcagccagcccagcggggagctgctggccagctttgagctgatccagcgggagaagccagccatccaccacatccctggctttgaggtgcaggagaccagccgcatcctggatgaaagtgaggacacagacctgccctaccccccaccccagcgggaggccaacatctacatggtgccccagaacatcaagccagccctgcagaggacagccatcgagatcctggcctggggcctgaggaacatgaagagctaccagctggccaacatcagcagccccagcctggtggtggagtgtggcggccagacagtgcagagctgtgtgatccggaacctgaggaagaaccccaactttgacatctgcaccctcttcatggaggtgatgctgccccgggaggagctgtactgcccccccatcaccgtgaaggtgattgacaaccggcagtttggccggcggcctgtggtgggccagtgcaccatccgcagcctggagagcttcctgtgtgacccctacagcgctgagagccccagcccccagggcggcccagatgatgtgtccctgctgagccctggagaagatgtgctgattgatattgatgacaaggagcccctcatccccatccagctggctgatggcctgagcagcctggcccccaccaacacagccagcccccccagcagcccccatgaggaggagttcatcgactggtggagcaagttctttgccagcattggagagcgggagaagtgtggcagctacctggagaaggactttgacaccctgaaggtgtatgacacccagctggagaatgtggaggcctttgagggcctgagtgacttctgcaacaccttcaagctgtaccggggcaagacccaggaggagacagaggaccccagcgtcatcggggagttcaagggcctcttcaagatctaccccctgcctgaggaccctgccatccccatgccaccccggcagttccaccagctggccgcccagggcccccaggagtgcctggtgcgcatctacatcgtgcgggccttcggcctgcagcccaaggaccccaacgggaaatgtgacccctacatcaagatcagcatcggcaagaagtctgtgtctgaccaggacaactacatcccctgcaccctggagcctgtgtttgggaagatgtttgagctgacctgcaccctgcccctggagaaggacctgaagatcaccctgtatgactatgacctgctgagcaaggatgagaagattggagagaccgtggtggacctggagaaccggctgctgagcaagtttggagcccgctgtggcctgccccagacctactgtgtgtctggccccaaccagtggagggaccagctgcggcccagccagctgctgcacctgttctgccagcagcaccgggtgaaggcccctgtgtacagaacagacagagtgatgttccaggacaaggagtacagcattgaggagattgaagctggccgcatccccaacccccacctgggccctgtggaggagcggctggccctgcacgtgctgcagcagcagggcctggtgcctgagcacgtggagagccggcccctgtacagccccctgcagcctgacatcgagcagggcaagctgcagatgtgggtggacctcttccccaaggccctgggccggcccggcccccccttcaacatcaccccccggcgggcccggcgcttcttcctgcgctgcatcatctggaacaccagagatgtgatcctggatgacctgagcctgactggagagaagatgtctgacatctacgtgaagggctggatgattggatttgaggagcacaagcagaagacagatgtgcactaccgcagcctgggcggggagggcaacttcaactggaggttcatcttcccctttgactacctgcctgctgagcaggtgtgcaccatcgccaagaaggatgccttctggaggctggacaagacagagagcaagatcccagcccgggtggtgttccagatctgggacaatgacaagttctcctttgatgacttcctgggcagcctgcagctggacctgaacaggatgcccaagccagccaagacagccaagaagtgcagcctggaccagctggatgatgccttccaccctgagtggtttgtgtccctgtttgagcagaagacagtgaagggctggtggccctgtgtggccgaggagggggagaagaagatcctggccggcaagctggagatgaccctggagatcgtggccgagagcgagcacgaggagaggcctgctggccagggcagagatgagcccaacatgaaccccaagctggaggaccccaggaggccagacaccagcttcctgtggttcaccagcccctacaagaccatgaagttcatcctgtggaggcgcttccgctgggccatcatcctcttcatcatcctcttcatcctgctgctcttcctggccatcttcatctatgccttccccaactatgctgccatgaagctggtgaagcccttctcctag

SEQ ID NO: 49035 - DNA, 6564 bp, Artificial Sequence
  derived and/or modified sequence
tctccgcggaggagcagcgaaggcgacagctctcttggcgcggctgcctgggagccgggcgcttgctgggtgggtgctcgggcccggtgctcccgctcccgccctgactgcgcgcctgtgtgccgccggggctgcccagccatgctgtgctgcctgctggtgagggccagcaacctccccagtgcgaagaaggaccggcgcagcgaccctgtcgcaagcctgactttccgaggggtgaagaagagaaccaaagtcatcaagaacagcgtgaaccctgtatggaatgagggatttgaatgggacctcaagggcatccccctggaccagggctctgagcttcatgtggtggtcaaagaccatgagacgatggggaggaacaggttcctgggggaagccaaggtcccactccgagaggtcctcgccacccctagtctgtccgccagcttcaatgcccccctgctggacaccaagaagcagcccacaggggcctcgctggtcctgcaggtgtcctacacaccgctgcctggagctgtgcccctgttcccgccccctactcctctggagccctccccgactctgcctgacctggatgtagtggcagacacaggaggagaggaagacacagaggaccagggactcactggagatgaggcggagccattcctggatcaaagcggaggcccgggggctcccaccaccccaaggaaactaccttcacgtcctccgccccactaccccgggatcaaaagaaagcgaagtgcgcctacatctagaaagctgctgtcagacaaaccgcaggatttccagatcagggtccaggtgatcgaggggcgccagctgccgggggtgaacatcaagcctgtggtcaaggttaccgctgcagggcagaccaagcggacgcggatccacaagggaaacagcccactcttcaatgagactcttttcttcaacttgtttgactctcctggggagctgtttgatgagcccatctttatcacggtggtagactctcgttctctcaggacagatgctctcctcggggagttccggatggacgtgggcaccatttacagagagccccggcacgcctatctcaggaagtggctgctgctctcagaccctgatgacttctctgctggggccagaggctacctgaaaacaagcctttgtgtgctggggcctggggacgaagcgcctctggagagaaaagacccctctgaagacaaggaggacattgaaagcaacctgctccggcccacaggcgtagccctgcgaggagcccacttctgcctgaaggtcttccgggccgaggacttgccgcagatggacgatgccgtgatggacaacgtgaaacagatctttggcttcgagagtaacaagaagaacttggtggacccctttgtggaggtcagctttgcggggaaaatgctgtgcagcaagatcttggagaagacggccaaccctcagtggaaccagaacatcacactgcctgccatgtttccctccatgtgcgaaaaaatgaggattcgtatcatagactgggaccgcctgactcacaatgacatcgtggctaccacctacctgagtatgtcgaaaatctctgcccctggaggagaaatagaagtggatgactacctgggcttcctccccacttttgggccctgctacatcaacctctatggcagtcccagagagttcacaggcttcccagacccctacacagagctcaacacaggcaagggggaaggtgtggcttatcgtggccggcttctgctctccctggagaccaagctggtggagcacagtgaacagaaggtggaggaccttcctgcggatgacatcctccgggtggagaagtaccttaggaggcgcaagtactccctgtttgcggccttctactcagccaccatgctgcaggatgtggatgatgccatccagtttgaggtcagcatcgggaactacgggaacaagttcgacatgacctgcctgccgctggcctccaccactcagtacagccgtgcagtctttgacgggtgccactactactacctaccctggggtaacgtgaaacctgtggtggtgctgtcatcctactgggaggacatcagccatagaatcgagactcagaaccagctgcttgggattgctgaccggctggaagctggcctggagcaggtccacctggccctgaaggcgcagtgctccacggaggacgtggactcgctggtggctcagctgacggatgagctcatcgcaggctgcagccagcctctgggtgacatccatgagacaccctctgccacccacctggaccagtacctgtaccagctgcgcacccatcacctgagccaaatcactgaggctgccctggccctgaagctcggccacagtgagctccctgcagctctggagcaggcggaggactggctcctgcgtctgcgtgccctggcagaggagccccagaacagcctgccggacatcgtcatctggatgctgcagggagacaagcgtgtggcataccagcgggtgcccgcccaccaagtcctcttctcccggcggggtgccaactactgtggcaagaattgtgggaagctacagacaatctttctgaaatatccgatggagaaggtgcctggcgcccggatgccagtgcagatacgggtcaagctgtggtttgggctctcagtggatgagaaggagttcaaccagtttgctgaggggaagctgtctgtctttgctgaaacctatgagaacgagactaagttggcccttgttgggaactggggcacaacgggcctcacctaccccaagttttctgacgtcacgggcaagatcaagctacccaaggacagcttccgcccctcggccggctggacctgggctggagattggttcgtgtgtccggagaagactctgctccatgacatggacgccggtcacctgagcttcgtggaagaggtgtttgagaaccagacccggcttcccggaggccagtggatctacatgagtgacaactacaccgatgtgaacggggagaaggtgcttcccaaggatgacattgagtgcccactgggctggaagtgggaagatgaggaatggtccacagacctcaaccgggctgtcgatgagcaaggctgggagtatagcatcaccatccccccggagcggaagccgaagcactgggtccctgctgagaagatgtactacacacaccgacggcggcgctgggtgcgcctgcgcaggagggatctcagccaaatggaagcactgaaaaggcacaggcaggcggaggcggagggcgagggctgggagtacgcctctctttttggctggaagttccacctcgagtaccgcaagacagatgccttccgccgccgccgctggcgccgtcgcatggagccactggagaagacggggcctgcagctgtgtttgcccttgagggggccctgggcggcgtgatggatgacaagagtgaagattccatgtccgtctccaccttgagcttcggtgtgaacagacccacgatttcctgcatattcgactatgggaaccgctaccatctacgctgctacatgtaccaggcccgggacctggctgcgatggacaaggactctttttctgatccctatgccatcgtctccttcctgcaccagagccagaagacggtggtggtgaagaacacccttaaccccacctgggaccagacgctcatcttctacgagatcgagatctttggcgagccggccacagttgctgagcaaccgcccagcattgtggtggagctgtacgaccatgacacttatggtgcagacgagtttatgggtcgctgcatctgtcaaccgagtctggaacggatgccacggctggcctggttcccactgacgaggggcagccagccgtcgggggagctgctggcctcttttgagctcatccagagagagaagccggccatccaccatattcctggttttgaggtgcaggagacatcaaggatcctggatgagtctgaggacacagacctgccctacccaccaccccagagggaggccaacatctacatggttcctcagaacatcaagccagcgctccagcgtaccgccatcgagatcctggcatggggcctgcggaacatgaagagttaccagctggccaacatctcctcccccagcctcgtggtagagtgtgggggccagacggtgcagtcctgtgtcatcaggaacctccggaagaaccccaactttgacatctgcaccctcttcatggaagtgatgctgcccagggaggagctctactgcccccccatcaccgtcaaggtcatcgataaccgccagtttggccgccggcctgtggtgggccagtgtaccatccgctccctggagagcttcctgtgtgacccctactcggcggagagtccatccccacagggtggcccagacgatgtgagcctactcagtcctggggaagacgtgctcatcgacattgatgacaaggagcccctcatccccatccagcttgcagacggtctgtcgagcttggcccccactaacacggcttctcctccatccagtcctcatgaggaagagttcatcgattggtggagcaaattctttgcctccataggggagagggaaaagtgcggctcctacctggagaaggattttgacaccctgaaggtctatgacacacagctggagaatgtggaggcctttgagggcctgtctgacttttgtaacaccttcaagctgtaccggggcaagacgcaggaggagacagaagatccatctgtgattggtgaatttaagggcctcttcaaaatttatcccctcccagaagacccagccatccccatgcccccaagacagttccaccagctggccgcccagggaccccaggagtgcttggtccgtatctacattgtccgagcatttggcctgcagcccaaggaccccaatggaaagtgtgatccttacatcaagatctccatagggaagaaatcagtgagtgaccaggataactacatcccctgcacgctggagcccgtatttggaaagatgttcgagctgacctgcactctgcctctggagaaggacctaaagatcactctctatgactatgacctcctctccaaggacgaaaagatcggtgagacggtcgtcgacctggagaacaggctgctgtccaagtttggggctcgctgtggactcccacagacctactgtgtctctggaccgaaccagtggcgggaccagctccgcccctcccagctcctccacctcttctgccagcagcatagagtcaaggcacctgtgtaccggacagaccgtgtaatgtttcaggataaagaatattccattgaagagatagaggctggcaggatcccaaacccacacctgggcccagtggaggagcgtctggctctgcatgtgcttcagcagcagggcctggtcccggagcacgtggagtcacggcccctctacagccccctgcagccagacatcgagcaggggaagctgcagatgtgggtcgacctatttccgaaggccctggggcggcctggacctcccttcaacatcaccccacggagagccagaaggtttttcctgcgttgtattatctggaataccagagatgtgatcctggatgacctgagcctcacgggggagaagatgagcgacatttatgtgaaaggttggatgattggctttgaagaacacaagcaaaagacagacgtgcattatcgttccctgggaggtgaaggcaacttcaactggaggttcattttccccttcgactacctgccagctgagcaagtctgtaccattgccaagaaggatgccttctggaggctggacaagactgagagcaaaatcccagcacgagtggtgttccagatctgggacaatgacaagttctcctttgatgattttctgggctccctgcagctcgatctcaaccgcatgcccaagccagccaagacagccaagaagtgctccttggaccagctggatgatgctttccacccagaatggtttgtgtccctttttgagcagaaaacagtgaagggctggtggccctgtgtagcagaagagggtgagaagaaaatactggcgggcaagctggaaatgaccttggagattgtagcagagagtgagcatgaggagcggcctgctggccagggccgggatgagcccaacatgaaccctaagcttgaggacccaaggcgccccgacacctccttcctgtggtttacctccccatacaagaccatgaagttcatcctgtggcggcgtttccggtgggccatcatcctcttcatcatcctcttcatcctgctgctgttcctggccatcttcatctacgccttcccgaactatgctgccatgaagctggtgaagcccttcagctgaggactctcctgccctgtagaaggggccgtggggtcccctccagcatgggactggcctgcctcctccgcccagctcggcgagctcctccagacctcctaggcctgattgtcctgccagggtgggcagacagacagatggaccggcccacactcccag

SEQ ID NO: 49036 - DNA, 6267 bp, Artificial Sequence
  derived and/or modified sequence
atgctgtgctgcctgctggtgcgggccagcaacctgcccagcgccaagaaggaccgccgcagcgatcccgtggcctccctgacctttcgcggggttaagaagagaaccaaagtcattaaaaattcagtcaatcccgtgtggaacgagggatttgagtgggatctgaaaggaattccactggaccagggatcagagctgcacgtagtggtcaaggaccacgaaaccatggggcgcaatagattcctaggcgaggccaaagtccccctccgggaggtgctggctacaccaagcctgtctgcctcttttaatgcacctctgctggacacaaagaagcagccgacaggcgcctctctcgtgttgcaagttagctacacaccattgccgggggctgtgcctttgttcccgcccccgacccccttggagccatcaccaaccctcccagacctcgatgtggtggccgacaccggcggcgaagaggacactgaagaccagggcctcacaggcgatgaagctgaaccattcctggatcagagcggaggccctggggcgcctactacgcccaggaagttgccttccagacctcctccacattaccctggaattaaaaggaagcggagtgcccccacatctaggaaactgttatcagacaagccacaggattttcaaatcagggtacaggtgatcgagggccggcaactgcccggtgtcaacatcaaacctgttgtgaaagtcacagcagccgggcagacgaaaagaacgagaatccataaggggaattcccccctgttcaacgagactctattcttcaacctgtttgatagccctggcgagctgttcgacgagcccatctttataacagtggtggactctagaagcctgcgcactgacgcattgctcggagagttcaggatggacgtaggcacaatctacagggaaccaagacacgcttatctgaggaaatggctgttactcagcgaccccgacgattttagtgccggggcccgcggctatctcaagacttccctgtgcgttttgggcccaggcgacgaagcccctctagaaaggaaagacccatctgaggacaaggaagacatcgaatccaacctcttgagaccaacaggagtcgcgctccggggggctcacttttgtctgaaagtgttcagagctgaagatctgccacaaatggatgacgccgtgatggataatgttaaacagatctttggctttgagagcaacaagaagaatctcgtcgacccttttgtggaggtgtcttttgcggggaaaatgttgtgttccaagatactggagaagacggccaatccccaatggaaccaaaatataacactgccggccatgttcccaagcatgtgcgaaaagatgcggatcagaatcattgactgggaccgactgacccacaacgatatcgtcgctacaacgtatctgagtatgtccaaaatttccgccccaggcggcgagatcgaggtggacgattatctgggttttttaccgacattcggcccctgctacatcaacctttatggatccccaagggagtttacagggttccctgacccatacacagaactcaataccggtaaaggagaaggcgtcgcttatcgggggcgcctgctgctttccctggaaaccaagcttgtggaacattcagaacagaaggtggaggacctgcccgctgatgacattctgagagtcgaaaaatatctgagaaggcggaaatactctctgttcgccgccttctatagcgccacaatgctccaagatgtcgacgacgctattcagttcgaggtgtcaattggcaattacggtaataaatttgatatgacctgcctgcctttggcgtccacgacgcagtattcacgcgccgtcttcgatggttgtcactactactacctcccctggggcaacgtgaagcctgtggtggtgctgagttcttattgggaggatatatcccaccggatcgagacccagaatcagctgttaggcattgctgaccgtctggaagccggactcgaacaggtccacttggccctgaaggcccagtgtagcaccgaagatgtggactccctggtcgcgcagctgaccgatgaacttattgccgggtgtagtcaaccattgggtgacatacatgagactccctcggccactcacctggatcagtacttgtaccaactgcgcacccaccatctcagccagatcactgaagccgcactcgcactcaaacttggacactccgaattgcctgccgcactcgagcaggcagaggactggttgctgaggctgagagcacttgccgaagagccgcagaacagcctccctgacatagtaatctggatgttgcaaggggataaaagggtcgcttatcagagagtccctgcccatcaggtcctattcagtcgccggggcgccaattactgtggtaagaactgtggaaaactccagaccatttttctgaagtatcccatggaaaaggtgcctggcgcacgtatgccagtgcagattagggtgaagctgtggttcggcctctccgtggatgaaaaagaatttaatcagtttgcggaagggaaactgtctgtattcgccgagacatacgagaacgagactaagctggccctcgttggtaactggggcaccactggtctgacataccctaagttttcagatgtgacgggaaagattaagctacctaaggacagctttaggccaagcgccggttggacttgggcaggagattggtttgtgtgtccagagaagacactgctgcatgatatggacgccgggcacctgtcattcgttgaagaggtcttcgagaaccagactagattgcctggcgggcagtggatttacatgagcgataattacacagacgtcaacggagaaaaggtactcccgaaagatgacatcgagtgtcctctgggatggaagtgggaagacgaagaatggtctactgacttgaaccgagccgtggatgagcagggatgggaatattccattaccatcccccccgaaagaaaacctaagcactgggtgcctgccgaaaagatgtattacacacaccggcggcgccggtgggtgaggctgcggcgacgggatttgtcacagatggaagccctcaagcgacatcgccaggccgaagccgaaggtgaagggtgggagtacgcaagcctttttggttggaaatttcacctggaatatagaaagaccgatgccttcagacggcgcaggtggagacgtcgtatggagcctctggagaagacaggtccagccgcagttttcgcccttgagggtgccctgggtggcgtgatggatgataaatctgaggatagtatgtctgtgtctaccctatctttcggcgtgaataggccaacaatctcatgcattttcgactacggtaaccgctatcacttaaggtgttacatgtatcaagcccgcgatctagctgctatggataaggactcgtttagcgacccgtatgccatcgtctcctttctgcaccaatcacagaagacggtcgtagttaagaacaccttgaacccaacatgggaccaaacactgatattctatgaaattgaaatttttggcgagcctgccaccgtggcagagcagccaccctctatcgtggttgagctgtacgaccacgacacatatggcgcagatgaattcatgggccggtgcatctgccagccttccctggagcgcatgcccagattggcctggttcccactgaccaggggatcacagccgagcggagaactgctggccagcttcgaactgatccagagagagaagccagcaatccatcatatccctggctttgaagtgcaggagaccagcaggatcctggatgagtctgaggatacagatctcccttacccacctccccagcgagaagctaacatctatatggtgccccagaacattaagcccgccttgcagagaacggctattgagatcttagcttggggactgcgcaatatgaaatcatatcagctggccaatatcagttcgccgtcattagtcgttgagtgcggaggccagaccgtgcagagttgcgttataaggaatctccgcaagaatccgaactttgatatctgcacgctatttatggaggtcatgttgcctcgagaggaactatattgcccccccataaccgtgaaggtgattgacaacagacaattcggacggaggcccgtcgtcggacagtgtacaatccgctctctggagtctttcctctgcgatccctattctgccgaatctccgtcgccacagggaggccccgacgatgttagcttgctgagcccaggagaggacgtgctgatcgacatagacgataaggagcccctgatcccgatccaattggcagacggccttagcagtctcgctcccactaacacagcctccccaccttcttcaccgcacgaggaagaatttatcgattggtggtcaaagtttttcgcgtccattggcgaacgcgagaaatgtggcagttatttggagaaagactttgacacgcttaaagtgtatgacacgcagttggagaatgtcgaggctttcgagggcctgtctgatttttgtaacactttcaaactctatagaggcaaaacacaggaagagaccgaagacccttccgttattggcgagttcaaggggctgttcaaaatctacccactgcccgaggatcctgccattcccatgccacctagacagttccaccagctcgccgcccagggtccacaggaatgccttgtccgaatctatattgttcgagcattcggcttgcagccaaaggatcccaatgggaagtgcgacccctacattaagatcagtataggcaaaaaatcagtctcagaccaagataactacatcccctgcacactggaaccggtctttggtaagatgtttgaactgacttgcacattgcctctcgaaaaggacctgaagatcacgttatatgattatgatcttctatccaaggacgagaagattggcgaaaccgtcgtcgatttagagaatcgcttactgtcaaagttcggggcccggtgtggactgcctcagacttactgtgttagtggccccaatcagtggagggaccaactgcgtccgagccaactcctccacctgttttgtcagcaacacagagtgaaggcccccgtgtatcggacagaccgcgtcatgttccaggataaagagtatagtatcgaggagatcgaggctggtagaatacctaatccacacctgggtccagtggaggaacgtctggccctgcatgttctccagcaacaagggcttgtccccgagcatgtcgagtcacgacctctgtactcgcctctgcaacctgatattgagcagggcaagctgcaaatgtgggtcgatctctttccaaaggctctcggtcggccgggcccaccgtttaacatcactcctcgacgtgccaggagattcttcttgcgatgcatcatctggaataccagagatgtaattctggacgatttgtccctgacaggagagaagatgagcgacatctacgtgaaaggttggatgataggatttgaggagcacaagcagaaaacagacgtgcactaccggtccctgggcggcgagggcaactttaattggcggtttatcttcccattcgactacctgcccgcagaacaggtctgcaccatcgctaagaaggacgctttctggcgcctcgacaagacagagtctaaaatcccagcaagggtggtcttccagatctgggacaatgataaatttagcttcgatgatttcttggggagtctccagctggaccttaatcgaatgccaaagccggctaaaactgctaagaagtgttccttggatcaattggatgacgccttccaccccgaatggtttgtgtccctatttgaacagaaaacagtgaaaggttggtggccttgtgttgcagaagaaggagaaaagaagattctggccggaaagctggagatgacgttggagatcgtggctgaatctgaacatgaggaacggccagcgggccaggggcgtgatgaacccaatatgaatcctaaattagaggacccgcggcgcccggatacctccttcctttggtttaccagcccctacaagactatgaaattcatcctatggcgtcggtttcgctgggctattattctttttataatccttttcatcctgctgctatttttggcaatcttcatctatgcgtttccgaactacgccgcgatgaagcttgtgaaacccttttcatag

SEQ ID NO: 49037 - DNA, 6267 bp, Artificial Sequence
  derived and/or modified sequence
atgctttgttgcctcctcgtccgggcaagcaatctccctagcgcgaaaaaagaccgcaggtctgaccctgtcgcctctctgaccttccgcggagtaaagaagagaaccaaggttattaagaatagcgtcaatcccgtctggaatgaagggtttgagtgggaccttaaaggcataccattggaccagggcagcgaactgcacgtggtggtgaaagatcacgaaacgatgggacgcaacagattcctcggcgaagctaaagtgcccctacgcgaggtgctggcaacgccctctttatcagccagcttcaacgctccgctactggataccaaaaagcaacctacaggtgccagtctcgtgctacaggtcagttacacaccccttccgggtgccgtcccactctttcctccaccgacccctctggagccctcgccaacgctccctgacctggacgtggttgcggatacaggcggagaagaggatacggaggaccagggcctcaccggtgatgaggcagaacctttcttagaccaaagtggagggcctggggcacctaccacccccagaaagttaccctctcggccaccaccacattatcccggaataaaaaggaaacgaagcgctcccacaagtagaaagctcctgagtgataaaccccaggactttcaaatccgcgtgcaggtcattgaagggaggcagctgccaggcgtgaatatcaagcccgttgtgaaagttaccgccgcagggcagacgaaaaggacccggatccacaagggaaatagtcctctttttaacgaaacgctgttctttaatttattcgattctccgggtgagctattcgatgagcccatttttatcaccgtggtggacagcagatccctgcgtaccgatgccctactgggcgagttcaggatggatgttggtacaatttatcgcgaaccacgacatgcctaccttcgaaaatggctcctgctttctgatcccgatgatttctcagccggtgccagaggctatctgaagaccagtctgtgcgtgctggggcctggggatgaagcccctctcgagcgaaaagacccatcagaggataaggaggatatcgagagcaatctgctgcgaccaacaggtgtagctcttcgtggggctcacttctgcctgaaggtcttcagggcggaggatctcccccagatggatgatgctgtcatggataacgtcaagcaaatcttcggattcgagagcaataaaaaaaacttggtcgacccctttgtggaggtttcattcgccggaaaaatgctgtgctccaagattctcgaaaagacagctaacccgcagtggaatcagaacatcaccctccccgcaatgttccctagtatgtgcgaaaagatgcgaatccgaattattgattgggatagacttactcataatgatattgtggccaccacctatctgtctatgtccaaaatatccgcacccggaggagagatagaagtggatgactatctgggattcttaccaactttcggcccttgctatataaatctttacggctcacctagagaatttaccggctttcctgatccatataccgaacttaataccggaaaaggagagggcgtcgcctatcggggaagacttctcctgagcctggaaacaaagctggttgaacactctgaacagaaggttgaggacttgcccgcagatgatatcctgcgcgtggaaaagtatcttaggcggaggaagtattccttgtttgccgctttttattctgccacaatgctgcaggacgtcgatgacgccattcagtttgaggtctccattggaaattacggtaacaaatttgacatgacctgtctgcccctcgcctccactactcaatacagtagagccgtttttgatggctgccattattactatctcccctggggcaacgtgaagccagtcgtggtcctgtcatcctattgggaggatatctcacacagaattgagactcagaaccagttgttgggcatagccgatcgattggaagctgggctggagcaggtccacctggccctgaaagcccaatgttctactgaagacgtggactcgctcgtagcccagctaaccgacgaattaattgcgggatgttctcagccccttggcgacatccatgagacccctagcgcaacacatctggaccaatatctttaccagctgagaactcatcacctttcccagataactgaggccgcactggccttgaagttaggccattccgagctgcccgcagccttagagcaggccgaagactggctgctgaggctacgggcactggctgaagaaccgcagaactcattacctgacattgttatttggatgctgcaaggggacaaaagagtcgcctatcagcgcgtccctgcccatcaggtattattctctaggaggggcgcaaattactgcggtaagaactgcggaaagctccagacgatttttctgaaatacccaatggagaaggtgcctggggcaaggatgcctgtacagattagagtgaaattgtggtttggcctttctgtcgatgagaaagagttcaatcagtttgcagaagggaagttgagcgtgtttgcagaaacttacgaaaacgaaaccaagctggccctggtagggaactggggaacaacaggacttacctacccaaagtttagcgatgtgaccggcaagataaagctgcctaaggacagttttaggccttcagcgggatggacctgggcaggtgattggttcgtatgccccgaaaaaactctccttcacgacatggatgccggtcatctgagcttcgtggaagaggtctttgaaaaccagactcgtttgcccggtggtcagtggatatatatgtccgacaattacaccgatgtgaatggtgagaaagtgctcccaaaggatgatattgagtgccccctggggtggaaatgggaggatgaggaatggagcaccgatctcaatagagccgtggatgagcagggctgggagtacagtattaccatacctcctgagaggaaacccaagcactgggtccccgcagagaaaatgtactacactcacagacggcgacgttgggtgcggttgcgcaggcgagacctctcgcagatggaagctctaaaacggcatagacaggcagaagctgagggtgaaggatgggagtatgctagcttgtttggttggaagtttcacctcgagtaccggaaaaccgacgctttccgcaggagacgttggcgcaggcgcatggaaccattggaaaagaccggaccggctgcggtgtttgcattggaaggtgctctcggaggcgtaatggacgacaaatccgaagactccatgagcgtgtcaaccctgagctttggcgtcaacagacctactataagttgtatcttcgattacggcaatagatatcatttacgctgctacatgtaccaggccagagatctggcggcaatggacaaggattctttcagcgacccctatgcaattgttagttttctgcaccaaagccagaaaacagtggtcgttaaaaacaccctgaatcccacttgggaccaaacattaatcttttacgagattgaaatttttggcgaacccgcaaccgtggccgagcaaccacctagtatcgtcgtggaactgtacgatcatgatacctatggagcagacgaattcatgggcaggtgcatctgtcaaccatccctcgaaaggatgccgagactggcttggttcccacttactcggggaagtcagccgtcaggtgagctgctggccagtttcgagcttatccagcgtgaaaagcctgctatccaccatatccccggttttgaggtgcaggaaaccagtcgcattctggacgaaagtgaggatacagatttgccttacccgcctccccagcgtgaagcaaacatttacatggtgccccagaacatcaaaccagcactccagcggacagccattgagattttggcatggggccttaggaatatgaagagctaccagttggccaatatttcctcccccagcttagtcgtggagtgtgggggtcagaccgttcagagctgcgtgattagaaaccttcgaaagaaccctaatttcgatatttgtaccctgttcatggaggtgatgctcccccgagaagaactgtactgccctcccataactgtcaaagtcattgacaaccgtcaattcgggagacgacctgtcgtggggcaatgcacgatacgctccctggagagttttctctgtgacccctatagcgccgagtcaccctcacctcaggggggtcctgatgacgtgtcactcctcagccccggtgaagacgtgcttatcgacattgacgacaaggagcccctgattccaatacagttggctgacgggctgtcatcactcgcccctactaacaccgcttctcctcctagctcaccacatgaggaggaattcatcgattggtggtctaaattttttgctagtatcggagagcgggaaaaatgtggaagctacctggagaaggactttgacacccttaaggtttatgacacacagctggagaatgtggaggcttttgagggcttaagcgacttctgcaacaccttcaaactttatagaggaaagacccaggaggagactgaggacccatcagtaattggcgaatttaaaggattgttcaaaatataccccttgcctgaagacccagcaatcccgatgccaccacggcagtttcaccaactcgccgctcaggggccacaagaatgtctggttcgtatttacatcgttcgcgcttttggcttgcaacccaaggaccccaatgggaagtgcgatccttacatcaagataagtattgggaagaaatctgtgtccgaccaggataattacattccctgtacactcgagcccgtttttggcaaaatgtttgaactaacctgcacactccctctggagaaagacttaaagattaccctgtatgactatgatctgttaagtaaagacgaaaaaatcggggagacagtcgtagacttggagaatcggctgctgtcaaaattcggcgctcgctgtgggcttccacagacctactgcgtgagtggccctaatcagtggcgcgaccaactgcgaccatctcagctcctgcacctcttctgccagcagcatagagtgaaggccccagtataccgaaccgatcgtgttatgtttcaggataaggagtactctattgaagagattgaagccggtcgcatcccaaacccccacctaggaccagtagaggagcgactggcccttcatgtgctgcagcagcaggggctggtccctgagcatgtggagtctaggcccctgtacagccccttgcaacctgacatcgagcaaggcaagctccaaatgtgggtggacttgttccctaaagctttgggtagacccggtccccctttcaacataacacccaggcgggctcggcgattctttttaaggtgtattatttggaatacccgcgacgttatcctagacgacctgtcgctgactggagaaaaaatgtccgatatttacgtcaagggttggatgatcggcttcgaagagcataaacagaaaaccgatgtgcattatcgcagcctcggcggagaaggtaattttaactggcgcttcatctttccatttgactatctgccagctgagcaggtgtgcacgatcgccaagaaagatgctttctggaggctcgacaagacagagtccaaaattcccgcacgcgtcgtgttccaaatctgggataacgataaattttccttcgatgatttcctgggatcactacaactcgacttaaatagaatgccaaaacctgccaaaaccgcaaagaagtgcagcctggaccagctcgacgatgccttccacccagaatggtttgtctctctgttcgaacagaaaacggtgaaaggctggtggccatgcgtggccgaggagggggaaaaaaaaatccttgctgggaagctcgagatgacgctggaaatcgtggctgagagcgaacatgaggagcggccagccggtcagggcagagatgaaccgaatatgaatcctaaacttgaagatcctcgacgcccagatacctcttttttgtggttcacgagcccttataaaacaatgaagttcatcctctggagacgattccgatgggctattatcctgtttatcatcctgttcattcttctactgttcctggcaatctttatctacgcattcccaaactacgcagccatgaagcttgttaaacccttcagctag

SEQ ID NO: 49038 - DNA, 6267 bp, Artificial Sequence
  derived and/or modified sequence
atgctgtgctgcctacttgtgagagcgtccaacctgccttcagcgaagaaggaccggcgctcagatcctgtcgcaagcctgacattccgtggagtgaagaaaaggaccaaagtgatcaaaaattccgtgaaccccgtgtggaacgaggggttcgaatgggatctgaaggggattcccctcgaccaggggagcgaacttcatgtagtggtgaaagatcacgaaacgatgggtcgcaatcggttcctcggggaagcaaaggttcccctacgcgaggttctggctacgccctccctttccgcaagcttcaatgcgcctctgctggataccaagaaacagcctactggagcaagcctcgtgctgcaggtcagctacacaccattgccaggcgctgtacctctgttccctccccccacgccacttgaaccttcccctaccctaccagaccttgacgttgtggcagatactggaggcgaagaagataccgaagatcagggtctgactggagacgaagccgaaccgtttttagatcaatctggaggccccggcgctcctaccacaccccgtaaactcccctccagacctcctccacactacccagggattaagagaaaacggagcgcccctacatctaggaaattgttgtccgacaaaccccaggacttccagatcagggtccaggtcatagagggccgtcagttgcccggagttaatataaagccggttgtgaaggtaactgctgccggacagacaaagcggacaaggatccacaagggtaattcacctctctttaatgaaactcttttttttaatctctttgactcccccggcgaactctttgacgagcccatattcatcaccgtggtggacagccgcagtctgcgtaccgatgcgctgctcggagagttccgaatggacgtgggaacaatttatcgagaaccccgccacgcttacctcagaaagtggctgctcctcagcgacccagatgatttctcagctggcgctcggggttacttaaaaacatcgttgtgcgttctgggacccggcgacgaagcgccacttgagagaaaggacccaagtgaggacaaagaagacatcgagagcaacctcttacgaccgactggagtggcattgcgtggagcccacttttgcctcaaggtttttagggccgaggacctgccacagatggatgacgccgtgatggacaacgtcaaacagattttcggatttgaaagcaacaagaagaacctcgtggaccctttcgtcgaagttagtttcgcagggaaaatgctgtgcagcaagattctagagaagactgccaacccccagtggaaccagaacattacccttcccgcaatgttcccctccatgtgcgagaaaatgagaatcaggatcatcgactgggaccgcctcacacacaacgatattgtcgcgacaacatatctgtctatgagcaagatatctgcacccggaggagaaattgaggtggatgactacctgggttttttgcccacatttggcccctgttatattaatctttatggcagtccacgcgaatttaccggattcccagatccatataccgagcttaacacgggcaaaggcgagggcgtggcatacagaggtagactcctcctgtcactcgagactaaattggtggagcatagtgagcagaaagtcgaggatctgcctgccgatgacatcttacgggtggaaaagtacctccgcagaaggaaatatagtttgtttgccgctttctattcggcaacaatgcttcaagatgtagatgacgccatccagtttgaagtgagcataggaaactacggaaacaagttcgacatgacttgtctccccttggccagtactacccagtactcaagagctgtttttgacggctgtcactactattatctgccatggggaaatgtgaaacccgtagtggtgctgtcttcgtactgggaagatatttctcaccggatagagactcagaatcagcttctggggatcgccgatagattggaagcgggtcttgagcaggttcatctggcgttaaaggctcagtgcagcacagaggacgtggacagtttggtcgcccagctgaccgacgagttaatcgctggctgcagtcaacctctgggtgacatccatgaaacgccctcagcaacgcacctcgaccaatatctgtaccagttgcggacccaccatctgagccaaattacagaagccgccttggccctgaaattgggccactctgagctgccggccgcccttgaacaggctgaagactggctgttgagacttcgggctcttgccgaggagccacagaactccctgccagatattgtgatctggatgctccagggcgataaaagggtcgcttaccagagggtgccagcacatcaagtgctattctcaagaagaggggcaaattactgcggaaaaaattgcggaaagttacagaccatatttctgaagtatccaatggagaaggtgcccggagcgcggatgcccgtccagatacgcgtgaaactttggtttggcctgagcgtggacgagaaggagttcaaccagttcgctgaaggcaaactgtctgtcttcgctgagacctacgaaaacgagacaaagctcgctttagtgggaaattgggggacaacaggcttaacgtacccgaagttctcagacgtaaccggcaaaataaagctgccaaaagactcgtttcggccgtctgcagggtggacgtgggccggagattggtttgtatgtcctgagaaaaccctgctgcacgacatggatgccggtcacctgagcttcgtggaggaggtgtttgaaaatcagactagactccctggtggccaatggatttacatgtcggataactatacagacgtcaacggcgaaaaggtactccctaaagatgacatcgaatgcccattgggatggaagtgggaggatgaggagtggtctactgacctgaaccgggcagtcgatgaacagggctgggagtattctattactatccctcccgagaggaaacctaaacactgggtaccggcggaaaagatgtactacacacaccgacggcggcgttgggtgcgactccgccgaagagatttgtcacagatggaggccctgaagcgccatcgacaggcggaagctgaaggtgaaggatgggagtatgcttcattattcggttggaaatttcacctggaatacagaaagaccgatgcattccggaggagacgctggcgacggcggatggaacccctggaaaagactggtccagccgcagtctttgcattagaaggagcgttagggggagtgatggacgataagagcgaggattctatgtccgtctccactcttagttttggggtgaacagacccactatttcttgcattttcgattacggaaaccgttaccacctgagatgctacatgtatcaggctcgcgacctagccgccatggataaagattcattttcagatccctacgccattgtgagctttctgcatcagagtcagaaaaccgtcgtggtgaagaataccttgaatcccacctgggaccagacgctgattttctatgagatcgagatcttcggggagcctgccacagttgctgaacagcctccgagtatcgttgtggagctgtacgaccatgatacatatggcgcggatgagtttatgggcaggtgcatttgtcaaccgtctttagagcgcatgccacggttggcatggtttccactgacaagaggctctcaaccaagcggggaattgctggcctcttttgagctaattcagcgagaaaaaccagcaattcatcatatacctggttttgaggtgcaagagaccagcaggatactggacgagtccgaggacactgatctgccgtatcctccaccacagagggaagccaacatatacatggttccccagaacatcaagcctgcgctccagcggacagctattgagattcttgcatggggacttagaaacatgaagagctatcagcttgccaacatttcttcgccatctctggttgtggagtgcggaggccagaccgtccagtcttgtgtgattcgcaatctacggaagaatcctaattttgacatctgcaccttgtttatggaagtgatgctgccgcgggaggaactttactgtccgccaattacagttaaagtgatcgataatcggcagtttggaagacggcccgtggtaggacagtgtactatacggagccttgaatcatttctgtgcgacccctacagtgcagagagcccctctcctcagggcggtcccgacgatgtgtcactcttaagcccaggcgaggacgtgttaattgatattgatgacaaggagcccttaattcccatccagttggccgacgggttgagtagccttgctccaaccaacacagcatcaccccctagcagccctcacgaggaggagtttatagactggtggagtaagtttttcgcgtctattggagaacgagaaaagtgcggatcatatctggaaaaggacttcgatacccttaaggtctacgatacgcaactggagaatgtcgaggctttcgaaggcctgtctgacttctgcaacacctttaagctctaccgggggaagacacaagaagaaacagaggaccctagcgtaattggagagttcaaaggattgtttaaaatctacccacttccagaggaccccgcaattccaatgcctccgaggcagtttcaccagctcgcagcccagggaccacaggagtgtctcgtccgcatttacattgttcgggcctttgggctgcaaccaaaggatcccaatggcaagtgcgacccatatattaaaatttcaataggcaagaagagtgtttcagaccaagacaactatattccctgcacgctggaacccgtgttcggaaagatgttcgagctcacatgtactttgccgttggaaaaggacctaaaaattaccttgtacgattatgacctgctcagcaaggacgaaaagattggggaaacagtcgtcgacctcgagaaccgtctgctatctaagttcggtgcacgatgtggtttgcctcaaacatattgcgtgagcggccctaaccaatggagggatcagctcagacccagtcagcttctacacctattttgccagcaacatagggttaaggctccagtctatcggaccgaccgggtgatgttccaggacaaggagtatagcattgaggaaattgaggcaggtagaattcctaacccccacctgggccccgtcgaggaaaggctcgccctccacgttctgcagcagcagggactggtgccagaacatgttgaatctcggcccctgtattcccccctgcagccagacattgagcaaggaaagttgcagatgtgggtggatctgtttcccaaagcgctaggacggcccggcccaccattcaatatcactccgagacgagctcgacgcttctttttacgatgtattatctggaacacccgggatgtgattctcgacgacctcagccttacaggtgaaaagatgtccgacatctacgtgaaagggtggatgattggctttgaagaacataaacaaaaaacggatgttcattaccggagtttggggggcgaaggcaactttaactggagattcatctttccttttgattatcttccggccgagcaggtctgcaccatcgcaaagaaggacgcattttggagactcgacaagactgagagcaaaattccggccagagtggtgttccagatctgggacaatgacaagttcagctttgatgacttcctgggctcacttcagttggaccttaaccgtatgcccaaaccagccaaaacagccaagaagtgtagcctggatcagctggatgacgccttccacccagaatggttcgtgtcactttttgaacagaagaccgtcaaaggatggtggccatgtgtggccgaagagggcgaaaaaaaaatcctggctggtaagctcgaaatgaccctagaaattgttgccgagtccgagcacgaggagcggcccgccgggcagggacgcgatgaaccaaacatgaatccgaagctggaggatcctaggcgccccgacacctcttttttatggtttacatctccctacaaaactatgaagttcatcctgtggcgacggtttagatgggccattattttatttattattctattcatcctactgttgtttctggccatttttatctacgcgttcccaaattacgccgcaatgaagctggtgaaaccttttagttag

SEQ ID NO: 49039 - DNA, 6267 bp, Artificial Sequence
  derived and/or modified sequence
atgctgtgttgcctgctagtccgcgcttctaacctcccgtctgctaagaaagaccgacgctctgatcctgttgcctcgctgacgtttcgaggggtcaaaaagcgtactaaggtcattaaaaacagtgtgaacccggtatggaacgaaggtttcgagtgggatctcaagggcatccccctagaccagggctccgagttacacgttgtggtaaaggatcacgagactatgggccgcaaccgtttcctcggcgaagcaaaagtgcccctgcgcgaagttttagccaccccttcattgtccgccagcttcaatgcgcctctgctggataccaagaaacagcctactggagcaagcctcgtgctgcaggtcagctacacaccattgccaggcgctgtacctctgttccctccccccacgccacttgaaccttcccctaccctaccagaccttgacgttgtggcagatactggaggcgaagaagataccgaagatcagggtctgactggagacgaagccgaaccgtttttagatcaatctggaggccccggcgctcctaccacaccccgtaaactcccctccagacctcctccacactacccagggattaaaagaaagcggtctgccccaacctctagaaaactcctatctgacaagccacaggatttccagattcgggtccaagtgattgaggggcggcagctgcctggggtaaacataaagcctgtggtcaaagtgacggctgctggacaaactaagcgaacaagaatacacaagggcaactctccactgttcaatgaaacactgttttttaatctgtttgactcccccggggaattatttgatgaaccgatctttattaccgttgtggattcaagatctttacggaccgatgctttactgggcgagtttcggatggacgtcgggaccatttatagagaaccgagacatgcttatctcagaaaatggcttctcctttccgaccctgatgacttttcggccggtgctcggggctacctgaaaacttcactgtgtgtgctaggacctggagatgaggccccactggaaaggaaagacccaagcgaggataaagaggacatagaatcgaatttgctgaggcctactggagttgcgctgaggggcgcccacttctgcttgaaggtgttccgggccgaggacctaccccagatggacgatgcagttatggacaacgtaaaacagattttcgggtttgaatccaacaagaagaacctggtcgatccattcgtagaggttagctttgctggtaaaatgttatgtagcaagatactggagaaaactgctaatccacaatggaaccaaaacatcactttgcccgctatgtttcctagcatgtgtgagaaaatgcgaattagaataattgattgggatcgcctaacccataatgatatcgtggccacaacgtacctaagcatgtctaaaataagcgcaccaggtggggagatcgaggtcgatgattacttaggcttcctccctacctttggtccttgctatataaatctatacggatccccaagagaatttacgggatttcccgacccctacactgagttaaacacaggtaaaggagagggcgttgcctacagaggacggctgctgttgagtcttgaaacaaagcttgtcgagcactccgagcagaaggtggaggacctaccagcagacgatattcttagagtagaaaaatacctccgacgccggaaatattcactgtttgctgctttctattccgctacaatgctgcaagacgttgacgatgcgattcagtttgaggtctctataggcaattatggcaataagtttgatatgacctgtctaccgctggctagcaccacacaatacagtagggcagtttttgatgggtgtcattactattaccttccgtggggaaacgtgaagccggtggttgtcttgagcagctattgggaggacatttctcataggattgaaacgcagaatcagctgctggggatcgcggatcggttggaagccgggctggaacaggtccatctggccttgaaagctcagtgtagtacagaggatgtcgatagtttggtcgcccagttgacagatgaattgatcgccgggtgttcacaacccctcggggacatacatgagacaccatcagccacccatctcgaccagtacctttaccagctacggacgcaccacctcagtcaaataacagaggctgcacttgcgctgaaattaggccactccgaacttcctgctgcactggagcaagccgaagactggctcctgagattgagagccctcgccgaagagcctcaaaacagcctgccagacattgtaatttggatgctgcaaggtgacaagagagttgcataccagcgggtccccgcacatcaggtgttattctcgaggagaggcgccaattattgcggaaaaaactgtggcaaactccagacaatatttttaaaatacccaatggaaaaagttccaggggctagaatgcctgtgcagattcgagtgaagttgtggtttggactctcagtggacgagaaagagttcaatcagttcgccgagggaaaactgtccgtattcgctgaaacttacgagaacgaaaccaaacttgcactcgtcggcaactggggaactacaggcctcacgtatccaaaattcagtgacgtcacaggaaaaattaaactgcctaaggattcctttcgaccaagtgccgggtggacctgggctggggattggtttgtgtgccctgagaagacacttttgcacgacatggacgccggacatttaagcttcgtagaggaggtctttgaaaaccaaactcgcttaccaggcggccagtggatttacatgtctgacaattacaccgatgtaaatggcgaaaaggttcttcctaaagacgacattgagtgtccacttggctggaaatgggaggatgaagagtggtctacagatctcaatcgcgcagtagacgaacagggctgggagtattcaattacgatcccccccgaacgcaagcctaagcattgggtcccagcggaaaagatgtactatacacaccgaaggcgtagatgggtacgactgcgacgcagagatctctctcaaatggaagccctgaaaaggcataggcaagccgaagccgaaggagaaggttgggaatacgcttcgctgttcggttggaagtttcaccttgaatacaggaagacagacgcgtttcggcgcagacgatggcggaggagaatggaaccactggaaaagactgggccagcagccgtcttcgcacttgagggtgcgctcggcggcgtgatggatgataaaagtgaagatagtatgtctgtgtctaccttatcatttggagtaaaccgccccacaatttcatgcattttcgactacggcaatcgataccatctgcggtgctacatgtatcaggcgagagacttagcagcaatggataaagattcatttagcgatccctacgcaatcgtcagtttcctccaccagtcacagaagaccgttgttgtgaagaacactctcaaccccacttgggaccaaacattgattttttacgaaatcgagattttcggagagccggctacagtagccgaacagccaccatctatcgtagtggaattatatgatcacgacacttatggcgcagatgaattcatggggcgctgtatctgccaacccagcctggagagaatgcctcgccttgcgtggtttcctctgacacgagggtcgcaacctagtggcgagcttttagcgagctttgaactgatccagagagaaaagccggccattcaccatatacccggtttcgaggtgcaggagacaagtagaatcttggacgaatcagaggataccgacctaccctatccccctccccagagggaggcaaatatttatatggttcctcaaaacattaaacccgcacttcagagaacagcaatcgaaatccttgcttggggcctgagaaacatgaaatcctaccaactcgcaaatatctcctctccctcactggtggttgaatgcggcggccagacagtacagagttgtgtcatacggaacctgaggaagaatcctaacttcgacatttgtacactgtttatggaggtcatgctgccaagagaggagctctactgcccaccgattacagtgaaggttatcgataatcggcagtttggacgacggcccgtggtcggccaatgtacaatcagaagccttgaatccttcctttgtgacccatattcagccgagagcccttcccctcaaggtggtcccgatgatgtttcgcttctttctccaggagaggacgtgctgatcgacatcgatgacaaagagcccctgatccccatccagctcgccgacggactcagctctctcgctccaacaaatacagccagcccacccagcagtccacacgaggaagagtttatagattggtggtccaaatttttcgccagcattggtgagcgggagaagtgtggcagttatcttgaaaaagacttcgacacgctaaaagtatatgacacgcagttggagaatgtggaagcctttgaagggctgtctgatttctgtaacacttttaagctgtacagaggaaaaacacaagaagaaactgaagacccttctgtgattggcgaatttaagggtttgttcaaaatttatcccctccctgaagatcctgccatcccgatgccccctcgtcaattccatcagctggcagcgcaagggcctcaggaatgtctggtgagaatttatatcgtaagagcatttggtctacagccaaaagatccaaatggcaagtgcgatccgtatattaagatatcaatagggaagaagagcgtgtcagatcaggacaattacatcccctgtaccctggagcccgtattcggaaaaatgttcgaattgacctgtacactaccccttgagaaggatttgaaaattaccttatatgactacgacctgctttctaaggatgagaagatcggcgaaactgttgtagaccttgagaatagactgctgtcaaaattcggtgctcgttgtggactaccccaaacatactgcgtttcgggtccaaatcagtggcgcgaccagctgagaccgtcacaacttttgcacctattttgtcaacagcacagagttaaggcaccggtctatcgcaccgatcgagtaatgtttcaggataaggaatactccattgaagagattgaagctggccggatcccaaacccacacctggggccggtggaagaacgcctggctctgcatgtgttacagcaacagggactcgtgcctgagcacgtggagtctagacccctttactctcctttacaaccagacattgaacagggaaagctgcagatgtgggtagacttgtttcctaaggcactaggaagacccggacccccattcaacattacccccagacgggccaggaggtttttcctgagatgtatcatttggaatactcgggacgtcattttagacgacttaagtctcaccggcgagaagatgagcgacatttacgttaagggatggatgattggttttgaggagcataagcagaaaacggacgttcactatcggagtctcggcggcgaaggtaactttaattggcgctttatctttcctttcgactacctgcccgcggaacaggtgtgtactatagctaaaaaggacgcgttttggcggcttgataagactgaaagcaaaataccagctcgagtagtttttcaaatatgggataacgataaattttcattcgacgactttttgggcagcctgcagctagacttgaatcgaatgcctaagccagcgaaaacggcgaaaaaatgttccctcgaccaacttgatgatgcttttcaccccgagtggttcgtgtccctgtttgagcaaaaaactgtaaaaggttggtggccctgcgtggcagaggaaggcgagaaaaaaatcctcgccgggaaactggagatgacattggaaatcgtggccgaatccgaacacgaggagagacctgcagggcaaggtcgcgatgagccaaacatgaatccaaagttggaggaccctagacgcccagacacatcttttctgtggttcacatctccctataagactatgaaattcatcctgtggcgtaggttcaggtgggccataatcctgtttataatattgttcatactactattgttcttggctatttttatctatgctttccccaattacgcagctatgaaactggtgaaaccattcagttag

SEQ ID NO: 49040 - RNA, 6267 nt, Artificial Sequence
  derived and/or modified sequence
augcugugcugccuacuugugagagcguccaaccugccuucagcgaagaaggaccggcgcucagauccugucgcaagccugacauuccguggagugaagaaaaggaccaaagugaucaaaaauuccgugaaccccguguggaacgagggguucgaaugggaucugaaggggauuccccucgaccaggggagcgaacuucauguaguggugaaagaucacgaaacgaugggucgcaaucgguuccucggggaagcaaagguuccccuacgcgagguucuggcuacgcccucccuuuccgcaagcuucaaugcgccucugcuggauaccaagaaacagccuacuggagcaagccucgugcugcaggucagcuacacaccauugccaggcgcuguaccucuguucccuccccccacgccacuugaaccuuccccuacccuaccagaccuugacguuguggcagauacuggaggcgaagaagauaccgaagaucagggucugacuggagacgaagccgaaccguuuuuagaucaaucuggaggccccggcgcuccuaccacaccccguaaacuccccuccagaccuccuccacacuacccagggauuaagagaaaacggagcgccccuacaucuaggaaauuguuguccgacaaaccccaggacuuccagaucaggguccaggucauagagggccgucaguugcccggaguuaauauaaagccgguugugaagguaacugcugccggacagacaaagcggacaaggauccacaaggguaauucaccucucuuuaaugaaacucuuuuuuuuaaucucuuugacucccccggcgaacucuuugacgagcccauauucaucaccgugguggacagccgcagucugcguaccgaugcgcugcucggagaguuccgaauggacgugggaacaauuuaucgagaaccccgccacgcuuaccucagaaaguggcugcuccucagcgacccagaugauuucucagcuggcgcucgggguuacuuaaaaacaucguugugcguucugggacccggcgacgaagcgccacuugagagaaaggacccaagugaggacaaagaagacaucgagagcaaccucuuacgaccgacuggaguggcauugcguggagcccacuuuugccucaagguuuuuagggccgaggaccugccacagauggaugacgccgugauggacaacgucaaacagauuuucggauuugaaagcaacaagaagaaccucguggacccuuucgucgaaguuaguuucgcagggaaaaugcugugcagcaagauucuagagaagacugccaacccccaguggaaccagaacauuacccuucccgcaauguuccccuccaugugcgagaaaaugagaaucaggaucaucgacugggaccgccucacacacaacgauauugucgcgacaacauaucugucuaugagcaagauaucugcacccggaggagaaauugagguggaugacuaccuggguuuuuugcccacauuuggccccuguuauauuaaucuuuauggcaguccacgcgaauuuaccggauucccagauccauauaccgagcuuaacacgggcaaaggcgagggcguggcauacagagguagacuccuccugucacucgagacuaaauugguggagcauagugagcagaaagucgaggaucugccugccgaugacaucuuacggguggaaaaguaccuccgcagaaggaaauauaguuuguuugccgcuuucuauucggcaacaaugcuucaagauguagaugacgccauccaguuugaagugagcauaggaaacuacggaaacaaguucgacaugacuugucuccccuuggccaguacuacccaguacucaagagcuguuuuugacggcugucacuacuauuaucugccauggggaaaugugaaacccguaguggugcugucuucguacugggaagauauuucucaccggauagagacucagaaucagcuucuggggaucgccgauagauuggaagcgggucuugagcagguucaucuggcguuaaaggcucagugcagcacagaggacguggacaguuuggucgcccagcugaccgacgaguuaaucgcuggcugcagucaaccucugggugacauccaugaaacgcccucagcaacgcaccucgaccaauaucuguaccaguugcggacccaccaucugagccaaauuacagaagccgccuuggcccugaaauugggccacucugagcugccggccgcccuugaacaggcugaagacuggcuguugagacuucgggcucuugccgaggagccacagaacucccugccagauauugugaucuggaugcuccagggcgauaaaagggucgcuuaccagagggugccagcacaucaagugcuauucucaagaagaggggcaaauuacugcggaaaaaauugcggaaaguuacagaccauauuucugaaguauccaauggagaaggugcccggagcgcggaugcccguccagauacgcgugaaacuuugguuuggccugagcguggacgagaaggaguucaaccaguucgcugaaggcaaacugucugucuucgcugagaccuacgaaaacgagacaaagcucgcuuuagugggaaauugggggacaacaggcuuaacguacccgaaguucucagacguaaccggcaaaauaaagcugccaaaagacucguuucggccgucugcaggguggacgugggccggagauugguuuguauguccugagaaaacccugcugcacgacauggaugccggucaccugagcuucguggaggagguguuugaaaaucagacuagacucccugguggccaauggauuuacaugucggauaacuauacagacgucaacggcgaaaagguacucccuaaagaugacaucgaaugcccauugggauggaagugggaggaugaggaguggucuacugaccugaaccgggcagucgaugaacagggcugggaguauucuauuacuaucccucccgagaggaaaccuaaacacuggguaccggcggaaaagauguacuacacacaccgacggcggcguugggugcgacuccgccgaagagauuugucacagauggaggcccugaagcgccaucgacaggcggaagcugaaggugaaggaugggaguaugcuucauuauucgguuggaaauuucaccuggaauacagaaagaccgaugcauuccggaggagacgcuggcgacggcggauggaaccccuggaaaagacugguccagccgcagucuuugcauuagaaggagcguuagggggagugauggacgauaagagcgaggauucuauguccgucuccacucuuaguuuuggggugaacagacccacuauuucuugcauuuucgauuacggaaaccguuaccaccugagaugcuacauguaucaggcucgcgaccuagccgccauggauaaagauucauuuucagaucccuacgccauugugagcuuucugcaucagagucagaaaaccgucguggugaagaauaccuugaaucccaccugggaccagacgcugauuuucuaugagaucgagaucuucggggagccugccacaguugcugaacagccuccgaguaucguuguggagcuguacgaccaugauacauauggcgcggaugaguuuaugggcaggugcauuugucaaccgucuuuagagcgcaugccacgguuggcaugguuuccacugacaagaggcucucaaccaagcggggaauugcuggccucuuuugagcuaauucagcgagaaaaaccagcaauucaucauauaccugguuuugaggugcaagagaccagcaggauacuggacgaguccgaggacacugaucugccguauccuccaccacagagggaagccaacauauacaugguuccccagaacaucaagccugcgcuccagcggacagcuauugagauucuugcauggggacuuagaaacaugaagagcuaucagcuugccaacauuucuucgccaucucugguuguggagugcggaggccagaccguccagucuugugugauucgcaaucuacggaagaauccuaauuuugacaucugcaccuuguuuauggaagugaugcugccgcgggaggaacuuuacuguccgccaauuacaguuaaagugaucgauaaucggcaguuuggaagacggcccgugguaggacaguguacuauacggagccuugaaucauuucugugcgaccccuacagugcagagagccccucuccucagggcggucccgacgaugugucacucuuaagcccaggcgaggacguguuaauugauauugaugacaaggagcccuuaauucccauccaguuggccgacggguugaguagccuugcuccaaccaacacagcaucacccccuagcagcccucacgaggaggaguuuauagacugguggaguaaguuuuucgcgucuauuggagaacgagaaaagugcggaucauaucuggaaaaggacuucgauacccuuaaggucuacgauacgcaacuggagaaugucgaggcuuucgaaggccugucugacuucugcaacaccuuuaagcucuaccgggggaagacacaagaagaaacagaggacccuagcguaauuggagaguucaaaggauuguuuaaaaucuacccacuuccagaggaccccgcaauuccaaugccuccgaggcaguuucaccagcucgcagcccagggaccacaggagugucucguccgcauuuacauuguucgggccuuugggcugcaaccaaaggaucccaauggcaagugcgacccauauauuaaaauuucaauaggcaagaagaguguuucagaccaagacaacuauauucccugcacgcuggaacccguguucggaaagauguucgagcucacauguacuuugccguuggaaaaggaccuaaaaauuaccuuguacgauuaugaccugcucagcaaggacgaaaagauuggggaaacagucgucgaccucgagaaccgucugcuaucuaaguucggugcacgaugugguuugccucaaacauauugcgugagcggcccuaaccaauggagggaucagcucagacccagucagcuucuacaccuauuuugccagcaacauaggguuaaggcuccagucuaucggaccgaccgggugauguuccaggacaaggaguauagcauugaggaaauugaggcagguagaauuccuaacccccaccugggccccgucgaggaaaggcucgcccuccacguucugcagcagcagggacuggugccagaacauguugaaucucggccccuguauuccccccugcagccagacauugagcaaggaaaguugcagauguggguggaucuguuucccaaagcgcuaggacggcccggcccaccauucaauaucacuccgagacgagcucgacgcuucuuuuuacgauguauuaucuggaacacccgggaugugauucucgacgaccucagccuuacaggugaaaagauguccgacaucuacgugaaaggguggaugauuggcuuugaagaacauaaacaaaaaacggauguucauuaccggaguuuggggggcgaaggcaacuuuaacuggagauucaucuuuccuuuugauuaucuuccggccgagcaggucugcaccaucgcaaagaaggacgcauuuuggagacucgacaagacugagagcaaaauuccggccagagugguguuccagaucugggacaaugacaaguucagcuuugaugacuuccugggcucacuucaguuggaccuuaaccguaugcccaaaccagccaaaacagccaagaaguguagccuggaucagcuggaugacgccuuccacccagaaugguucgugucacuuuuugaacagaagaccgucaaaggaugguggccauguguggccgaagagggcgaaaaaaaaauccuggcugguaagcucgaaaugacccuagaaauuguugccgaguccgagcacgaggagcggcccgccgggcagggacgcgaugaaccaaacaugaauccgaagcuggaggauccuaggcgccccgacaccucuuuuuuaugguuuacaucucccuacaaaacuaugaaguucauccuguggcgacgguuuagaugggccauuauuuuauuuauuauucuauucauccuacuguuguuucuggccauuuuuaucuacgcguucccaaauuacgccgcaaugaagcuggugaaaccuuuuaguuag

SEQ ID NO: 49041 - RNA, 6267 nt, Artificial Sequence
  derived and/or modified sequence
augcuguguugccugcuaguccgcgcuucuaaccucccgucugcuaagaaagaccgacgcucugauccuguugccucgcugacguuucgaggggucaaaaagcguacuaaggucauuaaaaacagugugaacccgguauggaacgaagguuucgagugggaucucaagggcaucccccuagaccagggcuccgaguuacacguugugguaaaggaucacgagacuaugggccgcaaccguuuccucggcgaagcaaaagugccccugcgcgaaguuuuagccaccccuucauuguccgccagcuucaaugcgccucugcuggauaccaagaaacagccuacuggagcaagccucgugcugcaggucagcuacacaccauugccaggcgcuguaccucuguucccuccccccacgccacuugaaccuuccccuacccuaccagaccuugacguuguggcagauacuggaggcgaagaagauaccgaagaucagggucugacuggagacgaagccgaaccguuuuuagaucaaucuggaggccccggcgcuccuaccacaccccguaaacuccccuccagaccuccuccacacuacccagggauuaaaagaaagcggucugccccaaccucuagaaaacuccuaucugacaagccacaggauuuccagauucggguccaagugauugaggggcggcagcugccugggguaaacauaaagccuguggucaaagugacggcugcuggacaaacuaagcgaacaagaauacacaagggcaacucuccacuguucaaugaaacacuguuuuuuaaucuguuugacucccccggggaauuauuugaugaaccgaucuuuauuaccguuguggauucaagaucuuuacggaccgaugcuuuacugggcgaguuucggauggacgucgggaccauuuauagagaaccgagacaugcuuaucucagaaaauggcuucuccuuuccgacccugaugacuuuucggccggugcucggggcuaccugaaaacuucacugugugugcuaggaccuggagaugaggccccacuggaaaggaaagacccaagcgaggauaaagaggacauagaaucgaauuugcugaggccuacuggaguugcgcugaggggcgcccacuucugcuugaagguguuccgggccgaggaccuaccccagauggacgaugcaguuauggacaacguaaaacagauuuucggguuugaauccaacaagaagaaccuggucgauccauucguagagguuagcuuugcugguaaaauguuauguagcaagauacuggagaaaacugcuaauccacaauggaaccaaaacaucacuuugcccgcuauguuuccuagcaugugugagaaaaugcgaauuagaauaauugauugggaucgccuaacccauaaugauaucguggccacaacguaccuaagcaugucuaaaauaagcgcaccagguggggagaucgaggucgaugauuacuuaggcuuccucccuaccuuugguccuugcuauauaaaucuauacggauccccaagagaauuuacgggauuucccgaccccuacacugaguuaaacacagguaaaggagagggcguugccuacagaggacggcugcuguugagucuugaaacaaagcuugucgagcacuccgagcagaagguggaggaccuaccagcagacgauauucuuagaguagaaaaauaccuccgacgccggaaauauucacuguuugcugcuuucuauuccgcuacaaugcugcaagacguugacgaugcgauucaguuugaggucucuauaggcaauuauggcaauaaguuugauaugaccugucuaccgcuggcuagcaccacacaauacaguagggcaguuuuugaugggugucauuacuauuaccuuccguggggaaacgugaagccggugguugucuugagcagcuauugggaggacauuucucauaggauugaaacgcagaaucagcugcuggggaucgcggaucgguuggaagccgggcuggaacagguccaucuggccuugaaagcucaguguaguacagaggaugucgauaguuuggucgcccaguugacagaugaauugaucgccggguguucacaaccccucggggacauacaugagacaccaucagccacccaucucgaccaguaccuuuaccagcuacggacgcaccaccucagucaaauaacagaggcugcacuugcgcugaaauuaggccacuccgaacuuccugcugcacuggagcaagccgaagacuggcuccugagauugagagcccucgccgaagagccucaaaacagccugccagacauuguaauuuggaugcugcaaggugacaagagaguugcauaccagcggguccccgcacaucagguguuauucucgaggagaggcgccaauuauugcggaaaaaacuguggcaaacuccagacaauauuuuuaaaauacccaauggaaaaaguuccaggggcuagaaugccugugcagauucgagugaaguugugguuuggacucucaguggacgagaaagaguucaaucaguucgccgagggaaaacuguccguauucgcugaaacuuacgagaacgaaaccaaacuugcacucgucggcaacuggggaacuacaggccucacguauccaaaauucagugacgucacaggaaaaauuaaacugccuaaggauuccuuucgaccaagugccggguggaccugggcuggggauugguuugugugcccugagaagacacuuuugcacgacauggacgccggacauuuaagcuucguagaggaggucuuugaaaaccaaacucgcuuaccaggcggccaguggauuuacaugucugacaauuacaccgauguaaauggcgaaaagguucuuccuaaagacgacauugaguguccacuuggcuggaaaugggaggaugaagaguggucuacagaucucaaucgcgcaguagacgaacagggcugggaguauucaauuacgaucccccccgaacgcaagccuaagcauugggucccagcggaaaagauguacuauacacaccgaaggcguagauggguacgacugcgacgcagagaucucucucaaauggaagcccugaaaaggcauaggcaagccgaagccgaaggagaagguugggaauacgcuucgcuguucgguuggaaguuucaccuugaauacaggaagacagacgcguuucggcgcagacgauggcggaggagaauggaaccacuggaaaagacugggccagcagccgucuucgcacuugagggugcgcucggcggcgugauggaugauaaaagugaagauaguaugucugugucuaccuuaucauuuggaguaaaccgccccacaauuucaugcauuuucgacuacggcaaucgauaccaucugcggugcuacauguaucaggcgagagacuuagcagcaauggauaaagauucauuuagcgaucccuacgcaaucgucaguuuccuccaccagucacagaagaccguuguugugaagaacacucucaaccccacuugggaccaaacauugauuuuuuacgaaaucgagauuuucggagagccggcuacaguagccgaacagccaccaucuaucguaguggaauuauaugaucacgacacuuauggcgcagaugaauucauggggcgcuguaucugccaacccagccuggagagaaugccucgccuugcgugguuuccucugacacgagggucgcaaccuaguggcgagcuuuuagcgagcuuugaacugauccagagagaaaagccggccauucaccauauacccgguuucgaggugcaggagacaaguagaaucuuggacgaaucagaggauaccgaccuacccuaucccccuccccagagggaggcaaauauuuauaugguuccucaaaacauuaaacccgcacuucagagaacagcaaucgaaauccuugcuuggggccugagaaacaugaaauccuaccaacucgcaaauaucuccucucccucacuggugguugaaugcggcggccagacaguacagaguugugucauacggaaccugaggaagaauccuaacuucgacauuuguacacuguuuauggaggucaugcugccaagagaggagcucuacugcccaccgauuacagugaagguuaucgauaaucggcaguuuggacgacggcccguggucggccaauguacaaucagaagccuugaauccuuccuuugugacccauauucagccgagagcccuuccccucaagguggucccgaugauguuucgcuucuuucuccaggagaggacgugcugaucgacaucgaugacaaagagccccugauccccauccagcucgccgacggacucagcucucucgcuccaacaaauacagccagcccacccagcaguccacacgaggaagaguuuauagauuggugguccaaauuuuucgccagcauuggugagcgggagaaguguggcaguuaucuugaaaaagacuucgacacgcuaaaaguauaugacacgcaguuggagaauguggaagccuuugaagggcugucugauuucuguaacacuuuuaagcuguacagaggaaaaacacaagaagaaacugaagacccuucugugauuggcgaauuuaaggguuuguucaaaauuuauccccucccugaagauccugccaucccgaugcccccucgucaauuccaucagcuggcagcgcaagggccucaggaaugucuggugagaauuuauaucguaagagcauuuggucuacagccaaaagauccaaauggcaagugcgauccguauauuaagauaucaauagggaagaagagcgugucagaucaggacaauuacauccccuguacccuggagcccguauucggaaaaauguucgaauugaccuguacacuaccccuugagaaggauuugaaaauuaccuuauaugacuacgaccugcuuucuaaggaugagaagaucggcgaaacuguuguagaccuugagaauagacugcugucaaaauucggugcucguuguggacuaccccaaacauacugcguuucggguccaaaucaguggcgcgaccagcugagaccgucacaacuuuugcaccuauuuugucaacagcacagaguuaaggcaccggucuaucgcaccgaucgaguaauguuucaggauaaggaauacuccauugaagagauugaagcuggccggaucccaaacccacaccuggggccgguggaagaacgccuggcucugcauguguuacagcaacagggacucgugccugagcacguggagucuagaccccuuuacucuccuuuacaaccagacauugaacagggaaagcugcagauguggguagacuuguuuccuaaggcacuaggaagacccggacccccauucaacauuacccccagacgggccaggagguuuuuccugagauguaucauuuggaauacucgggacgucauuuuagacgacuuaagucucaccggcgagaagaugagcgacauuuacguuaagggauggaugauugguuuugaggagcauaagcagaaaacggacguucacuaucggagucucggcggcgaagguaacuuuaauuggcgcuuuaucuuuccuuucgacuaccugcccgcggaacagguguguacuauagcuaaaaaggacgcguuuuggcggcuugauaagacugaaagcaaaauaccagcucgaguaguuuuucaaauaugggauaacgauaaauuuucauucgacgacuuuuugggcagccugcagcuagacuugaaucgaaugccuaagccagcgaaaacggcgaaaaaauguucccucgaccaacuugaugaugcuuuucaccccgagugguucgugucccuguuugagcaaaaaacuguaaaagguugguggcccugcguggcagaggaaggcgagaaaaaaauccucgccgggaaacuggagaugacauuggaaaucguggccgaauccgaacacgaggagagaccugcagggcaaggucgcgaugagccaaacaugaauccaaaguuggaggacccuagacgcccagacacaucuuuucugugguucacaucucccuauaagacuaugaaauucauccuguggcguagguucaggugggccauaauccuguuuauaauauuguucauacuacuauuguucuuggcuauuuuuaucuaugcuuuccccaauuacgcagcuaugaaacuggugaaaccauucaguuag

SEQ ID NO: 49042 - protein, 2098 aa, Artificial Sequence
  derived and/or modified sequence
MLCCLLVRASNLPSAKKDRRSDPVASLTFRGVKKRTKVIKNSVNPVWNEGFEWDLKGIPLDQGSELHVVVKDHETMGRNRFLGEAKVPLREVLATPSLSASFNAPLLDTKKQPTGASLVLQVSYTPLPGAVPLFPPPTPLEPSPTLPDLDVVAGGGQSRAETWSLLSDSTMDTRYSGKKWPAPTDTGGEEDTEDQGLTGDEAEPFLDQSGGPGAPTTPRKLPSRPPPHYPGIKRKRSAPTSRKLLSDKPQDFQIRVQVIEGRQLPGVNIKPVVKVTAAGQTKRTRIHKGNSPLFNETLFFNLFDSPGELFDEPIFITVVDSRSLRTDALLGEFRMDVGTIYREPRHAYLRKWLLLSDPDDFSAGARGYLKTSLCVLGPGDEAPLERKDPSEDKEDIESNLLRPTGVALRGAHFCLKVFRAEDLPQMDDAVMDNVKQIFGFESNKKNLVDPFVEVSFAGKMLCSKILEKTANPQWNQNITLPAMFPSMCEKMRIRIIDWDRLTHNDIVATTYLSMSKISAPGGEIEVDDYLGFLPTFGPCYINLYGSPREFTGFPDPYTELNTGKGEGVAYRGRLLLSLETKLVEHSEQKVEDLPADDILRVEKYLRRRKYSLFAAFYSATMLQDVDDAIQFEVSIGNYGNKFDMTCLPLASTTQYSRAVFDGCHYYYLPWGNVKPVVVLSSYWEDISHRIETQNQLLGIADRLEAGLEQVHLALKAQCSTEDVDSLVAQLTDELIAGCSQPLGDIHETPSATHLDQYLYQLRTHHLSQITEAALALKLGHSELPAALEQAEDWLLRLRALAEEPQNSLPDIVIWMLQGDKRVAYQRVPAHQVLFSRRGANYCGKNCGKLQTIFLKYPMEKVPGARMPVQIRVKLWFGLSVDEKEFNQFAEGKLSVFAETYENETKLALVGNWGTTGLTYPKFSDVTGKIKLPKDSFRPSAGWTWAGDWFVCPEKTLLHDMDAGHLSFVEEVFENQTRLPGGQWIYMSDNYTDVNGEKVLPKDDIECPLGWKWEDEEWSTDLNRAVDEQGWEYSITIPPERKPKHWVPAEKMYYTHRRRRWVRLRRRDLSQMEALKRHRQAEAEGEGWEYASLFGWKFHLEYRKTDAFRRRRWRRRMEPLEKTGPAAVFALEGALGGVMDDKSEDSMSVSTLSFGVNRPTISCIFDYGNRYHLRCYMYQARDLAAMDKDSFSDPYAIVSFLHQSQKTVVVKNTLNPTWDQTLIFYEIEIFGEPATVAEQPPSIVVELYDHDTYGADEFMGRCICQPSLERMPRLAWFPLTRGSQPSGELLASFELIQREKPAIHHIPGFEVQETSRILDESEDTDLPYPPPQREANIYMVPQNIKPALQRTAIEILAWGLRNMKSYQLANISSPSLVVECGGQTVQSCVIRNLRKNPNFDICTLFMEVMLPREELYCPPITVKVIDNRQFGRRPVVGQCTIRSLESFLCDPYSAESPSPQGGPDDVSLLSPGEDVLIDIDDKEPLIPIQEEEFIDWWSKFFASIGEREKCGSYLEKDFDTLKVYDTQLENVEAFEGLSDFCNTFKLYRGKTQEETEDPSVIGEFKGLFKIYPLPEDPAIPMPPRQFHQLAAQGPQECLVRIYIVRAFGLQPKDPNGKCDPYIKISIGKKSVSDQDNYIPCTLEPVFGKMFELTCTLPLEKDLKITLYDYDLLSKDEKIGETVVDLENRLLSKFGARCGLPQTYCVSGPNQWRDQLRPSQLLHLFCQQHRVKAPVYRTDRVMFQDKEYSIEEIEAGRIPNPHLGPVEERLALHVLQQQGLVPEHVESRPLYSPLQPDIEQGKLQMWVDLFPKALGRPGPPFNITPRRARRFFLRCIIWNTRDVILDDLSLTGEKMSDIYVKGWMIGFEEHKQKTDVHYRSLGGEGNFNWRFIFPFDYLPAEQVCTIAKKDAFWRLDKTESKIPARVVFQIWDNDKFSFDDFLGSLQLDLNRMPKPAKTAKKCSLDQLDDAFHPEWFVSLFEQKTVKGWWPCVAEEGEKKILAGKLEMTLEIVAESEHEERPAGQGRDEPNMNPKLEDPRRPDTSFLWFTSPYKTMKFILWRRFRWAIILFIILFILLLFLAIFIYAFPNYAAMKLVKPFS

SEQ ID NO: 49043 - DNA, 6709 bp, Artificial Sequence
  derived and/or modified sequence
tctccgcggaggagcagcgaaggcgacagctctcttggcgcggctgcctgggagccgggcgcttgctgggtgggtgctcgggcccggtgctcccgctcccgccctgactgcgcgcctgtgtgccgccggggctgcccagccatgctgtgctgcctgctggtgagggccagcaacctccccagtgcgaagaaggaccggcgcagcgaccctgtcgcaagcctgactttccgaggggtgaagaagagaaccaaagtcatcaagaacagcgtgaaccctgtatggaatgagggatttgaatgggacctcaagggcatccccctggaccagggctctgagcttcatgtggtggtcaaagaccatgagacgatggggaggaacaggttcctgggggaagccaaggtcccactccgagaggtcctcgccacccctagtctgtccgccagcttcaatgcccccctgctggacaccaagaagcagcccacaggggcctcgctggtcctgcaggtgtcctacacaccgctgcctggagctgtgcccctgttcccgccccctactcctctggagccctccccgactctgcctgacctggatgtagtggcaggcgggggacagagccgggccgagacttggtccctgctcagtgacagcaccatggacacgagatactctggaaagaagtggccggcccccacggacacaggaggagaggaagacacagaggaccagggactcactggagatgaggcggagccattcctggatcaaagcggaggcccgggggctcccaccaccccaaggaaactaccttcacgtcctccgccccactaccccgggatcaaaagaaagcgaagtgcgcctacatctagaaagctgctgtcagacaaaccgcaggatttccagatcagggtccaggtgatcgaggggcgccagctgccgggggtgaacatcaagcctgtggtcaaggttaccgctgcagggcagaccaagcggacgcggatccacaagggaaacagcccactcttcaatgagactcttttcttcaacttgtttgactctcctggggagctgtttgatgagcccatctttatcacggtggtagactctcgttctctcaggacagatgctctcctcggggagttccggatggacgtgggcaccatttacagagagccccggcacgcctatctcaggaagtggctgctgctctcagaccctgatgacttctctgctggggccagaggctacctgaaaacaagcctttgtgtgctggggcctggggacgaagcgcctctggagagaaaagacccctctgaagacaaggaggacattgaaagcaacctgctccggcccacaggcgtagccctgcgaggagcccacttctgcctgaaggtcttccgggccgaggacttgccgcagatggacgatgccgtgatggacaacgtgaaacagatctttggcttcgagagtaacaagaagaacttggtggacccctttgtggaggtcagctttgcggggaaaatgctgtgcagcaagatcttggagaagacggccaaccctcagtggaaccagaacatcacactgcctgccatgtttccctccatgtgcgaaaaaatgaggattcgtatcatagactgggaccgcctgactcacaatgacatcgtggctaccacctacctgagtatgtcgaaaatctctgcccctggaggagaaatagaagtggatgactacctgggcttcctccccacttttgggccctgctacatcaacctctatggcagtcccagagagttcacaggcttcccagacccctacacagagctcaacacaggcaagggggaaggtgtggcttatcgtggccggcttctgctctccctggagaccaagctggtggagcacagtgaacagaaggtggaggaccttcctgcggatgacatcctccgggtggagaagtaccttaggaggcgcaagtactccctgtttgcggccttctactcagccaccatgctgcaggatgtggatgatgccatccagtttgaggtcagcatcgggaactacgggaacaagttcgacatgacctgcctgccgctggcctccaccactcagtacagccgtgcagtctttgacgggtgccactactactacctaccctggggtaacgtgaaacctgtggtggtgctgtcatcctactgggaggacatcagccatagaatcgagactcagaaccagctgcttgggattgctgaccggctggaagctggcctggagcaggtccacctggccctgaaggcgcagtgctccacggaggacgtggactcgctggtggctcagctgacggatgagctcatcgcaggctgcagccagcctctgggtgacatccatgagacaccctctgccacccacctggaccagtacctgtaccagctgcgcacccatcacctgagccaaatcactgaggctgccctggccctgaagctcggccacagtgagctccctgcagctctggagcaggcggaggactggctcctgcgtctgcgtgccctggcagaggagccccagaacagcctgccggacatcgtcatctggatgctgcagggagacaagcgtgtggcataccagcgggtgcccgcccaccaagtcctcttctcccggcggggtgccaactactgtggcaagaattgtgggaagctacagacaatctttctgaaatatccgatggagaaggtgcctggcgcccggatgccagtgcagatacgggtcaagctgtggtttgggctctcagtggatgagaaggagttcaaccagtttgctgaggggaagctgtctgtctttgctgaaacctatgagaacgagactaagttggcccttgttgggaactggggcacaacgggcctcacctaccccaagttttctgacgtcacgggcaagatcaagctacccaaggacagcttccgcccctcggccggctggacctgggctggagattggttcgtgtgtccggagaagactctgctccatgacatggacgccggtcacctgagcttcgtggaagaggtgtttgagaaccagacccggcttcccggaggccagtggatctacatgagtgacaactacaccgatgtgaacggggagaaggtgcttcccaaggatgacattgagtgcccactgggctggaagtgggaagatgaggaatggtccacagacctcaaccgggctgtcgatgagcaaggctgggagtatagcatcaccatccccccggagcggaagccgaagcactgggtccctgctgagaagatgtactacacacaccgacggcggcgctgggtgcgcctgcgcaggagggatctcagccaaatggaagcactgaaaaggcacaggcaggcggaggcggagggcgagggctgggagtacgcctctctttttggctggaagttccacctcgagtaccgcaagacagatgccttccgccgccgccgctggcgccgtcgcatggagccactggagaagacggggcctgcagctgtgtttgcccttgagggggccctgggcggcgtgatggatgacaagagtgaagattccatgtccgtctccaccttgagcttcggtgtgaacagacccacgatttcctgcatattcgactatgggaaccgctaccatctacgctgctacatgtaccaggcccgggacctggctgcgatggacaaggactctttttctgatccctatgccatcgtctccttcctgcaccagagccagaagacggtggtggtgaagaacacccttaaccccacctgggaccagacgctcatcttctacgagatcgagatctttggcgagccggccacagttgctgagcaaccgcccagcattgtggtggagctgtacgaccatgacacttatggtgcagacgagtttatgggtcgctgcatctgtcaaccgagtctggaacggatgccacggctggcctggttcccactgacgaggggcagccagccgtcgggggagctgctggcctcttttgagctcatccagagagagaagccggccatccaccatattcctggttttgaggtgcaggagacatcaaggatcctggatgagtctgaggacacagacctgccctacccaccaccccagagggaggccaacatctacatggttcctcagaacatcaagccagcgctccagcgtaccgccatcgagatcctggcatggggcctgcggaacatgaagagttaccagctggccaacatctcctcccccagcctcgtggtagagtgtgggggccagacggtgcagtcctgtgtcatcaggaacctccggaagaaccccaactttgacatctgcaccctcttcatggaagtgatgctgcccagggaggagctctactgcccccccatcaccgtcaaggtcatcgataaccgccagtttggccgccggcctgtggtgggccagtgtaccatccgctccctggagagcttcctgtgtgacccctactcggcggagagtccatccccacagggtggcccagacgatgtgagcctactcagtcctggggaagacgtgctcatcgacattgatgacaaggagcccctcatccccatccaggaggaagagttcatcgattggtggagcaaattctttgcctccataggggagagggaaaagtgcggctcctacctggagaaggattttgacaccctgaaggtctatgacacacagctggagaatgtggaggcctttgagggcctgtctgacttttgtaacaccttcaagctgtaccggggcaagacgcaggaggagacagaagatccatctgtgattggtgaatttaagggcctcttcaaaatttatcccctcccagaagacccagccatccccatgcccccaagacagttccaccagctggccgcccagggaccccaggagtgcttggtccgtatctacattgtccgagcatttggcctgcagcccaaggaccccaatggaaagtgtgatccttacatcaagatctccatagggaagaaatcagtgagtgaccaggataactacatcccctgcacgctggagcccgtatttggaaagatgttcgagctgacctgcactctgcctctggagaaggacctaaagatcactctctatgactatgacctcctctccaaggacgaaaagatcggtgagacggtcgtcgacctggagaacaggctgctgtccaagtttggggctcgctgtggactcccacagacctactgtgtctctggaccgaaccagtggcgggaccagctccgcccctcccagctcctccacctcttctgccagcagcatagagtcaaggcacctgtgtaccggacagaccgtgtaatgtttcaggataaagaatattccattgaagagatagaggctggcaggatcccaaacccacacctgggcccagtggaggagcgtctggctctgcatgtgcttcagcagcagggcctggtcccggagcacgtggagtcacggcccctctacagccccctgcagccagacatcgagcaggggaagctgcagatgtgggtcgacctatttccgaaggccctggggcggcctggacctcccttcaacatcaccccacggagagccagaaggtttttcctgcgttgtattatctggaataccagagatgtgatcctggatgacctgagcctcacgggggagaagatgagcgacatttatgtgaaaggttggatgattggctttgaagaacacaagcaaaagacagacgtgcattatcgttccctgggaggtgaaggcaacttcaactggaggttcattttccccttcgactacctgccagctgagcaagtctgtaccattgccaagaaggatgccttctggaggctggacaagactgagagcaaaatcccagcacgagtggtgttccagatctgggacaatgacaagttctcctttgatgattttctgggctccctgcagctcgatctcaaccgcatgcccaagccagccaagacagccaagaagtgctccttggaccagctggatgatgctttccacccagaatggtttgtgtccctttttgagcagaaaacagtgaagggctggtggccctgtgtagcagaagagggtgagaagaaaatactggcgggcaagctggaaatgaccttggagattgtagcagagagtgagcatgaggagcggcctgctggccagggccgggatgagcccaacatgaaccctaagcttgaggacccaaggcgccccgacacctccttcctgtggtttacctccccatacaagaccatgaagttcatcctgtggcggcgtttccggtgggccatcatcctcttcatcatcctcttcatcctgctgctgttcctggccatcttcatctacgccttcccgaactatgctgccatgaagctggtgaagcccttcagctgaggactctcctgccctgtagaaggggccgtggggtcccctccagcatgggactggcctgcctcctccgcccagctcggcgagctcctccagacctcctaggcctgattgtcctgccagggtgggcagacagacagatggaccggcccacactcccagagttgctaacatggagctctgagatcaccccacttccatcatttccttctcccccaacccaacgcttttttggatcagctcagacatatttcagtataaaacagttggaaccaca

SEQ ID NO: 49044 - DNA, 6294 bp, Artificial Sequence
  derived and/or modified sequence
atgctgtgctgcctgctggtgcgcgccagcaacctgcccagcgccaagaaggaccgccgcagcgaccccgtggccagcctgaccttccgcggcgtgaagaagcgcaccaaggtgatcaagaacagcgtgaaccccgtgtggaacgagggcttcgagtgggacctgaagggcatccccctggaccagggcagcgagctgcacgtggtggtgaaggaccacgagaccatgggccgcaaccgcttcctgggcgaggccaaggtgcccctgcgcgaggtgctggccacccccagcctgagcgccagcttcaacgcccccctgctggacaccaagaagcagcccaccggcgccagcctggtgctgcaggtgagctacacccccctgcccggcgccgtgcccctgttccccccccccacccccctggagcccagccccaccctgcccgacctggacgtggtggccggcggcggccagagccgcgccgagacctggagcctgctgagcgacagcaccatggacacccgctacagcggcaagaagtggcccgcccccaccgacaccggcggcgaggaggacaccgaggaccagggcctgaccggcgacgaggccgagcccttcctggaccagagcggcggccccggcgcccccaccaccccccgcaagctgcccagccgcccccccccccactaccccggcatcaagcgcaagcgcagcgcccccaccagccgcaagctgctgagcgacaagccccaggacttccagatccgcgtgcaggtgatcgagggccgccagctgcccggcgtgaacatcaagcccgtggtgaaggtgaccgccgccggccagaccaagcgcacccgcatccacaagggcaacagccccctgttcaacgagaccctgttcttcaacctgttcgacagccccggcgagctgttcgacgagcccatcttcatcaccgtggtggacagccgcagcctgcgcaccgacgccctgctgggcgagttccgcatggacgtgggcaccatctaccgcgagccccgccacgcctacctgcgcaagtggctgctgctgagcgaccccgacgacttcagcgccggcgcccgcggctacctgaagaccagcctgtgcgtgctgggccccggcgacgaggcccccctggagcgcaaggaccccagcgaggacaaggaggacatcgagagcaacctgctgcgccccaccggcgtggccctgcgcggcgcccacttctgcctgaaggtgttccgcgccgaggacctgccccagatggacgacgccgtgatggacaacgtgaagcagatcttcggcttcgagagcaacaagaagaacctggtggaccccttcgtggaggtgagcttcgccggcaagatgctgtgcagcaagatcctggagaagaccgccaacccccagtggaaccagaacatcaccctgcccgccatgttccccagcatgtgcgagaagatgcgcatccgcatcatcgactgggaccgcctgacccacaacgacatcgtggccaccacctacctgagcatgagcaagatcagcgcccccggcggcgagatcgaggtggacgactacctgggcttcctgcccaccttcggcccctgctacatcaacctgtacggcagcccccgcgagttcaccggcttccccgacccctacaccgagctgaacaccggcaagggcgagggcgtggcctaccgcggccgcctgctgctgagcctggagaccaagctggtggagcacagcgagcagaaggtggaggacctgcccgccgacgacatcctgcgcgtggagaagtacctgcgccgccgcaagtacagcctgttcgccgccttctacagcgccaccatgctgcaggacgtggacgacgccatccagttcgaggtgagcatcggcaactacggcaacaagttcgacatgacctgcctgcccctggccagcaccacccagtacagccgcgccgtgttcgacggctgccactactactacctgccctggggcaacgtgaagcccgtggtggtgctgagcagctactgggaggacatcagccaccgcatcgagacccagaaccagctgctgggcatcgccgaccgcctggaggccggcctggagcaggtgcacctggccctgaaggcccagtgcagcaccgaggacgtggacagcctggtggcccagctgaccgacgagctgatcgccggctgcagccagcccctgggcgacatccacgagacccccagcgccacccacctggaccagtacctgtaccagctgcgcacccaccacctgagccagatcaccgaggccgccctggccctgaagctgggccacagcgagctgcccgccgccctggagcaggccgaggactggctgctgcgcctgcgcgccctggccgaggagccccagaacagcctgcccgacatcgtgatctggatgctgcagggcgacaagcgcgtggcctaccagcgcgtgcccgcccaccaggtgctgttcagccgccgcggcgccaactactgcggcaagaactgcggcaagctgcagaccatcttcctgaagtaccccatggagaaggtgcccggcgcccgcatgcccgtgcagatccgcgtgaagctgtggttcggcctgagcgtggacgagaaggagttcaaccagttcgccgagggcaagctgagcgtgttcgccgagacctacgagaacgagaccaagctggccctggtgggcaactggggcaccaccggcctgacctaccccaagttcagcgacgtgaccggcaagatcaagctgcccaaggacagcttccgccccagcgccggctggacctgggccggcgactggttcgtgtgccccgagaagaccctgctgcacgacatggacgccggccacctgagcttcgtggaggaggtgttcgagaaccagacccgcctgcccggcggccagtggatctacatgagcgacaactacaccgacgtgaacggcgagaaggtgctgcccaaggacgacatcgagtgccccctgggctggaagtgggaggacgaggagtggagcaccgacctgaaccgcgccgtggacgagcagggctgggagtacagcatcaccatcccccccgagcgcaagcccaagcactgggtgcccgccgagaagatgtactacacccaccgccgccgccgctgggtgcgcctgcgccgccgcgacctgagccagatggaggccctgaagcgccaccgccaggccgaggccgagggcgagggctgggagtacgccagcctgttcggctggaagttccacctggagtaccgcaagaccgacgccttccgccgccgccgctggcgccgccgcatggagcccctggagaagaccggccccgccgccgtgttcgccctggagggcgccctgggcggcgtgatggacgacaagagcgaggacagcatgagcgtgagcaccctgagcttcggcgtgaaccgccccaccatcagctgcatcttcgactacggcaaccgctaccacctgcgctgctacatgtaccaggcccgcgacctggccgccatggacaaggacagcttcagcgacccctacgccatcgtgagcttcctgcaccagagccagaagaccgtggtggtgaagaacaccctgaaccccacctgggaccagaccctgatcttctacgagatcgagatcttcggcgagcccgccaccgtggccgagcagccccccagcatcgtggtggagctgtacgaccacgacacctacggcgccgacgagttcatgggccgctgcatctgccagcccagcctggagcgcatgccccgcctggcctggttccccctgacccgcggcagccagcccagcggcgagctgctggccagcttcgagctgatccagcgcgagaagcccgccatccaccacatccccggcttcgaggtgcaggagaccagccgcatcctggacgagagcgaggacaccgacctgccctacccccccccccagcgcgaggccaacatctacatggtgccccagaacatcaagcccgccctgcagcgcaccgccatcgagatcctggcctggggcctgcgcaacatgaagagctaccagctggccaacatcagcagccccagcctggtggtggagtgcggcggccagaccgtgcagagctgcgtgatccgcaacctgcgcaagaaccccaacttcgacatctgcaccctgttcatggaggtgatgctgccccgcgaggagctgtactgcccccccatcaccgtgaaggtgatcgacaaccgccagttcggccgccgccccgtggtgggccagtgcaccatccgcagcctggagagcttcctgtgcgacccctacagcgccgagagccccagcccccagggcggccccgacgacgtgagcctgctgagccccggcgaggacgtgctgatcgacatcgacgacaaggagcccctgatccccatccaggaggaggagttcatcgactggtggagcaagttcttcgccagcatcggcgagcgcgagaagtgcggcagctacctggagaaggacttcgacaccctgaaggtgtacgacacccagctggagaacgtggaggccttcgagggcctgagcgacttctgcaacaccttcaagctgtaccgcggcaagacccaggaggagaccgaggaccccagcgtgatcggcgagttcaagggcctgttcaagatctaccccctgcccgaggaccccgccatccccatgcccccccgccagttccaccagctggccgcccagggcccccaggagtgcctggtgcgcatctacatcgtgcgcgccttcggcctgcagcccaaggaccccaacggcaagtgcgacccctacatcaagatcagcatcggcaagaagagcgtgagcgaccaggacaactacatcccctgcaccctggagcccgtgttcggcaagatgttcgagctgacctgcaccctgcccctggagaaggacctgaagatcaccctgtacgactacgacctgctgagcaaggacgagaagatcggcgagaccgtggtggacctggagaaccgcctgctgagcaagttcggcgcccgctgcggcctgccccagacctactgcgtgagcggccccaaccagtggcgcgaccagctgcgccccagccagctgctgcacctgttctgccagcagcaccgcgtgaaggcccccgtgtaccgcaccgaccgcgtgatgttccaggacaaggagtacagcatcgaggagatcgaggccggccgcatccccaacccccacctgggccccgtggaggagcgcctggccctgcacgtgctgcagcagcagggcctggtgcccgagcacgtggagagccgccccctgtacagccccctgcagcccgacatcgagcagggcaagctgcagatgtgggtggacctgttccccaaggccctgggccgccccggcccccccttcaacatcaccccccgccgcgcccgccgcttcttcctgcgctgcatcatctggaacacccgcgacgtgatcctggacgacctgagcctgaccggcgagaagatgagcgacatctacgtgaagggctggatgatcggcttcgaggagcacaagcagaagaccgacgtgcactaccgcagcctgggcggcgagggcaacttcaactggcgcttcatcttccccttcgactacctgcccgccgagcaggtgtgcaccatcgccaagaaggacgccttctggcgcctggacaagaccgagagcaagatccccgcccgcgtggtgttccagatctgggacaacgacaagttcagcttcgacgacttcctgggcagcctgcagctggacctgaaccgcatgcccaagcccgccaagaccgccaagaagtgcagcctggaccagctggacgacgccttccaccccgagtggttcgtgagcctgttcgagcagaagaccgtgaagggctggtggccctgcgtggccgaggagggcgagaagaagatcctggccggcaagctggagatgaccctggagatcgtggccgagagcgagcacgaggagcgccccgccggccagggccgcgacgagcccaacatgaaccccaagctggaggacccccgccgccccgacaccagcttcctgtggttcaccagcccctacaagaccatgaagttcatcctgtggcgccgcttccgctgggccatcatcctgttcatcatcctgttcatcctgctgctgttcctggccatcttcatctacgccttccccaactacgccgccatgaagctggtgaagcccttcagc

SEQ ID NO: 49045 - DNA, 6297 bp, Artificial Sequence
  derived and/or modified sequence
atgctgtgctgcctgctggtgagagccagcaacctgcccagcgccaagaaggacagaagaagcgaccccgtggccagcctgaccttcagaggcgtgaagaagagaaccaaggtgatcaagaacagcgtgaaccccgtgtggaacgagggcttcgagtgggacctgaagggcatccccctggaccagggcagcgagctgcacgtggtggtgaaggaccacgagaccatgggcagaaacagattcctgggcgaggccaaggtgcccctgagagaggtgctggccacccccagcctgagcgccagcttcaacgcccccctgctggacaccaagaagcagcccaccggcgccagcctggtgctgcaggtgagctacacccccctgcccggcgccgtgcccctgttccccccccccacccccctggagcccagccccaccctgcccgacctggacgtggtggccggcggcggccagagcagagccgagacctggagcctgctgagcgacagcaccatggacaccagatacagcggcaagaagtggcccgcccccaccgacaccggcggcgaggaggacaccgaggaccagggcctgaccggcgacgaggccgagcccttcctggaccagagcggcggccccggcgcccccaccacccccagaaagctgcccagcagaccccccccccactaccccggcatcaagagaaagagaagcgcccccaccagcagaaagctgctgagcgacaagccccaggacttccagatcagagtgcaggtgatcgagggcagacagctgcccggcgtgaacatcaagcccgtggtgaaggtgaccgccgccggccagaccaagagaaccagaatccacaagggcaacagccccctgttcaacgagaccctgttcttcaacctgttcgacagccccggcgagctgttcgacgagcccatcttcatcaccgtggtggacagcagaagcctgagaaccgacgccctgctgggcgagttcagaatggacgtgggcaccatctacagagagcccagacacgcctacctgagaaagtggctgctgctgagcgaccccgacgacttcagcgccggcgccagaggctacctgaagaccagcctgtgcgtgctgggccccggcgacgaggcccccctggagagaaaggaccccagcgaggacaaggaggacatcgagagcaacctgctgagacccaccggcgtggccctgagaggcgcccacttctgcctgaaggtgttcagagccgaggacctgccccagatggacgacgccgtgatggacaacgtgaagcagatcttcggcttcgagagcaacaagaagaacctggtggaccccttcgtggaggtgagcttcgccggcaagatgctgtgcagcaagatcctggagaagaccgccaacccccagtggaaccagaacatcaccctgcccgccatgttccccagcatgtgcgagaagatgagaatcagaatcatcgactgggacagactgacccacaacgacatcgtggccaccacctacctgagcatgagcaagatcagcgcccccggcggcgagatcgaggtggacgactacctgggcttcctgcccaccttcggcccctgctacatcaacctgtacggcagccccagagagttcaccggcttccccgacccctacaccgagctgaacaccggcaagggcgagggcgtggcctacagaggcagactgctgctgagcctggagaccaagctggtggagcacagcgagcagaaggtggaggacctgcccgccgacgacatcctgagagtggagaagtacctgagaagaagaaagtacagcctgttcgccgccttctacagcgccaccatgctgcaggacgtggacgacgccatccagttcgaggtgagcatcggcaactacggcaacaagttcgacatgacctgcctgcccctggccagcaccacccagtacagcagagccgtgttcgacggctgccactactactacctgccctggggcaacgtgaagcccgtggtggtgctgagcagctactgggaggacatcagccacagaatcgagacccagaaccagctgctgggcatcgccgacagactggaggccggcctggagcaggtgcacctggccctgaaggcccagtgcagcaccgaggacgtggacagcctggtggcccagctgaccgacgagctgatcgccggctgcagccagcccctgggcgacatccacgagacccccagcgccacccacctggaccagtacctgtaccagctgagaacccaccacctgagccagatcaccgaggccgccctggccctgaagctgggccacagcgagctgcccgccgccctggagcaggccgaggactggctgctgagactgagagccctggccgaggagccccagaacagcctgcccgacatcgtgatctggatgctgcagggcgacaagagagtggcctaccagagagtgcccgcccaccaggtgctgttcagcagaagaggcgccaactactgcggcaagaactgcggcaagctgcagaccatcttcctgaagtaccccatggagaaggtgcccggcgccagaatgcccgtgcagatcagagtgaagctgtggttcggcctgagcgtggacgagaaggagttcaaccagttcgccgagggcaagctgagcgtgttcgccgagacctacgagaacgagaccaagctggccctggtgggcaactggggcaccaccggcctgacctaccccaagttcagcgacgtgaccggcaagatcaagctgcccaaggacagcttcagacccagcgccggctggacctgggccggcgactggttcgtgtgccccgagaagaccctgctgcacgacatggacgccggccacctgagcttcgtggaggaggtgttcgagaaccagaccagactgcccggcggccagtggatctacatgagcgacaactacaccgacgtgaacggcgagaaggtgctgcccaaggacgacatcgagtgccccctgggctggaagtgggaggacgaggagtggagcaccgacctgaacagagccgtggacgagcagggctgggagtacagcatcaccatcccccccgagagaaagcccaagcactgggtgcccgccgagaagatgtactacacccacagaagaagaagatgggtgagactgagaagaagagacctgagccagatggaggccctgaagagacacagacaggccgaggccgagggcgagggctgggagtacgccagcctgttcggctggaagttccacctggagtacagaaagaccgacgccttcagaagaagaagatggagaagaagaatggagcccctggagaagaccggccccgccgccgtgttcgccctggagggcgccctgggcggcgtgatggacgacaagagcgaggacagcatgagcgtgagcaccctgagcttcggcgtgaacagacccaccatcagctgcatcttcgactacggcaacagataccacctgagatgctacatgtaccaggccagagacctggccgccatggacaaggacagcttcagcgacccctacgccatcgtgagcttcctgcaccagagccagaagaccgtggtggtgaagaacaccctgaaccccacctgggaccagaccctgatcttctacgagatcgagatcttcggcgagcccgccaccgtggccgagcagccccccagcatcgtggtggagctgtacgaccacgacacctacggcgccgacgagttcatgggcagatgcatctgccagcccagcctggagagaatgcccagactggcctggttccccctgaccagaggcagccagcccagcggcgagctgctggccagcttcgagctgatccagagagagaagcccgccatccaccacatccccggcttcgaggtgcaggagaccagcagaatcctggacgagagcgaggacaccgacctgccctacccccccccccagagagaggccaacatctacatggtgccccagaacatcaagcccgccctgcagagaaccgccatcgagatcctggcctggggcctgagaaacatgaagagctaccagctggccaacatcagcagccccagcctggtggtggagtgcggcggccagaccgtgcagagctgcgtgatcagaaacctgagaaagaaccccaacttcgacatctgcaccctgttcatggaggtgatgctgcccagagaggagctgtactgcccccccatcaccgtgaaggtgatcgacaacagacagttcggcagaagacccgtggtgggccagtgcaccatcagaagcctggagagcttcctgtgcgacccctacagcgccgagagccccagcccccagggcggccccgacgacgtgagcctgctgagccccggcgaggacgtgctgatcgacatcgacgacaaggagcccctgatccccatccaggaggaggagttcatcgactggtggagcaagttcttcgccagcatcggcgagagagagaagtgcggcagctacctggagaaggacttcgacaccctgaaggtgtacgacacccagctggagaacgtggaggccttcgagggcctgagcgacttctgcaacaccttcaagctgtacagaggcaagacccaggaggagaccgaggaccccagcgtgatcggcgagttcaagggcctgttcaagatctaccccctgcccgaggaccccgccatccccatgccccccagacagttccaccagctggccgcccagggcccccaggagtgcctggtgagaatctacatcgtgagagccttcggcctgcagcccaaggaccccaacggcaagtgcgacccctacatcaagatcagcatcggcaagaagagcgtgagcgaccaggacaactacatcccctgcaccctggagcccgtgttcggcaagatgttcgagctgacctgcaccctgcccctggagaaggacctgaagatcaccctgtacgactacgacctgctgagcaaggacgagaagatcggcgagaccgtggtggacctggagaacagactgctgagcaagttcggcgccagatgcggcctgccccagacctactgcgtgagcggccccaaccagtggagagaccagctgagacccagccagctgctgcacctgttctgccagcagcacagagtgaaggcccccgtgtacagaaccgacagagtgatgttccaggacaaggagtacagcatcgaggagatcgaggccggcagaatccccaacccccacctgggccccgtggaggagagactggccctgcacgtgctgcagcagcagggcctggtgcccgagcacgtggagagcagacccctgtacagccccctgcagcccgacatcgagcagggcaagctgcagatgtgggtggacctgttccccaaggccctgggcagacccggcccccccttcaacatcacccccagaagagccagaagattcttcctgagatgcatcatctggaacaccagagacgtgatcctggacgacctgagcctgaccggcgagaagatgagcgacatctacgtgaagggctggatgatcggcttcgaggagcacaagcagaagaccgacgtgcactacagaagcctgggcggcgagggcaacttcaactggagattcatcttccccttcgactacctgcccgccgagcaggtgtgcaccatcgccaagaaggacgccttctggagactggacaagaccgagagcaagatccccgccagagtggtgttccagatctgggacaacgacaagttcagcttcgacgacttcctgggcagcctgcagctggacctgaacagaatgcccaagcccgccaagaccgccaagaagtgcagcctggaccagctggacgacgccttccaccccgagtggttcgtgagcctgttcgagcagaagaccgtgaagggctggtggccctgcgtggccgaggagggcgagaagaagatcctggccggcaagctggagatgaccctggagatcgtggccgagagcgagcacgaggagagacccgccggccagggcagagacgagcccaacatgaaccccaagctggaggaccccagaagacccgacaccagcttcctgtggttcaccagcccctacaagaccatgaagttcatcctgtggagaagattcagatgggccatcatcctgttcatcatcctgttcatcctgctgctgttcctggccatcttcatctacgccttccccaactacgccgccatgaagctggtgaagcccttcagctag

SEQ ID NO: 49046 - DNA, 6297 bp, Artificial Sequence
  derived and/or modified sequence
atgctctgctgcctgctagttagagcctccaatttgccgtcagccaagaaagaccgtcgcagtgacccggtggcatccctgacattcaggggagtaaagaaacggactaaggttattaagaatagtgtgaacccagtgtggaatgaaggatttgagtgggatctgaaaggaatacccctagatcaggggagtgagctgcatgtggtggtgaaagaccatgaaaccatgggtcgcaatcgcttcctgggggaggcaaaagtgcctctacgggaggtcctggctaccccatctctgtccgcaagttttaatgcccctcttcttgatacgaaaaagcagccaaccggcgcatcgttggttctgcaagtatcttatacacctttgccgggggctgtcccgctatttcccccacctacaccactggaaccatcccctaccttgcccgacctggatgtcgtggcaggcggcgggcagagtagggctgaaacctggagtctgctttcagactctacaatggatacgaggtatagtggcaaaaaatggcctgctcccaccgacaccggaggagaggaagacaccgaagaccagggcttgacgggggacgaagccgagcccttcctggaccagtctggcggccctggggctccaaccacccccaggaagctaccctctaggccccctccacactatcccgggatcaaaaggaaaagatcggcacccacttcccgtaagcttctgagcgacaaaccacaagacttccaaatcagggttcaagtgatcgaaggccgccagttaccgggagtgaatatcaaacccgtcgtgaaggtgacagcagcaggacagaccaaacggacgcggattcacaaaggaaactctccactgtttaacgagacactgttttttaacctgttcgatagcccgggtgaattattcgatgaacctatttttatcactgttgtggactcaagatccctgagaaccgacgcacttttaggtgagttcaggatggacgtgggtaccatataccgcgagcctcgtcacgcgtatttgcggaaatggttgttgttgagcgaccctgatgacttctctgctggggctcgggggtacctgaagacatcactgtgtgtcctgggcccaggggacgaagctccgctggaacgtaaggacccttccgaggacaaagaggacatcgaatcaaatctgctccggccaactggcgtggctttacgcggcgcccatttctgcttaaaagtgtttcgcgcagaggatctgccgcaaatggatgatgccgtcatggataatgtgaaacagatatttggatttgaatcgaacaaaaagaacctagtggacccttttgtcgaagtgtcttttgctggtaagatgctgtgcagtaaaatcctcgagaaaacagccaacccacagtggaatcagaacataactttgcctgctatgttcccctcaatgtgcgaaaagatgaggattaggatcatcgactgggacagactgacgcacaatgacatagtggcgactacctacttgagcatgtctaagattagcgctccaggaggagaaattgaggttgatgattatttgggtttcttgcccaccttcggcccttgctacattaacctgtacggctccccaagggaattcaccgggttcccagatccttatacagaactgaatacggggaaaggagaaggcgtagcctaccggggcaggctgctgctgtcactcgaaaccaaactggtggagcacagcgaacagaaagtggaagatctccccgccgacgatattttgcgggtagagaagtaccttcgtaggagaaaatactccctgttcgccgcattctattcggctaccatgctgcaggacgtagacgatgccatccagttcgaagtgtctattggcaactacggtaacaagtttgacatgacgtgcctccctctggcgtccaccacgcagtacagtcgggcggtatttgacggttgtcattactattatttaccatggggtaatgtaaagccagttgtcgtgctgtcctcttactgggaagatattagtcaccgcattgaaacccagaaccaactccttgggatcgccgacaggttagaagctggattggagcaggtgcacctcgcgctgaaggcccagtgttcaacagaggatgtggactctctggttgcccaacttacggacgagcttatcgcagggtgcagtcagcccctgggcgacattcacgaaaccccttcagccacgcatctggaccagtatctgtatcagctccgcacccaccacctgtctcagattactgaggcagccctggccttaaagttgggacattcagaacttcccgccgccttggagcaagccgaggactggctgttgcggctgcgggcgctcgctgaggagcctcagaattctctccctgacattgtcatctggatgttgcagggggacaagagagtggcctatcaaagagtccctgcacaccaagtgttgttcagcaggcggggggccaattactgtggcaaaaactgcggcaagctgcagacaatctttcttaagtaccccatggagaaagtcccaggggcaagaatgcccgttcagatcagagttaagttatggttcggactctctgtagacgaaaaggagttcaatcagttcgctgaaggtaaactgagtgtgttcgcagagacctacgagaacgagactaaacttgccctggtgggaaattgggggactactgggctcacctacccaaagttttccgatgtgaccggcaaaatcaaactgccaaaagattctttcaggccctcagccggctggacctgggccggggactggtttgtgtgcccagaaaaaacattactgcatgatatggacgccggccatttatcttttgtcgaggaggtgttcgagaaccagacaagactccctggcgggcagtggatatacatgagcgataattatactgacgtaaatggtgagaaggtcctgcccaaggacgacattgaatgtccgttgggctggaagtgggaggatgaggagtggagcacggacttgaaccgcgcagtggatgagcagggctgggaatattcgattaccatccctccagagagaaagccaaagcactgggtacctgctgaaaagatgtactacacgcaccgccggcgaaggtgggtcaggctcagacgcagggatctgagtcagatggaagcactgaaaaggcacaggcaggccgaagctgagggagagggttgggaatacgcctcactgttcggttggaagttccacctcgaatacaggaaaaccgatgcattccgccgacgcagatggagacgccgcatggaacccttagaaaagaccggccccgcagcagtgtttgccctcgagggagcgctcgggggagtgatggacgacaagtccgaagactccatgtcagtgtctactctgtcctttggtgtgaaccggccgaccatttcatgcatcttcgattatggaaataggtatcatttgcgttgttacatgtatcaagctcgggatctcgccgcaatggacaaagatagttttagcgatccgtacgcaatcgtgagttttctgcaccagtcacagaaaacagtggtcgtaaaaaatactctcaaccccacttgggatcagacacttatattttacgaaatcgagatttttggggagccggcaacagtggccgaacagccgccttccatcgtagtggaactttatgatcacgatacatacggcgcggatgagttcatgggccgatgcatctgccagccctcacttgaaagaatgcctagactagcatggttcccattgacgcggggcagccagcctagcggcgagctgctcgcaagcttcgagttgatccagagggaaaagccagcaattcaccatatcccaggatttgaggtgcaagagacttccagaatcctggacgaatctgaggataccgacttgccttatccccctccacagagggaagcgaatatctacatggtgccccaaaacataaagcctgccctgcagaggaccgccatagagatcttggcttgggggcttagaaacatgaaaagttaccaacttgccaacatctctagcccttctcttgtcgtggaatgtggaggacagacggtccagtcttgcgttataaggaacctgcgcaaaaatcctaattttgatatctgcacgcttttcatggaagtgatgctaccgcgcgaggagctctactgccctcccattaccgtaaaagtaattgacaatcgccagttcggccgacggccagtggtgggccagtgtaccatccgctccctcgaatcatttttatgcgacccctatagtgctgagagtccatccccacagggggggccagatgacgtcagcctgttaagccccggagaggacgtcctgatcgatatcgatgacaaagagccgcttattcctatccaggaagaggagtttatcgactggtggagtaaattcttcgcatccattggagagcgcgagaaatgtggatcttatctggagaaggattttgataccttaaaggtgtatgacacccagcttgagaatgtggaagctttcgaggggctgtctgacttctgcaacacattcaaactttacagagggaagacccaggaggagacagaggatccatccgtgattggcgaatttaaggggttgttcaaaatctaccccttgcccgaagatcccgccataccaatgccacctaggcagtttcatcagctcgcagctcagggtccccaggaatgtctcgttcggatctacatcgtgagggccttcgggctgcagcccaaagaccctaacgggaaatgtgatccctatatcaagatctccattgggaaaaagtctgtgtccgatcaggacaactatattccatgcaccctggagccagtattcgggaaaatgttcgaactgacctgcacacttccgcttgaaaaggacctgaagattactctctatgactacgatcttttaagcaaagacgaaaagattggcgagactgtcgtggaccttgagaaccgactgctatccaaattcggtgccaggtgtggcctgcctcagacctactgcgtgtcaggccctaaccagtggcgcgaccagttaaggccttcgcagttgctgcacctgttttgccagcagcacagagtcaaagcccctgtatacagaaccgacagagttatgttccaggataaagagtatagcattgaggagattgaagccgggcgcatccctaacccacatctgggcccagtggaagagcgacttgccctacatgtgttacaacagcagggccttgtcccagagcatgtggagtctaggccactgtactcacccctgcagccggacatcgagcagggaaaactgcagatgtgggtggacctgttccctaaagcgctgggtaggcctgggccaccctttaatattactcctaggagggcacgccggttcttccttcgatgcatcatctggaacacaagggacgtgatactggacgacctgagccttaccggcgaaaaaatgtcagacatctacgtcaaggggtggatgatcggctttgaggagcataagcagaagactgacgttcactatcgctctcttggtggcgagggcaactttaactggaggttcatctttcctttcgactaccttcccgctgaacaggtgtgtacaatcgccaagaaagatgccttctggcggttagacaagaccgaaagtaagatccctgcccgagtcgttttccagatatgggataacgacaagtttagtttcgatgactttctgggaagcctgcagctggacctaaacagaatgccaaaaccagcaaaaacggccaaaaagtgcagcctagatcagttggacgatgctttccaccccgagtggtttgtatctctgttcgagcagaagacagtcaaaggctggtggccatgtgtggccgaggaaggagagaaaaaaatcttagccggcaagttagagatgacgcttgaaattgttgccgaaagcgagcacgaggagcggccagccggccagggacgagatgaacccaacatgaatccaaagcttgaggacccacgacggcctgataccagcttcttatggtttacttctccctataagaccatgaagttcatcctttggcgtaggttccgatgggcaatcatcctctttataatcctgtttattttactgttgttcctggccatctttatctatgcctttcctaactacgctgctatgaagctggtcaagcctttctcctag

SEQ ID NO: 49047 - DNA, 6297 bp, Artificial Sequence
  derived and/or modified sequence
atgctgtgctgcctgctggtgcgggccagcaacctgcccagcgccaagaaggacagaagaagtgaccctgtggccagcctgaccttccggggcgtgaagaagaggaccaaggtgatcaagaacagcgtgaaccctgtgtggaatgaaggatttgagtgggacctgaagggcatccccctggaccagggcagcgagctgcacgtggtggtgaaggaccacgagaccatgggcaggaaccgcttcctgggggaggccaaggtgcccctgcgggaggtgctggccacccccagcctgagcgccagcttcaatgcccccctgctggacaccaagaagcagcccaccggggccagcctggtgctgcaggtgtcctacacccccctgcccggggctgtgcccctcttccccccacccacccccctggagcccagccccaccctgcctgacctggatgtggtggccggcggcggccagagcagagctgagacctggagcctgctgagtgacagcaccatggacacccgctacagcggcaagaagtggccagcccccacagacaccggcggggaggaggacacagaggaccagggcctgactggagatgaggccgagcccttcctggaccagagcggcggccctggggcccccaccacccccaggaagctgcccagccggcccccaccccactacccaggcatcaagaggaagaggtctgcccccaccagcaggaagctgctgagtgacaagccccaggacttccagatccgggtgcaggtgattgagggccggcagctgcccggggtgaacatcaagcctgtggtgaaggtgacagctgctggccagaccaagaggacccgcatccacaagggcaacagccccctcttcaatgagaccctcttcttcaacctgtttgacagccctggagagctgtttgatgagcccatcttcatcaccgtggtggacagccgcagcctgaggacagatgccctgctgggggagttcaggatggatgtgggcaccatctaccgggagcccaggcatgcctacctgaggaagtggctgctgctgagtgaccctgatgacttctctgctggggcccggggctacctgaagaccagcctgtgtgtgctgggccctggagatgaggcccccctggagaggaaggaccccagcgaggacaaggaggacatcgagagcaacctgctgcggcccaccggggtggccctgcggggggcccacttctgcctgaaggtgttccgggcagaggacctgccccagatggatgatgctgtgatggacaacgtgaagcagatcttcggctttgagagcaacaagaagaacctggtggacccctttgtggaggtgtcctttgctgggaagatgctgtgcagcaagatcctggagaagacagccaacccccagtggaaccagaacatcaccctgcctgccatgttccccagcatgtgtgagaagatgaggatccgcatcatcgactgggaccggctgacccacaatgacatcgtggccaccacctacctgtccatgagcaagatcagcgcccctggaggagaaattgaggtggatgactacctgggcttcctgcccaccttcggcccctgctacatcaacctgtatggcagcccccgggagttcaccggcttcccagacccctacacagagctgaacacaggcaagggggagggcgtggcctaccggggccgcctgctgctgagcctggagaccaagctggtggagcacagcgagcagaaggtggaggacctgcctgcagatgacatcctgcgggtggagaagtacctgcggcggaggaagtacagcctgtttgctgccttctacagcgccaccatgctgcaggatgtggatgatgccatccagtttgaggtgtccatcggcaactacggcaacaagtttgacatgacctgcctgcccctggccagcaccacccagtacagcagagctgtgtttgatggctgccactactactacctgccctggggcaatgtgaagcctgtggtggtgctgagcagctactgggaggacatcagccaccgcatcgagacccagaaccagctgctgggcattgctgaccggctggaggccggcctggagcaggtgcacctggccctgaaggcccagtgcagcacagaagatgtggacagcctggtggcccagctgacagatgagctgattgctggctgcagccagcccctgggggacatccacgagacccccagcgccacccacctggaccagtacctgtaccagctgcggacccaccacctgagccagatcacagaggccgccctggccctgaagctgggccacagcgagctgcctgctgccctggagcaggccgaggactggctgctgcggctgcgggccctggccgaggagccccagaacagcctgcctgacatcgtcatctggatgctgcagggcgacaagagggtggcctaccagagggtgcctgcccaccaggtgctcttcagccggcggggggccaactactgtgggaagaactgtgggaagctgcagaccatcttcctgaagtaccccatggagaaggtgcctggggccaggatgcctgtgcagatccgggtgaagctgtggtttggcctgtctgtggatgagaaggagttcaaccagtttgctgagggcaagctgtctgtgtttgctgagacctatgaaaatgagaccaagctggccctggtgggcaactggggcaccaccggcctgacctaccccaagttcagtgatgtgacaggcaagatcaagctgcccaaggacagcttccggcccagcgctggctggacctgggccggggactggtttgtgtgcccagagaagaccctgctgcatgacatggatgctggccacctgagctttgtggaggaggtgtttgagaaccagacccggctgcccggcggccagtggatctacatgtctgacaactacacagatgtgaatggagagaaggtgctgcccaaggatgacattgaatgtcccctgggctggaagtgggaggatgaggagtggagcacagacctgaacagagctgtggatgagcagggctgggagtacagcatcaccatccccccagagaggaagcccaagcactgggtgcctgctgagaagatgtactacacccacagaagaagacgctgggtgcggctgcggcggcgggacctgagccagatggaggccctgaagaggcaccggcaggccgaggccgagggggagggctgggagtatgccagcctgtttggctggaagttccacctggagtacaggaagacagatgccttcagaagaagacgctggaggaggaggatggagcccctggagaagacaggccctgctgctgtgtttgccctggagggcgccctgggcggcgtgatggatgacaagtcagaagattccatgtctgtgtccaccctgagctttggagtgaaccggcccaccatcagctgcatctttgattatggcaaccgctaccacctgcgctgctacatgtaccaggcccgggacctggccgccatggacaaggacagcttcagtgacccctatgccatcgtgtccttcctgcaccagagccagaagacagtggtggtgaagaacaccctgaaccccacctgggaccagaccctcatcttctatgaaattgagatctttggagagcccgccaccgtggccgagcagcccccatccatcgtggtggagctgtatgaccatgacacctacggggctgatgagttcatgggccgctgcatctgccagcccagcctggagaggatgccccggctggcctggttccccctgacccggggcagccagcccagcggggagctgctggccagctttgagctgatccagcgggagaagccagccatccaccacatccctggctttgaggtgcaggagaccagccgcatcctggatgaaagtgaggacacagacctgccctaccccccaccccagcgggaggccaacatctacatggtgccccagaacatcaagccagccctgcagaggacagccatcgagatcctggcctggggcctgaggaacatgaagagctaccagctggccaacatcagcagccccagcctggtggtggagtgtggcggccagacagtgcagagctgtgtgatccggaacctgaggaagaaccccaactttgacatctgcaccctcttcatggaggtgatgctgccccgggaggagctgtactgcccccccatcaccgtgaaggtgattgacaaccggcagtttggaagaagacctgtggtgggccagtgcaccatccgcagcctggagagcttcctgtgtgacccctacagcgctgagagccccagcccccagggcggcccagatgatgtgtccctgctgagccctggagaagatgtgctgattgatattgatgacaaggagcccctcatccccatccaggaggaggagttcatcgactggtggagcaagttctttgccagcattggagagcgggagaagtgtggcagctacctggagaaggactttgacaccctgaaggtgtatgacacccagctggagaatgtggaggcctttgagggcctgagtgacttctgcaacaccttcaagctgtaccggggcaagacccaggaggagacagaggaccccagcgtcatcggggagttcaagggcctcttcaagatctaccccctgcctgaggaccctgccatccccatgccaccccggcagttccaccagctggccgcccagggcccccaggagtgcctggtgcgcatctacatcgtgcgggccttcggcctgcagcccaaggaccccaacgggaaatgtgacccctacatcaagatcagcatcggcaagaagtctgtgtctgaccaggacaactacatcccctgcaccctggagcctgtgtttgggaagatgtttgagctgacctgcaccctgcccctggagaaggacctgaagatcaccctgtatgactatgacctgctgagcaaggatgagaagattggagagaccgtggtggacctggagaaccggctgctgagcaagtttggagcccgctgtggcctgccccagacctactgtgtgtctggccccaaccagtggagggaccagctgcggcccagccagctgctgcacctgttctgccagcagcaccgggtgaaggcccctgtgtacagaacagacagagtgatgttccaggacaaggagtacagcattgaggagattgaagctggccgcatccccaacccccacctgggccctgtggaggagcggctggccctgcacgtgctgcagcagcagggcctggtgcctgagcacgtggagagccggcccctgtacagccccctgcagcctgacatcgagcagggcaagctgcagatgtgggtggacctcttccccaaggccctgggccggcccggcccccccttcaacatcaccccccggcgggcccggcgcttcttcctgcgctgcatcatctggaacaccagagatgtgatcctggatgacctgagcctgactggagagaagatgtctgacatctacgtgaagggctggatgattggatttgaggagcacaagcagaagacagatgtgcactaccgcagcctgggcggggagggcaacttcaactggaggttcatcttcccctttgactacctgcctgctgagcaggtgtgcaccatcgccaagaaggatgccttctggaggctggacaagacagagagcaagatcccagcccgggtggtgttccagatctgggacaatgacaagttctcctttgatgacttcctgggcagcctgcagctggacctgaacaggatgcccaagccagccaagacagccaagaagtgcagcctggaccagctggatgatgccttccaccctgagtggtttgtgtccctgtttgagcagaagacagtgaagggctggtggccctgtgtggccgaggagggggagaagaagatcctggccggcaagctggagatgaccctggagatcgtggccgagagcgagcacgaggagaggcctgctggccagggcagagatgagcccaacatgaaccccaagctggaggaccccaggaggccagacaccagcttcctgtggttcaccagcccctacaagaccatgaagttcatcctgtggaggcgcttccgctgggccatcatcctcttcatcatcctcttcatcctgctgctcttcctggccatcttcatctatgccttccccaactatgctgccatgaagctggtgaagcccttctcctag

SEQ ID NO: 49048 - DNA, 6594 bp, Artificial Sequence
  derived and/or modified sequence
tctccgcggaggagcagcgaaggcgacagctctcttggcgcggctgcctgggagccgggcgcttgctgggtgggtgctcgggcccggtgctcccgctcccgccctgactgcgcgcctgtgtgccgccggggctgcccagccatgctgtgctgcctgctggtgagggccagcaacctccccagtgcgaagaaggaccggcgcagcgaccctgtcgcaagcctgactttccgaggggtgaagaagagaaccaaagtcatcaagaacagcgtgaaccctgtatggaatgagggatttgaatgggacctcaagggcatccccctggaccagggctctgagcttcatgtggtggtcaaagaccatgagacgatggggaggaacaggttcctgggggaagccaaggtcccactccgagaggtcctcgccacccctagtctgtccgccagcttcaatgcccccctgctggacaccaagaagcagcccacaggggcctcgctggtcctgcaggtgtcctacacaccgctgcctggagctgtgcccctgttcccgccccctactcctctggagccctccccgactctgcctgacctggatgtagtggcaggcgggggacagagccgggccgagacttggtccctgctcagtgacagcaccatggacacgagatactctggaaagaagtggccggcccccacggacacaggaggagaggaagacacagaggaccagggactcactggagatgaggcggagccattcctggatcaaagcggaggcccgggggctcccaccaccccaaggaaactaccttcacgtcctccgccccactaccccgggatcaaaagaaagcgaagtgcgcctacatctagaaagctgctgtcagacaaaccgcaggatttccagatcagggtccaggtgatcgaggggcgccagctgccgggggtgaacatcaagcctgtggtcaaggttaccgctgcagggcagaccaagcggacgcggatccacaagggaaacagcccactcttcaatgagactcttttcttcaacttgtttgactctcctggggagctgtttgatgagcccatctttatcacggtggtagactctcgttctctcaggacagatgctctcctcggggagttccggatggacgtgggcaccatttacagagagccccggcacgcctatctcaggaagtggctgctgctctcagaccctgatgacttctctgctggggccagaggctacctgaaaacaagcctttgtgtgctggggcctggggacgaagcgcctctggagagaaaagacccctctgaagacaaggaggacattgaaagcaacctgctccggcccacaggcgtagccctgcgaggagcccacttctgcctgaaggtcttccgggccgaggacttgccgcagatggacgatgccgtgatggacaacgtgaaacagatctttggcttcgagagtaacaagaagaacttggtggacccctttgtggaggtcagctttgcggggaaaatgctgtgcagcaagatcttggagaagacggccaaccctcagtggaaccagaacatcacactgcctgccatgtttccctccatgtgcgaaaaaatgaggattcgtatcatagactgggaccgcctgactcacaatgacatcgtggctaccacctacctgagtatgtcgaaaatctctgcccctggaggagaaatagaagtggatgactacctgggcttcctccccacttttgggccctgctacatcaacctctatggcagtcccagagagttcacaggcttcccagacccctacacagagctcaacacaggcaagggggaaggtgtggcttatcgtggccggcttctgctctccctggagaccaagctggtggagcacagtgaacagaaggtggaggaccttcctgcggatgacatcctccgggtggagaagtaccttaggaggcgcaagtactccctgtttgcggccttctactcagccaccatgctgcaggatgtggatgatgccatccagtttgaggtcagcatcgggaactacgggaacaagttcgacatgacctgcctgccgctggcctccaccactcagtacagccgtgcagtctttgacgggtgccactactactacctaccctggggtaacgtgaaacctgtggtggtgctgtcatcctactgggaggacatcagccatagaatcgagactcagaaccagctgcttgggattgctgaccggctggaagctggcctggagcaggtccacctggccctgaaggcgcagtgctccacggaggacgtggactcgctggtggctcagctgacggatgagctcatcgcaggctgcagccagcctctgggtgacatccatgagacaccctctgccacccacctggaccagtacctgtaccagctgcgcacccatcacctgagccaaatcactgaggctgccctggccctgaagctcggccacagtgagctccctgcagctctggagcaggcggaggactggctcctgcgtctgcgtgccctggcagaggagccccagaacagcctgccggacatcgtcatctggatgctgcagggagacaagcgtgtggcataccagcgggtgcccgcccaccaagtcctcttctcccggcggggtgccaactactgtggcaagaattgtgggaagctacagacaatctttctgaaatatccgatggagaaggtgcctggcgcccggatgccagtgcagatacgggtcaagctgtggtttgggctctcagtggatgagaaggagttcaaccagtttgctgaggggaagctgtctgtctttgctgaaacctatgagaacgagactaagttggcccttgttgggaactggggcacaacgggcctcacctaccccaagttttctgacgtcacgggcaagatcaagctacccaaggacagcttccgcccctcggccggctggacctgggctggagattggttcgtgtgtccggagaagactctgctccatgacatggacgccggtcacctgagcttcgtggaagaggtgtttgagaaccagacccggcttcccggaggccagtggatctacatgagtgacaactacaccgatgtgaacggggagaaggtgcttcccaaggatgacattgagtgcccactgggctggaagtgggaagatgaggaatggtccacagacctcaaccgggctgtcgatgagcaaggctgggagtatagcatcaccatccccccggagcggaagccgaagcactgggtccctgctgagaagatgtactacacacaccgacggcggcgctgggtgcgcctgcgcaggagggatctcagccaaatggaagcactgaaaaggcacaggcaggcggaggcggagggcgagggctgggagtacgcctctctttttggctggaagttccacctcgagtaccgcaagacagatgccttccgccgccgccgctggcgccgtcgcatggagccactggagaagacggggcctgcagctgtgtttgcccttgagggggccctgggcggcgtgatggatgacaagagtgaagattccatgtccgtctccaccttgagcttcggtgtgaacagacccacgatttcctgcatattcgactatgggaaccgctaccatctacgctgctacatgtaccaggcccgggacctggctgcgatggacaaggactctttttctgatccctatgccatcgtctccttcctgcaccagagccagaagacggtggtggtgaagaacacccttaaccccacctgggaccagacgctcatcttctacgagatcgagatctttggcgagccggccacagttgctgagcaaccgcccagcattgtggtggagctgtacgaccatgacacttatggtgcagacgagtttatgggtcgctgcatctgtcaaccgagtctggaacggatgccacggctggcctggttcccactgacgaggggcagccagccgtcgggggagctgctggcctcttttgagctcatccagagagagaagccggccatccaccatattcctggttttgaggtgcaggagacatcaaggatcctggatgagtctgaggacacagacctgccctacccaccaccccagagggaggccaacatctacatggttcctcagaacatcaagccagcgctccagcgtaccgccatcgagatcctggcatggggcctgcggaacatgaagagttaccagctggccaacatctcctcccccagcctcgtggtagagtgtgggggccagacggtgcagtcctgtgtcatcaggaacctccggaagaaccccaactttgacatctgcaccctcttcatggaagtgatgctgcccagggaggagctctactgcccccccatcaccgtcaaggtcatcgataaccgccagtttggccgccggcctgtggtgggccagtgtaccatccgctccctggagagcttcctgtgtgacccctactcggcggagagtccatccccacagggtggcccagacgatgtgagcctactcagtcctggggaagacgtgctcatcgacattgatgacaaggagcccctcatccccatccaggaggaagagttcatcgattggtggagcaaattctttgcctccataggggagagggaaaagtgcggctcctacctggagaaggattttgacaccctgaaggtctatgacacacagctggagaatgtggaggcctttgagggcctgtctgacttttgtaacaccttcaagctgtaccggggcaagacgcaggaggagacagaagatccatctgtgattggtgaatttaagggcctcttcaaaatttatcccctcccagaagacccagccatccccatgcccccaagacagttccaccagctggccgcccagggaccccaggagtgcttggtccgtatctacattgtccgagcatttggcctgcagcccaaggaccccaatggaaagtgtgatccttacatcaagatctccatagggaagaaatcagtgagtgaccaggataactacatcccctgcacgctggagcccgtatttggaaagatgttcgagctgacctgcactctgcctctggagaaggacctaaagatcactctctatgactatgacctcctctccaaggacgaaaagatcggtgagacggtcgtcgacctggagaacaggctgctgtccaagtttggggctcgctgtggactcccacagacctactgtgtctctggaccgaaccagtggcgggaccagctccgcccctcccagctcctccacctcttctgccagcagcatagagtcaaggcacctgtgtaccggacagaccgtgtaatgtttcaggataaagaatattccattgaagagatagaggctggcaggatcccaaacccacacctgggcccagtggaggagcgtctggctctgcatgtgcttcagcagcagggcctggtcccggagcacgtggagtcacggcccctctacagccccctgcagccagacatcgagcaggggaagctgcagatgtgggtcgacctatttccgaaggccctggggcggcctggacctcccttcaacatcaccccacggagagccagaaggtttttcctgcgttgtattatctggaataccagagatgtgatcctggatgacctgagcctcacgggggagaagatgagcgacatttatgtgaaaggttggatgattggctttgaagaacacaagcaaaagacagacgtgcattatcgttccctgggaggtgaaggcaacttcaactggaggttcattttccccttcgactacctgccagctgagcaagtctgtaccattgccaagaaggatgccttctggaggctggacaagactgagagcaaaatcccagcacgagtggtgttccagatctgggacaatgacaagttctcctttgatgattttctgggctccctgcagctcgatctcaaccgcatgcccaagccagccaagacagccaagaagtgctccttggaccagctggatgatgctttccacccagaatggtttgtgtccctttttgagcagaaaacagtgaagggctggtggccctgtgtagcagaagagggtgagaagaaaatactggcgggcaagctggaaatgaccttggagattgtagcagagagtgagcatgaggagcggcctgctggccagggccgggatgagcccaacatgaaccctaagcttgaggacccaaggcgccccgacacctccttcctgtggtttacctccccatacaagaccatgaagttcatcctgtggcggcgtttccggtgggccatcatcctcttcatcatcctcttcatcctgctgctgttcctggccatcttcatctacgccttcccgaactatgctgccatgaagctggtgaagcccttcagctgaggactctcctgccctgtagaaggggccgtggggtcccctccagcatgggactggcctgcctcctccgcccagctcggcgagctcctccagacctcctaggcctgattgtcctgccagggtgggcagacagacagatggaccggcccacactcccag

SEQ ID NO: 49049 - DNA, 6297 bp, Artificial Sequence
  derived and/or modified sequence
atgctgtgctgcctgctggtgcgggccagcaacctgcccagcgccaagaaggatcggcgatcagatccagtagcctccctgacttttagaggcgtaaagaaaagaactaaggtcattaagaacagcgttaacccagtttggaatgagggattcgaatgggacttgaaagggattcctctcgatcaggggagcgaactgcatgtggtcgtcaaagaccatgaaaccatgggtagaaatcgattcctgggagaagctaaagtcccactacgtgaggtgttagcaacaccctccctgtcagccagcttcaatgccccactcctcgacacaaagaagcagccaacaggcgcctcattagtcctgcaggtaagctatacgcccctgccaggcgccgtccctctgtttcctcctccgacacccctcgagccatcaccgacactgcctgacctcgacgtcgtcgctgggggcggccaaagccgcgccgagacctggagcctgctatcagacagcaccatggacactcgttatagtgggaaaaagtggcccgcccccactgataccggcggagaagaagatacagaggaccagggactcaccggcgatgaagcggagccctttctggatcagagcggcgggccaggggcccctactacacctcggaaactcccatcacggcctccaccacactacccagggattaagagaaagcgaagcgccccaacctcgagaaaactcctgtccgacaaaccccaagactttcagattagagtccaagtgattgagggcagacaattgcctggcgtcaatatcaagccagttgtgaaggtaaccgccgcagggcagacgaaaaggacccgaatccataagggcaattctccactattcaacgagactttgttttttaacctgtttgacagccccggtgaactgttcgacgaacctatctttattactgtagtggacagcagaagtttgcgtaccgacgccctactgggtgagttcagaatggacgtgggtacaatctatagagaaccccgacatgcttacctcaggaagtggcttttactttccgatcccgacgatttctccgctggagctcgaggttacttaaagacgtcactctgcgtactgggccccggtgacgaggctcccctagaacgcaaagatccttctgaggataaagaggatatcgaatccaatctgctgaggccaaccggagtcgctttgcggggcgcgcacttctgcctgaaggtcttccgggcagaagacctccctcagatggatgatgctgtcatggacaatgtgaagcaaatctttggcttcgagtctaacaagaagaacctcgtcgacccgtttgttgaagtgtcgttcgccgggaagatgctctgtagtaagatcctggagaaaaccgccaatccccagtggaatcagaacatcaccctgccggccatgtttcctagcatgtgtgagaaaatgcggattagaatcattgactgggatcgtctgactcataacgacatcgtggccactacttacctgagtatgagtaaaatctccgccccgggtggggaaattgaggtggatgattatctgggctttctaccaacgtttggtccctgttacattaacctatatggctcccccagagagttcaccggctttccggacccatacaccgagctcaatacgggcaaaggagaaggcgtcgcatacaggggcagactgttgctgtccttagagaccaagttagtcgagcactccgaacaaaaggttgaggacctcccagcagatgacattttgcgggttgaaaaatatctcagacggagaaaatattctctcttcgctgccttttactcggcaaccatgctccaggacgtggatgatgctatacaatttgaggtcagcattggaaattatggtaacaagttcgatatgacctgtctgccgctggccagcacaacccagtactcccgggccgtctttgacggctgtcactactattatctcccctggggtaacgtgaaacccgtcgtcgtgttgagttcttactgggaagatatctcccaccgcattgaaacccaaaaccagctgctcggcatcgcagacaggttggaggcgggtcttgagcaagtccacctcgcacttaaggctcagtgtagcaccgaggatgttgactctcttgtcgcccagctaaccgacgaactgatcgccggatgctcccagcctctgggggacattcacgaaacgccatcagcgacccacttggaccagtacctttatcagctacggacgcaccatctgtcacagatcactgaagcggcccttgctttgaaattaggccacagtgaactccccgcagcactcgagcaagcagaagattggctcctacggttgcgcgctttggccgaagagccccaaaatagcctacctgatattgtgatctggatgcttcagggcgacaaacgcgtcgcataccagcgcgtgcctgcgcatcaggtgttattttccaggaggggggctaactattgcggcaaaaactgcggaaagctacagaccatctttctgaagtaccccatggaaaaggtgcccggtgctcgcatgcctgttcagatccgtgttaaactctggttcggactgtctgtagatgagaaggagttcaaccagtttgctgaggggaaacttagcgtcttcgcagagacatacgagaacgagacaaagttggccctagttggcaattgggggaccacaggcctgacctatccaaagttcagtgacgtcaccggtaagatcaaactgccaaaggattcctttcgtccttctgccgggtggacctgggcaggcgattggttcgtgtgtcctgagaaaacactcctacacgacatggacgccgggcacctgtcttttgtcgaagaggttttcgagaaccagaccaggttaccgggaggacagtggatctacatgagtgacaattacactgatgtaaacggagagaaggtcctgccaaaggacgacattgagtgcccactcggatggaaatgggaagacgaagaatggtcaaccgacctgaacagggcagtggacgagcagggttgggaatacagcatcaccatcccccctgagcggaaacccaagcactgggtacccgccgaaaagatgtactacacacatcgtcggcgccgatgggttcgtttgcgcagacgcgatctgtcgcagatggaggccctgaaacggcatagacaggcggaggctgagggcgaaggctgggagtacgcaagcttatttgggtggaagtttcacctggaatatcggaaaaccgatgcctttcgacgcaggagatggcgccgtcggatggaacccctggaaaaaactggcccggccgcagtctttgccctcgaaggcgctttggggggggtgatggatgacaagtcagaagactccatgagcgtctccacactctctttcggagtgaatagacccaccattagctgcattttcgactatgggaacagataccaccttcggtgttatatgtaccaagccagagatctcgccgcaatggataaggactccttctcagacccctatgctatagtgtccttcctccaccagagccagaaaactgtggtggttaagaataccctgaaccctacttgggatcaaactctgattttttatgagattgagatatttggggaacctgcaactgtggccgaacagccccccagtatcgtggtggaactgtacgaccacgatacatacggagccgatgagttcatggggagatgcatttgccagccttccttggagaggatgcccagattggcttggtttcccttaacccggggcagtcagccatccggtgagctgctggctagtttcgagctcatacagagagaaaagcccgcaattcatcatattccagggtttgaagtgcaggaaacctccagaattttagacgaaagcgaggatactgatctcccttacccaccaccccaaagggaggccaatatatacatggtaccccagaatatcaaacctgctttgcaaagaactgccattgaaatcctggcttggggactgcggaacatgaagtcataccagctggcaaatatttcttctcccagtctggtggtcgagtgcggcgggcagaccgttcagagctgcgtcatcagaaacctcaggaagaaccctaacttcgacatatgcaccctcttcatggaagtaatgctgcctcgggaggagctgtactgcccacccatcactgtcaaggttattgataatagacagttcggcagacggcccgtagtaggacaatgtaccatcaggagcctcgagagcttcctgtgtgacccttactctgcagagagtccaagcccacaggggggacctgacgacgtcagcctgctcagcccgggcgaagatgttttgatagatatcgacgacaaggagcccctgattcccattcaggaggaagagttcatagactggtggagcaaattcttcgcatcaatcggggagcgagagaagtgcgggtcatacctcgaaaaagatttcgacactcttaaagtatatgatacacagctagaaaacgtggaagctttcgagggacttagcgacttttgtaacacattcaagctgtataggggaaaaacgcaggaagagaccgaggatccatctgtgatcggggaatttaaaggtctgttcaaaatatatcccttgccagaagatcccgctatccctatgccaccccgccaatttcaccagctcgccgctcaaggaccccaggaatgccttgttcgcatctatattgtcagggcctttgggcttcagcctaaggacccaaacggaaaatgtgacccctatattaagatctccataggtaagaaaagcgttagcgatcaggacaattacatcccgtgtaccctggagccagtctttggtaagatgtttgaactaacctgcaccctgcccctggagaaagacctgaagattaccctctacgattatgatctcttgtctaaggacgaaaaaataggcgaaactgtggtcgacctcgaaaacagactcctgtctaagtttggtgccagatgtgggttgcctcagacatattgcgtgagcgggccaaatcaatggcgtgaccagctcaggcctagtcagttgctgcacttattttgtcagcagcaccgggttaaagcccccgtgtatcgcaccgatcgggtcatgttccaagacaaggaatactcgattgaagagattgaggctggacggatccccaacccccatctcggtccggtcgaagagagactggcattgcatgttcttcagcagcaaggcctggtgcctgaacacgtcgagtctcgcccattgtacagcccacttcagcccgatatagagcaggggaagctccagatgtgggtcgacttgtttcccaaggccctggggaggcccgggcccccatttaatattacgccaaggcgtgcccgcagatttttcttaaggtgtattatatggaacacaagagacgttattctggatgacctcagtctcacaggcgagaagatgtctgacatctacgtaaagggatggatgattgggttcgaagagcacaagcagaagactgacgtgcactataggtctctcggcggcgaggggaactttaattggcggtttatctttccatttgactacttacccgctgagcaagtgtgcactatcgcgaagaaagacgccttttggcggctagataagacggaatcaaaaattcctgctcgcgtggtatttcagatatgggataacgataaattcagctttgatgatttcctgggcagcctgcagttggacctgaataggatgccgaagccagcgaagacagccaagaagtgttcactcgaccaactcgacgatgctttccacccagagtggttcgtgtcattgtttgagcaaaaaacggtgaaaggttggtggccttgtgtggccgaagagggcgagaagaagatactggcagggaaattggaaatgacactcgaaattgtggctgagagcgaacatgaggagcggccagccggccaaggtcgcgacgagcctaacatgaatccaaaattggaagacccacgcaggccggacacttcctttctgtggttcacttctccctacaaaacgatgaaattcatcctctggcgtaggtttaggtgggccataatcttgttcatcattttatttatcctgctgttattccttgccatctttatctacgcctttcccaattacgctgcaatgaagcttgtaaagcctttctcttag

SEQ ID NO: 49050 - DNA, 6297 bp, Artificial Sequence
  derived and/or modified sequence
atgctgtgttgcctgctcgtacgcgcatcaaacctcccgtcagctaagaaagaccgccgatccgatcctgtggcgagtctcacctttagaggcgttaagaaaaggactaaggtcattaagaacagcgtcaaccctgtgtggaacgaggggttcgaatgggacctcaagggaattccactggatcagggctccgagttgcacgtggtcgtgaaggaccatgagactatgggcaggaaccggtttctgggagaggccaaagtgcctctgagggaggtcttagccacacccagtctttctgcctcctttaatgccccattgttagatacgaagaaacagccaaccggcgcttctttggtgctccaggtcagctacacaccgctcccgggagccgtgcctctttttccccctcccactccgttggaaccatccccaacgctcccagatctggacgtggtcgcaggcggaggtcagtctcgcgctgaaacatggtcacttctgtcagactcgaccatggatactcggtatagcggcaagaaatggccagctcctactgacaccgggggagaggaggacacggaagaccaaggcctgaccggtgatgaggcagaaccctttctggaccagtccggtggcccaggtgctcctaccacgcctcgtaaactgccgagccgcccaccacctcactaccccggaatcaagagaaaacggtctgcacctacatcacgcaagctgctgtcggataaacctcaggactttcaaatccgagtacaagtaatcgaagggcgacagctccccggagtcaacattaagcccgtcgtgaaagtaacagccgcaggccagacaaaacgcacccgtatacataagggtaattctccgctgttcaacgaaaccctgttttttaatctttttgacagcccaggcgagctcttcgacgagccgatcttcattacagttgtggattctagatcattgagaaccgacgcccttctgggcgagttccggatggacgtgggcacaatctacagggagccaaggcatgcctatttacgcaaatggcttttgctctctgaccccgacgatttcagtgctggggctagaggctatttgaaaaccagtctgtgcgtgctggggcctggtgacgaagctccactggaaaggaaagacccctccgaagataaggaggacatcgagagcaaccttctgcgccctaccggagtggcgctgagaggcgctcacttttgtctgaaggttttcagggccgaagacttaccccagatggatgacgcagtgatggacaacgtgaaacagatttttgggtttgagagcaacaaaaagaatctagttgacccctttgtcgaggtgagctttgcaggcaagatgttatgtagcaaaatcctcgaaaagaccgcaaaccctcaatggaaccagaacatcacactccctgccatgtttcctagcatgtgcgagaagatgcgtatccgcataatcgattgggatcgccttacccataacgacattgttgccaccacttaccttagcatgagcaaaatttctgcgccaggtggggagatcgaagtggatgactaccttgggtttctgcccacttttgggccatgctatatcaatttatatggatccccgagggagttcactgggtttcctgatccatacacagagctgaataccggcaagggggagggggttgcctatcgtggccgtctgcttctgagtctggagactaagctggtggaacattccgagcaaaaggtggaggatctacctgcagacgatatcctccgtgtggagaagtaccttcgcagacgcaaatatagtcttttcgcggctttctactccgcaactatgcttcaagatgtggatgacgcaatccaatttgaggtgagtatcggcaattatggcaacaaatttgatatgacctgtcttcccctggcttcaaccacgcagtacagcagagccgtcttcgatgggtgtcactattactacctcccctggggaaatgtgaagcctgtggtggtgttgtcgtcttactgggaggacattagccaccgcatcgagacacagaaccagctgctgggcattgcagacaggctggaggcaggcctcgaacaggtacacttagcactgaaggcccaatgttcaaccgaggatgtagacagtttggtggcccagctgaccgacgaactgatcgcaggttgcagccagccattaggagacatccatgagaccccgtctgcaacgcacctcgaccagtatttgtaccagttaaggactcaccatctttcacagataacagaagcggctctagcgctcaagctgggtcacagcgagctgcccgcagcccttgagcaggctgaggactggcttcttcggctgcgggctctggcggaggagccccagaattctctgcccgacatcgtgatttggatgcttcaaggagataagcgcgtggcctaccagagggtgccggcacatcaggtccttttcagtcgacggggagccaactactgcggaaagaattgtgggaaactgcagactattttcctcaagtatcccatggaaaaagtccccggagcacggatgcctgttcagatccgcgtcaaactgtggttcggtctgagtgtggacgagaaggagtttaaccagtttgccgaggggaagttgtccgtatttgcagagacttatgaaaatgagactaagctggccttggtgggtaattggggcacaaccgggctcacttatccgaaatttagcgacgtgaccggaaaaattaaattgccaaaggattcatttagaccctcagccggatggacctgggcgggagattggtttgtgtgcccagagaaaactttgctgcatgatatggatgccggacacctgtcctttgtggaggaggtctttgagaaccagactaggctaccaggaggccagtggatttacatgtccgataactataccgatgttaacggcgaaaaggtcttacccaaggacgacatagagtgccctctgggatggaaatgggaagacgaagaatggtctacagacctcaatcgcgcagtggatgagcagggctgggagtacagcattaccatccctccagagagaaaaccgaagcactgggtgccagcagagaagatgtattacacacaccgacgacggcgttgggtgagactgaggaggcgggatctcagtcagatggaggcgttaaaacgacatcgccaggcagaggcggagggcgaagggtgggagtacgctagcctgtttgggtggaaatttcacttggagtacagaaagacggacgctttccggcgacggaggtggcgcaggcgaatggagccactagagaaaaccgggccagcagcagtctttgctctcgaaggagcgttgggcggagttatggacgacaagtctgaggatagcatgagtgtttcaactctgtcattcggcgtcaacaggccaaccattagttgtatttttgactatgggaatcggtaccaccttcgctgttacatgtatcaggctagagacctagcagccatggacaaggactcattctccgatccctacgctattgtgtctttcctccatcagtcccagaagactgtggtcgtgaaaaatacacttaatcctacatgggaccagacactcatcttttacgagattgaaatttttggggagcctgcaacagtcgccgaacaaccaccctctattgtcgttgaactatacgatcacgatacatacggagccgacgagtttatggggaggtgcatttgccaaccctcgcttgagagaatgccccgtcttgcatggtttcctttgactagaggatctcagccaagtggcgaattacttgcatcatttgagctgattcaacgcgagaaacccgctatccatcacatccctggcttcgaagtgcaggaaacttcccggatcctcgacgaatcagaagacactgacttaccttatcctccccctcagcgcgaagctaacatctatatggtgccccagaacataaaacctgctttgcagcgaacggcgatcgaaattctggcttggggtctgaggaatatgaaatcctatcagctcgctaacatttcttctccttccttggtcgtggaatgcggagggcaaacagtccagtcctgtgttatccgaaacctgcgaaagaaccccaattttgatatttgtaccctcttcatggaggtaatgctgcccagggaggagctctattgcccaccaattacggttaaagtcatcgacaaccgacaattcgggagacgcccagtggtgggtcagtgcacgattcgaagcttggagagttttctgtgtgacccctactcagccgagagtccttctcctcaggggggtcccgacgatgtaagcttattaagccccggagaagacgtcctgatcgatatcgatgataaggagccactgatccccattcaggaagaagagttcattgactggtggtctaaattttttgcctctattggagaacgagagaagtgcgggagttatctcgagaaagacttcgatacacttaaagtgtatgacacccagctcgagaatgtggaggcgttcgagggcctgtctgatttctgcaatacattcaaattatacagaggcaagacgcaggaggagactgaagacccatccgtaatcggagaatttaaagggctcttcaagatatatcccctgcccgaagaccctgccatcccaatgccccctcgccagttccaccaactggccgctcaggggccacaggaatgtttggtaagaatctacattgtccgggcatttggtctgcaacctaaggaccctaatggcaaatgcgatccgtacatcaagatctcgatcggcaaaaaatctgttagtgaccaagataattacatcccctgtactctggagcccgtcttcggcaagatgttcgagttgacttgcacactccccctggagaaagacctgaagattacgttatacgattatgatttgctgagtaaggacgagaagataggcgagaccgtggtcgacttagagaacaggcttctgtctaaattcggcgcaaggtgtggactcccgcaaacctattgcgtatcaggacccaaccagtggcgggatcagctgcggcctagccagctgcttcatttattctgtcagcagcaccgtgtgaaagccccagtatatcggactgaccgagtgatgttccaggacaaagaatacagtatcgaggagatcgaggcaggcaggatccctaatccccacctcggccctgttgaagagagactcgcacttcatgtactgcagcagcagggcttggtgcccgaacacgttgaatcccgccctctctactcccctcttcagcctgacatagaacaggggaagcttcagatgtgggtggacctgttccctaaggcactggggcgacctggcccaccgttcaacatcacaccaaggagagcgaggcgcttctttcttcgatgcataatctggaacacccgcgatgtaatcttagacgatctgtctcttacgggggaaaaaatgtccgatatctacgtcaaaggatggatgataggattcgaggagcacaagcaaaagaccgacgtgcattaccgttctctagggggagagggtaattttaactggcgatttatttttcccttcgattatctccccgctgagcaggtttgcaccatcgccaagaaggatgcattttggagactagacaagacagaatcaaagatccccgctcgtgtggtcttccagatctgggacaatgataaatttagcttcgatgactttctggggtctttgcagttggacttgaacagaatgccgaagcccgctaagacggcaaagaagtgcagcctcgaccagttggatgacgccttccatcccgagtggtttgtatcgctgttcgagcagaagaccgtgaagggctggtggccatgtgtagccgaggagggcgagaagaagattttagccggaaagttagagatgacccttgaaattgtggctgagtccgaacacgaggagaggcccgcaggacagggcagggatgaacctaatatgaatcccaaactggaggaccctcgccgacctgatacatctttcctgtggtttaccagtccatacaagaccatgaagtttatcctctggaggcgcttcaggtgggccatcattttgtttattatcctttttatcttgctgctttttttagcgatttttatatacgcatttccgaattacgccgctatgaaacttgtgaagcctttctcctac

SEQ ID NO: 49051 - DNA, 6297 bp, Artificial Sequence
  derived and/or modified sequence
atgctttgctgtttactagtgagagcatcaaacctgccctccgccaagaaggatagaagaagtgacccagtggcatcactgacgtttcggggcgtgaaaaagagaactaaagtaatcaaaaactctgttaaccccgtttggaatgaaggctttgaatgggacctgaaaggaatacctttagaccagggaagtgaactgcacgttgtagtcaaagatcatgagactatgggtcgtaatagattcctcggggaagcaaaagtgcctctgcgcgaagttctggcaaccccctctctgagcgccagctttaacgcgccattgctggatacgaagaagcagcctactggggcgagtttggtgttgcaggtctcatacacacctcttcctggcgctgtcccactgtttcctccaccaacaccccttgagccctccccaacccttccagacctggatgtagtggcaggcggcggacagtctcgcgctgaaacgtggtctctcttgtccgacagtaccatggacacaagatattcagggaagaagtggccggcccctacagatacagggggggaggaggataccgaagatcaggggctgacgggtgacgaggctgaaccctttctggaccagagtggaggacctggcgctcccaccacccctcgcaagcttccatctcgaccacctcctcactaccccggaattaagcgaaaacgcagcgctcctactagcaggaagttgttgtcggacaaacctcaagattttcagattcgggttcaagtgattgaaggcagacagctacccggagtgaacataaagcccgttgtcaaggtcacagcagcaggacagaccaagagaacccggattcataagggcaacagtcctctctttaatgagacccttttttttaatctttttgacagtccaggcgagcttttcgacgaaccgattttcatcactgttgttgacagcaggagcctgcggacagatgcacttctcggggaattcagaatggacgttggcaccatctatagggaacctcgacatgcctatttgcgcaagtggttgctattgagtgatcccgacgacttctccgctggagcacggggttacctaaagacatcgttatgcgtcttggggcccggggatgaggcccctctcgagcgcaaggatcctagcgaggataaggaggacatcgaatccaacctgctgaggccaacaggagtggcactgaggggggctcacttttgcttaaaagtttttagggctgaggacttacctcaaatggacgacgcggtcatggacaacgtcaaacaaattttcggctttgagtctaataaaaagaacctcgtagacccttttgtggaggtcagtttcgctgggaagatgctgtgtagtaagatcttagaaaagactgccaatccacagtggaaccaaaatataacccttcctgccatgttcccatcaatgtgtgagaaaatgcggatacggatcattgactgggatcggctgacccacaacgacatcgtcgcaaccacttatctgtccatgagtaagatatctgccccagggggagagatagaagttgacgactacctcggtttcctgcctacctttgggccgtgttatattaatctatacgggtctccccgtgaatttaccggcttcccggacccatataccgaactcaacactgggaaaggagagggcgttgcctacagaggtagactgttattgagtttagagacaaaacttgtcgagcattcggagcagaaagtggaagatctgcctgccgacgacatactgcgggtcgagaagtacctgcggcgcagaaagtacagcctctttgctgccttttactcggccactatgttgcaggatgtcgatgacgctatacagttcgaagtctccatcggtaactacgggaacaagtttgatatgacatgccttcccttagccagcactacccagtactcccgggccgtcttcgacggctgccattactattatcttccttgggggaacgtcaagcccgtggtagttttgtcttcttattgggaagatattagccatcgtattgagacccaaaatcaactcctggggattgcagatcgtcttgaggccggactggaacaggtacacctcgctctcaaggcacaatgctcaaccgaggatgtggactctctggtggcacaactgaccgatgaactgatcgccggctgctctcagccattgggcgacatccacgagactccgagtgcaacacatctcgatcagtacctctaccaactgagaacgcaccatcttagccaaattacagaagcggcgttagctctgaagctaggtcactctgaactccctgccgccttagagcaggctgaggactggctgctgcgcctgagggccctggctgaggagcctcaaaacagcctgccggacatcgtgatctggatgctacagggagataaacgcgtagcctaccagcgcgttccggcccatcaggtgctgttctctcgcagaggtgccaactactgtggaaagaactgcggcaagttgcaaacaatattcttgaagtatccgatggagaaggtacccggggcaaggatgcctgttcaaatccgcgtgaagctgtggtttggtctgagcgtggacgagaaggagttcaaccaatttgccgaaggcaaactctccgtattcgccgaaacctatgagaatgaaactaaactggcactggttgggaactggggcacgacgggactgacataccccaagttttcagacgtgaccggtaagattaagctgcctaaagactcatttaggcccagtgctggctggacatgggccggggattggttcgtgtgtccagagaagacactgctccatgatatggacgccggccacctgagctttgtggaagaggtctttgagaaccagacaagactgccgggcggccaatggatctatatgagtgataattatacagacgttaacggagagaaagtgttgccaaaggatgacatcgagtgtcctctgggatggaaatgggaggatgaggaatggagtacagatcttaatagagccgtggacgagcagggctgggagtacagcatcaccatccctcccgagaggaagcctaagcactgggtgcccgctgaaaaaatgtactatacccacagacggcgccgctgggttcgattgaggaggcgggacctgtctcagatggaggccttgaaacgtcataggcaggccgaggccgagggagaaggatgggaatacgcctccctttttggatggaagtttcatctggagtatagaaagaccgacgcatttaggcggcgccggtggagaagaaggatggaacctttagagaagacgggacctgccgccgtgttcgccctcgaaggcgcgctgggcggagtgatggatgacaaatctgaggacagcatgtctgtgagcaccctctcattcggcgtcaatagacctacgatttcctgtatttttgattacggaaaccggtatcatctgcggtgttacatgtatcaggccagagacctggcagccatggacaaagattcattttccgacccctacgccatcgtctcattcctgcaccaatcgcagaaaacagtggtggtgaaaaacacactaaacccgacttgggatcagacactaatattttacgaaatcgaaatcttcggcgagcccgcaacagtcgccgagcagcctcccagtattgtagtggagctatatgaccatgatacatacggagccgatgaatttatgggtaggtgcatttgccagccttccctggaaaggatgcctcgactcgcgtggttcccattgactcggggctctcagcccagtggcgaattactggccagcttcgaacttatccagcgtgaaaaacccgcgattcaccatatacctggattcgaagtgcaggagacaagtagaattctagatgagagcgaagacaccgacctcccatatccccccccacagagggaagctaacatctacatggttccacagaacatcaaacccgcactgcagcgaactgccatcgagattcttgcttggggcctgagaaatatgaagtcataccagctggccaacattagtagcccctccctggtcgtggaatgcggtggtcagaccgtccagtcttgcgttatcaggaatctgcgaaaaaatcctaactttgacatctgtacactgttcatggaggtcatgctacctcgtgaagagctgtactgccccccaatcacagtcaaagtgatcgataatcggcagtttggccgccggcccgtggtgggacaatgtacaatcaggtccctagagtcctttctgtgcgacccttactctgccgaatctccttcaccccaagggggccctgacgatgtgagtctgctgtctcctggggaggatgttctgatcgatatcgacgacaaagaacccctgatacctattcaggaggaggaattcattgattggtggtccaagttcttcgctagcatcggagagagagagaaatgcgggtcctacttagaaaaggacttcgacaccctcaaggtttatgacacacagctcgaaaatgttgaggcatttgagggcctaagtgatttctgcaacaccttcaaactttacagaggcaagacccaagaagagactgaagatccgtctgtgattggtgaattcaagggcctgtttaaaatatatcccctgcctgaagatcccgctatcccaatgccccctcgacaattccatcagctcgcggcacagggaccacaggaatgccttgtgaggatttacatcgtgagggcttttggcctgcaacctaaagatccaaacggtaagtgcgatccctatatcaagatctcgataggaaagaagagcgtttctgaccaggacaactacatcccttgcacgctggagcccgtcttcgggaagatgttcgagctgacctgcacactcccccttgagaaggacctaaagattacactgtacgattacgaccttctaagtaaggacgaaaagatcggcgaaacagtagtcgatctggagaaccgcctgctctcgaaattcggggcacggtgtgggctgccacagacttattgcgtgtcaggacctaatcagtggcgagaccagctccgcccatctcagctgcttcatctcttctgtcagcagcaccgtgtcaaagcaccggtttatcggaccgacagagtcatgttccaggataaggagtattctatcgaagagatcgaggcgggtagaattcctaaccctcatctaggccccgtagaggaacgcctggcattacacgtgctccagcagcaggggctggtgcctgaacacgttgagtctaggcccctctactcacctcttcaacctgacatcgagcagggcaaactccaaatgtgggtggaccttttcccgaaggccctgggcagaccaggccctcctttcaatattacgcccagacgagcacgacggttttttttaagatgcattatttggaacacccgtgatgtgatccttgacgacctctccctgaccggcgaaaaaatgagcgacatctacgtgaagggatggatgatagggttcgaagaacacaagcagaagaccgacgtgcactatagaagcctgggcggggaggggaacttcaactggcgatttatcttcccgttcgattatctgcctgccgagcaggtgtgcactatcgccaagaaggacgcattctggaggctagacaaaacagaatctaaaataccagctagagttgttttccagatctgggacaacgataagttttcttttgacgatttcctaggctccttgcaacttgacctgaatcggatgccgaaacctgccaagactgcgaaaaaatgttcactggaccagctagatgacgccttccacccagagtggtttgtgagcttgtttgaacagaaaaccgtcaaagggtggtggccatgtgtggcagaggagggagaaaagaagattctcgcgggcaagctggaaatgactctggagatcgtggctgaatctgaacacgaggaaagacccgccggacagggccgcgatgaaccaaatatgaaccctaaactggaagatccaaggcgccctgacactagcttcctctggtttacctcaccatataagactatgaagtttatcctgtggcggcggttcaggtgggcaataatcttattcatcatcctgtttatcttactactctttctcgcaatatttatttacgcttttccgaactacgccgccatgaagctggtgaagccttttagttag

SEQ ID NO: 49052 - DNA, 6297 bp, Artificial Sequence
  derived and/or modified sequence
atgctttgctgtttactagtgagagcatcaaacctgccctccgccaagaaggatagaagaagtgacccagtggcatcactgacgtttcggggcgtgaaaaagagaactaaagtaatcaaaaactctgttaaccccgtttggaatgaaggctttgaatgggacctgaaaggaatacctttagaccagggaagtgaactgcacgttgtagtcaaagatcatgagactatgggtcgtaatagattcctcggggaagcaaaagtgcctctgcgcgaagttctggcaaccccctctctgagcgcctcttttaatgcccctctgcttgatactaagaagcagcccactggtgcatctctcgtgctgcaagtttcttataccccattgccaggagccgttccattatttccccctcccacaccattagagccctctccgacactgcccgacctggacgtggtggctgggggtggccagtcacgcgccgagacttggagcctgcttagtgactcaaccatggacacaagatatagcggaaaaaaatggccggccccaactgatacagggggagaagaagacacagaagaccaaggtttgaccggagacgaagctgagccttttctagaccagtctggcggtcccggagcgccaaccacccctcggaagctcccctctcgaccacctcctcattaccccgggataaaacgcaaacgatcagcccccacctccaggaagcttctctcagacaaaccacaggacttccagattcgcgtccaggtcatcgaagggcgccaactcccaggcgtcaatatcaaacccgttgtgaaagtaactgccgccggccaaacaaagcgaactaggattcataaaggaaattccccactgttcaatgagactctgttcttcaatctcttcgattcccccggcgagttattcgatgagcctattttcattacagtcgtggactctcggtccctcagaacagacgctctcctgggtgaatttaggatggatgtgggtactatttaccgtgaacctcggcacgcctacctgcgaaagtggctccttttatcagatccagacgatttttcggcaggggccagaggatacctgaagacctccttgtgtgttttgggtcccggcgatgaggcgcccttggaaagaaaagacccctcggaagataaggaagatattgagtctaatctccttagacccaccggtgtcgctctgcgtggagcccacttctgtctgaaggtgtttcgggccgaagatttgccacagatggacgatgctgtcatggacaatgtaaaacagatctttgggtttgaatccaacaagaaaaatctcgtagaccccttcgtcgaggttagcttcgcgggtaaaatgctgtgttctaaaatactagagaaaactgcgaatccccaatggaaccagaatatcactctccctgccatgtttccaagtatgtgcgaaaaaatgagaattcggatcatcgattgggacagactcacacataatgatattgttgccaccacatacctttctatgtctaaaatctcagcaccagggggagagattgaggtagatgattatctggggtttttgcccaccttcggcccctgctacatcaacctgtatggctctccaagggaatttacaggatttccggatccgtacacagaactgaacactgggaaaggtgagggcgtagcatacaggggacggctcctcctctcactggaaacaaaattagtagagcacagcgaacaaaaagtagaagatctacccgctgacgatatattacgggttgagaaatatttgagacgccggaaatactcactgtttgctgccttttattccgccacaatgctccaggatgtggacgacgccattcagttcgaggtgtcaataggaaattacgggaacaagtttgatatgacctgtttgccattggctagtactacacaatactccagggccgtttttgacggatgtcactattattacctaccttggggaaacgtgaaacccgtagtggtattatcctcctactgggaagatatcagccacagaattgaaacacagaatcagttgttgggcatagcagaccgccttgaggctggattagagcaagttcacctagccttgaaggcccagtgcagcactgaagacgtggactcactggttgctcaactgaccgacgaactcattgctggctgctctcagccccttggcgacattcacgagacccccagcgcgacccacctagatcaatatctttatcaacttcggacgcaccacctcagtcagatcacagaagccgccttagcgcttaaactaggacattctgaactccccgccgccttagagcaggcagaagattggctgcttcgcttgcgtgcattagcagaagaaccgcagaatagcctgcccgatatcgtgatatggatgctccagggggacaagcgcgtagcctatcaaagagttcctgcacatcaagttttattctcaaggaggggggccaactattgtggaaagaactgtggcaaacttcagactatattcttgaaataccctatggaaaaggtgcccggtgctcggatgcccgtgcaaatcagggttaaactgtggtttggcctgtcagtcgacgagaaggaattcaaccagttcgctgaaggaaaattgtccgtgttcgcagagacctacgaaaacgagactaaactagctctggtgggcaactggggtactaccggcctgacgtatcctaaattctctgatgttacaggcaaaatcaaacttcccaaagacagctttaggccatctgccggatggacatgggccggtgattggtttgtgtgtcctgaaaaaacattacttcacgacatggacgctggacatctctcattcgttgaagaggtttttgagaaccagacaaggctgccaggaggccagtggatttacatgtccgataactacaccgatgttaacggagaaaaggtgctgccaaaagacgacattgagtgtccgctcggatggaaatgggaagatgaggagtggagtactgatttgaatcgcgcagttgacgagcagggttgggagtacagcatcacaatcccacccgagagaaagcctaaacactgggtgcccgcggagaaaatgtattatacgcaccgcaggcggcggtgggtcagattaaggcgtagggacctcagtcagatggaagcactaaaacggcaccgccaagccgaagccgagggggaaggttgggagtatgccagcttgtttggatggaagtttcatctggagtatagaaagacggacgcttttagacgtcgcaggtggcgaagacgtatggaacccctagaaaaaacaggcccagctgccgtgttcgccctcgagggtgctcttggtggagtgatggatgataaaagtgaggacagcatgtcggtgtccaccctgagctttggggtgaatagacctacaattagttgcatctttgactacgggaatcgctaccatctgagatgctacatgtaccaggcccgagatctggcagctatggataaggattccttttcagacccctatgctatcgtctcttttttgcatcaatcacagaaaaccgtcgttgtcaaaaacacccttaatcctacctgggaccagacgttgatcttttatgaaatcgagatttttggagagcccgcaacagtggctgagcaacccccttcaattgttgtggagttgtacgaccacgatacctacggagccgatgaattcatgggtcgctgtatttgtcagccatctctggaacgtatgcctcggttggcctggtttccattaaccaggggaagccaaccctcaggtgagctgctggcatcattcgagctgatacagagggagaagcccgccattcaccatatcccaggcttcgaagtgcaagaaacctccaggatcctggacgaatcagaggacaccgacttaccttaccctcccccccagcgtgaggccaacatctacatggttccccagaatatcaagcctgcgctgcaaagaacagccattgagatactcgcctggggacttaggaacatgaaatcatatcaattagccaatatttcgtctcccagtctggtagtggaatgtggaggtcagacagttcagagctgcgtcatccggaacctgcgtaaaaaccctaactttgacatctgtaccttgttcatggaagtgatgcttccccgagaagagttatactgccccccaatcacagtgaaggtgatcgacaaccgacaatttggcaggagaccagtagttggtcagtgtacaatccgatctctcgaatcctttctctgcgatccgtactccgccgagtccccaagtccacagggcggccccgacgatgtcagcctgctgtcacctggagaggacgtgctgatcgatattgatgacaaagagcccctgattccaattcaggaggaggagtttatagactggtggtcgaagtttttcgcctctatcggagaacgtgaaaaatgcggctcgtatctggagaaagactttgacaccctcaaggtgtacgatacacagttagagaatgtcgaagcctttgagggacttagcgacttttgtaataccttcaagctctaccgaggtaagacacaggaggaaaccgaagaccctagcgtgattggtgaattcaaggggctgttcaagatctaccccctgcctgaagatcctgccatccctatgccacccagacaattccaccagctggctgcccaaggaccacaagaatgtttggtgcgcatttacatcgtgagagcttttggcctgcaacccaaagaccccaacggaaagtgcgatccatacattaaaatctccatcggtaagaaaagtgtaagcgaccaggacaactacataccttgtacattggaacctgtctttggaaagatgtttgagctgacgtgcaccctccccctggagaaggaccttaaaatcacactctatgactacgatctgcttagtaaggatgagaaaattggcgagacggttgttgatctggaaaataggctactgagtaagttcggcgcccgctgcggactgccccagacatactgcgtctccggacctaaccaatggagggatcagcttcggccttcccagttactacatcttttctgtcagcagcatcgcgtaaaggcccctgtgtaccgaacagaccgtgttatgtttcaggacaaggagtactccatcgaggagattgaggctggccgtattcccaatccccacctcggcccagtggaagaacgcctggcactacacgtcctgcagcagcaaggattggtccctgaacacgtcgaaagtaggccactgtactcccctctgcagcctgacattgaacaaggcaagctgcagatgtgggtggacctctttcccaaggcactcggccgaccaggccctcctttcaatatcacaccacggcgagcaagacgctttttcttgagatgtattatatggaacaccagagacgtgattttggacgacttatccttaaccggagagaaaatgagtgacatctatgttaaggggtggatgatcggcttcgaagaacacaagcagaaaacggacgtgcattataggtccttgggcggagaaggaaactttaactggagatttatcttcccatttgactacctgccagccgaacaggtgtgtacaatagcgaaaaaggatgcgttttggcggctggacaagaccgaatctaaaattcccgccagagtagtttttcagatttgggataatgacaaattcagcttcgatgatttcctcggctcactgcagcttgaccttaatcgcatgccaaaaccggcaaaaactgcaaaaaagtgttcgctagatcagctcgatgacgcttttcacccagagtggtttgtatcattgttcgagcagaagaccgtgaagggatggtggccatgtgtcgctgaagagggagagaaaaagatactcgccggcaaactagaaatgacactggagattgtagctgaatcggaacatgaggaacgacctgctgggcagggccgagacgagccaaacatgaaccccaaactggaggatccgcggcgcccagatacatcctttctgtggtttacctcaccatataagacaatgaagtttattctctggcggaggtttagatgggccatcatccttttcataattcttttcatcctgctgttattcttggcgatcttcatatacgcattcccgaattacgcagcaatgaaactggtaaaacctttttcttag

SEQ ID NO: 49053 - RNA, 6297 nt, Artificial Sequence
  derived and/or modified sequence
augcuuugcuguuuacuagugagagcaucaaaccugcccuccgccaagaaggauagaagaagugacccaguggcaucacugacguuucggggcgugaaaaagagaacuaaaguaaucaaaaacucuguuaaccccguuuggaaugaaggcuuugaaugggaccugaaaggaauaccuuuagaccagggaagugaacugcacguuguagucaaagaucaugagacuaugggucguaauagauuccucggggaagcaaaagugccucugcgcgaaguucuggcaacccccucucugagcgccagcuuuaacgcgccauugcuggauacgaagaagcagccuacuggggcgaguuugguguugcaggucucauacacaccucuuccuggcgcugucccacuguuuccuccaccaacaccccuugagcccuccccaacccuuccagaccuggauguaguggcaggcggcggacagucucgcgcugaaacguggucucucuuguccgacaguaccauggacacaagauauucagggaagaaguggccggccccuacagauacagggggggaggaggauaccgaagaucaggggcugacgggugacgaggcugaacccuuucuggaccagaguggaggaccuggcgcucccaccaccccucgcaagcuuccaucucgaccaccuccucacuaccccggaauuaagcgaaaacgcagcgcuccuacuagcaggaaguuguugucggacaaaccucaagauuuucagauucggguucaagugauugaaggcagacagcuacccggagugaacauaaagcccguugucaaggucacagcagcaggacagaccaagagaacccggauucauaagggcaacaguccucucuuuaaugagacccuuuuuuuuaaucuuuuugacaguccaggcgagcuuuucgacgaaccgauuuucaucacuguuguugacagcaggagccugcggacagaugcacuucucggggaauucagaauggacguuggcaccaucuauagggaaccucgacaugccuauuugcgcaagugguugcuauugagugaucccgacgacuucuccgcuggagcacgggguuaccuaaagacaucguuaugcgucuuggggcccggggaugaggccccucucgagcgcaaggauccuagcgaggauaaggaggacaucgaauccaaccugcugaggccaacaggaguggcacugaggggggcucacuuuugcuuaaaaguuuuuagggcugaggacuuaccucaaauggacgacgcggucauggacaacgucaaacaaauuuucggcuuugagucuaauaaaaagaaccucguagacccuuuuguggaggucaguuucgcugggaagaugcuguguaguaagaucuuagaaaagacugccaauccacaguggaaccaaaauauaacccuuccugccauguucccaucaaugugugagaaaaugcggauacggaucauugacugggaucggcugacccacaacgacaucgucgcaaccacuuaucuguccaugaguaagauaucugccccagggggagagauagaaguugacgacuaccucgguuuccugccuaccuuugggccguguuauauuaaucuauacgggucuccccgugaauuuaccggcuucccggacccauauaccgaacucaacacugggaaaggagagggcguugccuacagagguagacuguuauugaguuuagagacaaaacuugucgagcauucggagcagaaaguggaagaucugccugccgacgacauacugcgggucgagaaguaccugcggcgcagaaaguacagccucuuugcugccuuuuacucggccacuauguugcaggaugucgaugacgcuauacaguucgaagucuccaucgguaacuacgggaacaaguuugauaugacaugccuucccuuagccagcacuacccaguacucccgggccgucuucgacggcugccauuacuauuaucuuccuugggggaacgucaagcccgugguaguuuugucuucuuauugggaagauauuagccaucguauugagacccaaaaucaacuccuggggauugcagaucgucuugaggccggacuggaacagguacaccucgcucucaaggcacaaugcucaaccgaggauguggacucucugguggcacaacugaccgaugaacugaucgccggcugcucucagccauugggcgacauccacgagacuccgagugcaacacaucucgaucaguaccucuaccaacugagaacgcaccaucuuagccaaauuacagaagcggcguuagcucugaagcuaggucacucugaacucccugccgccuuagagcaggcugaggacuggcugcugcgccugagggcccuggcugaggagccucaaaacagccugccggacaucgugaucuggaugcuacagggagauaaacgcguagccuaccagcgcguuccggcccaucaggugcuguucucucgcagaggugccaacuacuguggaaagaacugcggcaaguugcaaacaauauucuugaaguauccgauggagaagguacccggggcaaggaugccuguucaaauccgcgugaagcugugguuuggucugagcguggacgagaaggaguucaaccaauuugccgaaggcaaacucuccguauucgccgaaaccuaugagaaugaaacuaaacuggcacugguugggaacuggggcacgacgggacugacauaccccaaguuuucagacgugaccgguaagauuaagcugccuaaagacucauuuaggcccagugcuggcuggacaugggccggggauugguucguguguccagagaagacacugcuccaugauauggacgccggccaccugagcuuuguggaagaggucuuugagaaccagacaagacugccgggcggccaauggaucuauaugagugauaauuauacagacguuaacggagagaaaguguugccaaaggaugacaucgaguguccucugggauggaaaugggaggaugaggaauggaguacagaucuuaauagagccguggacgagcagggcugggaguacagcaucaccaucccucccgagaggaagccuaagcacugggugcccgcugaaaaaauguacuauacccacagacggcgccgcuggguucgauugaggaggcgggaccugucucagauggaggccuugaaacgucauaggcaggccgaggccgagggagaaggaugggaauacgccucccuuuuuggauggaaguuucaucuggaguauagaaagaccgacgcauuuaggcggcgccgguggagaagaaggauggaaccuuuagagaagacgggaccugccgccguguucgcccucgaaggcgcgcugggcggagugauggaugacaaaucugaggacagcaugucugugagcacccucucauucggcgucaauagaccuacgauuuccuguauuuuugauuacggaaaccgguaucaucugcgguguuacauguaucaggccagagaccuggcagccauggacaaagauucauuuuccgaccccuacgccaucgucucauuccugcaccaaucgcagaaaacagugguggugaaaaacacacuaaacccgacuugggaucagacacuaauauuuuacgaaaucgaaaucuucggcgagcccgcaacagucgccgagcagccucccaguauuguaguggagcuauaugaccaugauacauacggagccgaugaauuuauggguaggugcauuugccagccuucccuggaaaggaugccucgacucgcgugguucccauugacucggggcucucagcccaguggcgaauuacuggccagcuucgaacuuauccagcgugaaaaacccgcgauucaccauauaccuggauucgaagugcaggagacaaguagaauucuagaugagagcgaagacaccgaccucccauauccccccccacagagggaagcuaacaucuacaugguuccacagaacaucaaacccgcacugcagcgaacugccaucgagauucuugcuuggggccugagaaauaugaagucauaccagcuggccaacauuaguagccccucccuggucguggaaugcgguggucagaccguccagucuugcguuaucaggaaucugcgaaaaaauccuaacuuugacaucuguacacuguucauggaggucaugcuaccucgugaagagcuguacugccccccaaucacagucaaagugaucgauaaucggcaguuuggccgccggcccguggugggacaauguacaaucaggucccuagaguccuuucugugcgacccuuacucugccgaaucuccuucaccccaagggggcccugacgaugugagucugcugucuccuggggaggauguucugaucgauaucgacgacaaagaaccccugauaccuauucaggaggaggaauucauugauuggugguccaaguucuucgcuagcaucggagagagagagaaaugcggguccuacuuagaaaaggacuucgacacccucaagguuuaugacacacagcucgaaaauguugaggcauuugagggccuaagugauuucugcaacaccuucaaacuuuacagaggcaagacccaagaagagacugaagauccgucugugauuggugaauucaagggccuguuuaaaauauauccccugccugaagaucccgcuaucccaaugcccccucgacaauuccaucagcucgcggcacagggaccacaggaaugccuugugaggauuuacaucgugagggcuuuuggccugcaaccuaaagauccaaacgguaagugcgaucccuauaucaagaucucgauaggaaagaagagcguuucugaccaggacaacuacaucccuugcacgcuggagcccgucuucgggaagauguucgagcugaccugcacacucccccuugagaaggaccuaaagauuacacuguacgauuacgaccuucuaaguaaggacgaaaagaucggcgaaacaguagucgaucuggagaaccgccugcucucgaaauucggggcacggugugggcugccacagacuuauugcgugucaggaccuaaucaguggcgagaccagcuccgcccaucucagcugcuucaucucuucugucagcagcaccgugucaaagcaccgguuuaucggaccgacagagucauguuccaggauaaggaguauucuaucgaagagaucgaggcggguagaauuccuaacccucaucuaggccccguagaggaacgccuggcauuacacgugcuccagcagcaggggcuggugccugaacacguugagucuaggccccucuacucaccucuucaaccugacaucgagcagggcaaacuccaaauguggguggaccuuuucccgaaggcccugggcagaccaggcccuccuuucaauauuacgcccagacgagcacgacgguuuuuuuuaagaugcauuauuuggaacacccgugaugugauccuugacgaccucucccugaccggcgaaaaaaugagcgacaucuacgugaagggauggaugauaggguucgaagaacacaagcagaagaccgacgugcacuauagaagccugggcggggaggggaacuucaacuggcgauuuaucuucccguucgauuaucugccugccgagcaggugugcacuaucgccaagaaggacgcauucuggaggcuagacaaaacagaaucuaaaauaccagcuagaguuguuuuccagaucugggacaacgauaaguuuucuuuugacgauuuccuaggcuccuugcaacuugaccugaaucggaugccgaaaccugccaagacugcgaaaaaauguucacuggaccagcuagaugacgccuuccacccagagugguuugugagcuuguuugaacagaaaaccgucaaagggugguggccauguguggcagaggagggagaaaagaagauucucgcgggcaagcuggaaaugacucuggagaucguggcugaaucugaacacgaggaaagacccgccggacagggccgcgaugaaccaaauaugaacccuaaacuggaagauccaaggcgcccugacacuagcuuccucugguuuaccucaccauauaagacuaugaaguuuauccuguggcggcgguucaggugggcaauaaucuuauucaucauccuguuuaucuuacuacucuuucucgcaauauuuauuuacgcuuuuccgaacuacgccgccaugaagcuggugaagccuuuuaguuag

SEQ ID NO: 49054 - RNA, 6297 nt, Artificial Sequence
  derived and/or modified sequence
augcuuugcuguuuacuagugagagcaucaaaccugcccuccgccaagaaggauagaagaagugacccaguggcaucacugacguuucggggcgugaaaaagagaacuaaaguaaucaaaaacucuguuaaccccguuuggaaugaaggcuuugaaugggaccugaaaggaauaccuuuagaccagggaagugaacugcacguuguagucaaagaucaugagacuaugggucguaauagauuccucggggaagcaaaagugccucugcgcgaaguucuggcaacccccucucugagcgccucuuuuaaugccccucugcuugauacuaagaagcagcccacuggugcaucucucgugcugcaaguuucuuauaccccauugccaggagccguuccauuauuucccccucccacaccauuagagcccucuccgacacugcccgaccuggacgugguggcuggggguggccagucacgcgccgagacuuggagccugcuuagugacucaaccauggacacaagauauagcggaaaaaaauggccggccccaacugauacagggggagaagaagacacagaagaccaagguuugaccggagacgaagcugagccuuuucuagaccagucuggcggucccggagcgccaaccaccccucggaagcuccccucucgaccaccuccucauuaccccgggauaaaacgcaaacgaucagcccccaccuccaggaagcuucucucagacaaaccacaggacuuccagauucgcguccaggucaucgaagggcgccaacucccaggcgucaauaucaaacccguugugaaaguaacugccgccggccaaacaaagcgaacuaggauucauaaaggaaauuccccacuguucaaugagacucuguucuucaaucucuucgauucccccggcgaguuauucgaugagccuauuuucauuacagucguggacucucggucccucagaacagacgcucuccugggugaauuuaggauggauguggguacuauuuaccgugaaccucggcacgccuaccugcgaaaguggcuccuuuuaucagauccagacgauuuuucggcaggggccagaggauaccugaagaccuccuuguguguuuugggucccggcgaugaggcgcccuuggaaagaaaagaccccucggaagauaaggaagauauugagucuaaucuccuuagacccaccggugucgcucugcguggagcccacuucugucugaagguguuucgggccgaagauuugccacagauggacgaugcugucauggacaauguaaaacagaucuuuggguuugaauccaacaagaaaaaucucguagaccccuucgucgagguuagcuucgcggguaaaaugcuguguucuaaaauacuagagaaaacugcgaauccccaauggaaccagaauaucacucucccugccauguuuccaaguaugugcgaaaaaaugagaauucggaucaucgauugggacagacucacacauaaugauauuguugccaccacauaccuuucuaugucuaaaaucucagcaccagggggagagauugagguagaugauuaucugggguuuuugcccaccuucggccccugcuacaucaaccuguauggcucuccaagggaauuuacaggauuuccggauccguacacagaacugaacacugggaaaggugagggcguagcauacaggggacggcuccuccucucacuggaaacaaaauuaguagagcacagcgaacaaaaaguagaagaucuacccgcugacgauauauuacggguugagaaauauuugagacgccggaaauacucacuguuugcugccuuuuauuccgccacaaugcuccaggauguggacgacgccauucaguucgaggugucaauaggaaauuacgggaacaaguuugauaugaccuguuugccauuggcuaguacuacacaauacuccagggccguuuuugacggaugucacuauuauuaccuaccuuggggaaacgugaaacccguagugguauuauccuccuacugggaagauaucagccacagaauugaaacacagaaucaguuguugggcauagcagaccgccuugaggcuggauuagagcaaguucaccuagccuugaaggcccagugcagcacugaagacguggacucacugguugcucaacugaccgacgaacucauugcuggcugcucucagccccuuggcgacauucacgagacccccagcgcgacccaccuagaucaauaucuuuaucaacuucggacgcaccaccucagucagaucacagaagccgccuuagcgcuuaaacuaggacauucugaacuccccgccgccuuagagcaggcagaagauuggcugcuucgcuugcgugcauuagcagaagaaccgcagaauagccugcccgauaucgugauauggaugcuccagggggacaagcgcguagccuaucaaagaguuccugcacaucaaguuuuauucucaaggaggggggccaacuauuguggaaagaacuguggcaaacuucagacuauauucuugaaauacccuauggaaaaggugcccggugcucggaugcccgugcaaaucaggguuaaacugugguuuggccugucagucgacgagaaggaauucaaccaguucgcugaaggaaaauuguccguguucgcagagaccuacgaaaacgagacuaaacuagcucuggugggcaacugggguacuaccggccugacguauccuaaauucucugauguuacaggcaaaaucaaacuucccaaagacagcuuuaggccaucugccggauggacaugggccggugauugguuuguguguccugaaaaaacauuacuucacgacauggacgcuggacaucucucauucguugaagagguuuuugagaaccagacaaggcugccaggaggccaguggauuuacauguccgauaacuacaccgauguuaacggagaaaaggugcugccaaaagacgacauugaguguccgcucggauggaaaugggaagaugaggaguggaguacugauuugaaucgcgcaguugacgagcaggguugggaguacagcaucacaaucccacccgagagaaagccuaaacacugggugcccgcggagaaaauguauuauacgcaccgcaggcggcggugggucagauuaaggcguagggaccucagucagauggaagcacuaaaacggcaccgccaagccgaagccgagggggaagguugggaguaugccagcuuguuuggauggaaguuucaucuggaguauagaaagacggacgcuuuuagacgucgcagguggcgaagacguauggaaccccuagaaaaaacaggcccagcugccguguucgcccucgagggugcucuugguggagugauggaugauaaaagugaggacagcaugucgguguccacccugagcuuuggggugaauagaccuacaauuaguugcaucuuugacuacgggaaucgcuaccaucugagaugcuacauguaccaggcccgagaucuggcagcuauggauaaggauuccuuuucagaccccuaugcuaucgucucuuuuuugcaucaaucacagaaaaccgucguugucaaaaacacccuuaauccuaccugggaccagacguugaucuuuuaugaaaucgagauuuuuggagagcccgcaacaguggcugagcaacccccuucaauuguuguggaguuguacgaccacgauaccuacggagccgaugaauucaugggucgcuguauuugucagccaucucuggaacguaugccucgguuggccugguuuccauuaaccaggggaagccaacccucaggugagcugcuggcaucauucgagcugauacagagggagaagcccgccauucaccauaucccaggcuucgaagugcaagaaaccuccaggauccuggacgaaucagaggacaccgacuuaccuuacccucccccccagcgugaggccaacaucuacaugguuccccagaauaucaagccugcgcugcaaagaacagccauugagauacucgccuggggacuuaggaacaugaaaucauaucaauuagccaauauuucgucucccagucugguaguggaauguggaggucagacaguucagagcugcgucauccggaaccugcguaaaaacccuaacuuugacaucuguaccuuguucauggaagugaugcuuccccgagaagaguuauacugccccccaaucacagugaaggugaucgacaaccgacaauuuggcaggagaccaguaguuggucaguguacaauccgaucucucgaauccuuucucugcgauccguacuccgccgaguccccaaguccacagggcggccccgacgaugucagccugcugucaccuggagaggacgugcugaucgauauugaugacaaagagccccugauuccaauucaggaggaggaguuuauagacugguggucgaaguuuuucgccucuaucggagaacgugaaaaaugcggcucguaucuggagaaagacuuugacacccucaagguguacgauacacaguuagagaaugucgaagccuuugagggacuuagcgacuuuuguaauaccuucaagcucuaccgagguaagacacaggaggaaaccgaagacccuagcgugauuggugaauucaaggggcuguucaagaucuacccccugccugaagauccugccaucccuaugccacccagacaauuccaccagcuggcugcccaaggaccacaagaauguuuggugcgcauuuacaucgugagagcuuuuggccugcaacccaaagaccccaacggaaagugcgauccauacauuaaaaucuccaucgguaagaaaaguguaagcgaccaggacaacuacauaccuuguacauuggaaccugucuuuggaaagauguuugagcugacgugcacccucccccuggagaaggaccuuaaaaucacacucuaugacuacgaucugcuuaguaaggaugagaaaauuggcgagacgguuguugaucuggaaaauaggcuacugaguaaguucggcgcccgcugcggacugccccagacauacugcgucuccggaccuaaccaauggagggaucagcuucggccuucccaguuacuacaucuuuucugucagcagcaucgcguaaaggccccuguguaccgaacagaccguguuauguuucaggacaaggaguacuccaucgaggagauugaggcuggccguauucccaauccccaccucggcccaguggaagaacgccuggcacuacacguccugcagcagcaaggauuggucccugaacacgucgaaaguaggccacuguacuccccucugcagccugacauugaacaaggcaagcugcagauguggguggaccucuuucccaaggcacucggccgaccaggcccuccuuucaauaucacaccacggcgagcaagacgcuuuuucuugagauguauuauauggaacaccagagacgugauuuuggacgacuuauccuuaaccggagagaaaaugagugacaucuauguuaagggguggaugaucggcuucgaagaacacaagcagaaaacggacgugcauuauagguccuugggcggagaaggaaacuuuaacuggagauuuaucuucccauuugacuaccugccagccgaacagguguguacaauagcgaaaaaggaugcguuuuggcggcuggacaagaccgaaucuaaaauucccgccagaguaguuuuucagauuugggauaaugacaaauucagcuucgaugauuuccucggcucacugcagcuugaccuuaaucgcaugccaaaaccggcaaaaacugcaaaaaaguguucgcuagaucagcucgaugacgcuuuucacccagagugguuuguaucauuguucgagcagaagaccgugaagggaugguggccaugugucgcugaagagggagagaaaaagauacucgccggcaaacuagaaaugacacuggagauuguagcugaaucggaacaugaggaacgaccugcugggcagggccgagacgagccaaacaugaaccccaaacuggaggauccgcggcgcccagauacauccuuucugugguuuaccucaccauauaagacaaugaaguuuauucucuggcggagguuuagaugggccaucauccuuuucauaauucuuuucauccugcuguuauucuuggcgaucuucauauacgcauucccgaauuacgcagcaaugaaacugguaaaaccuuuuucuuag

SEQ ID NO: 49055 - DNA, 6616 bp, Artificial Sequence
  derived and/or modified sequence
tctccgcggaggagcagcgaaggcgacagctctcttggcgcggctgcctgggagccgggcgcttgctgggtgggtgctcgggcccggtgctcccgctcccgccctgactgcgcgcctgtgtgccgccggggctgcccagccatgctgtgctgcctgctggtgagggccagcaacctccccagtgcgaagaaggaccggcgcagcgaccctgtcgcaagcctgactttccgaggggtgaagaagagaaccaaagtcatcaagaacagcgtgaaccctgtatggaatgagggatttgaatgggacctcaagggcatccccctggaccagggctctgagcttcatgtggtggtcaaagaccatgagacgatggggaggaacaggttcctgggggaagccaaggtcccactccgagaggtcctcgccacccctagtctgtccgccagcttcaatgcccccctgctggacaccaagaagcagcccacaggggcctcgctggtcctgcaggtgtcctacacaccgctgcctggagctgtgcccctgttcccgccccctactcctctggagccctccccgactctgcctgacctggatgtagtggcagacacaggaggagaggaagacacagaggaccagggactcactggagatgaggcggagccattcctggatcaaagcggaggcccgggggctcccaccaccccaaggaaactaccttcacgtcctccgccccactaccccgggatcaaaagaaagcgaagtgcgcctacatctagaaagctgctgtcagacaaaccgcaggatttccagatcagggtccaggtgatcgaggggcgccagctgccgggggtgaacatcaagcctgtggtcaaggttaccgctgcagggcagaccaagcggacgcggatccacaagggaaacagcccactcttcaatgagactcttttcttcaacttgtttgactctcctggggagctgtttgatgagcccatctttatcacggtggtagactctcgttctctcaggacagatgctctcctcggggagttccggatggacgtgggcaccatttacagagagccccggcacgcctatctcaggaagtggctgctgctctcagaccctgatgacttctctgctggggccagaggctacctgaaaacaagcctttgtgtgctggggcctggggacgaagcgcctctggagagaaaagacccctctgaagacaaggaggacattgaaagcaacctgctccggcccacaggcgtagccctgcgaggagcccacttctgcctgaaggtcttccgggccgaggacttgccgcagatggacgatgccgtgatggacaacgtgaaacagatctttggcttcgagagtaacaagaagaacttggtggacccctttgtggaggtcagctttgcggggaaaatgctgtgcagcaagatcttggagaagacggccaaccctcagtggaaccagaacatcacactgcctgccatgtttccctccatgtgcgaaaaaatgaggattcgtatcatagactgggaccgcctgactcacaatgacatcgtggctaccacctacctgagtatgtcgaaaatctctgcccctggaggagaaatagaagtggatgactacctgggcttcctccccacttttgggccctgctacatcaacctctatggcagtcccagagagttcacaggcttcccagacccctacacagagctcaacacaggcaagggggaaggtgtggcttatcgtggccggcttctgctctccctggagaccaagctggtggagcacagtgaacagaaggtggaggaccttcctgcggatgacatcctccgggtggagaagtaccttaggaggcgcaagtactccctgtttgcggccttctactcagccaccatgctgcaggatgtggatgatgccatccagtttgaggtcagcatcgggaactacgggaacaagttcgacatgacctgcctgccgctggcctccaccactcagtacagccgtgcagtctttgacgggtgccactactactacctaccctggggtaacgtgaaacctgtggtggtgctgtcatcctactgggaggacatcagccatagaatcgagactcagaaccagctgcttgggattgctgaccggctggaagctggcctggagcaggtccacctggccctgaaggcgcagtgctccacggaggacgtggactcgctggtggctcagctgacggatgagctcatcgcaggctgcagccagcctctgggtgacatccatgagacaccctctgccacccacctggaccagtacctgtaccagctgcgcacccatcacctgagccaaatcactgaggctgccctggccctgaagctcggccacagtgagctccctgcagctctggagcaggcggaggactggctcctgcgtctgcgtgccctggcagaggagccccagaacagcctgccggacatcgtcatctggatgctgcagggagacaagcgtgtggcataccagcgggtgcccgcccaccaagtcctcttctcccggcggggtgccaactactgtggcaagaattgtgggaagctacagacaatctttctgaaatatccgatggagaaggtgcctggcgcccggatgccagtgcagatacgggtcaagctgtggtttgggctctcagtggatgagaaggagttcaaccagtttgctgaggggaagctgtctgtctttgctgaaacctatgagaacgagactaagttggcccttgttgggaactggggcacaacgggcctcacctaccccaagttttctgacgtcacgggcaagatcaagctacccaaggacagcttccgcccctcggccggctggacctgggctggagattggttcgtgtgtccggagaagactctgctccatgacatggacgccggtcacctgagcttcgtggaagaggtgtttgagaaccagacccggcttcccggaggccagtggatctacatgagtgacaactacaccgatgtgaacggggagaaggtgcttcccaaggatgacattgagtgcccactgggctggaagtgggaagatgaggaatggtccacagacctcaaccgggctgtcgatgagcaaggctgggagtatagcatcaccatccccccggagcggaagccgaagcactgggtccctgctgagaagatgtactacacacaccgacggcggcgctgggtgcgcctgcgcaggagggatctcagccaaatggaagcactgaaaaggcacaggcaggcggaggcggagggcgagggctgggagtacgcctctctttttggctggaagttccacctcgagtaccgcaagacagatgccttccgccgccgccgctggcgccgtcgcatggagccactggagaagacggggcctgcagctgtgtttgcccttgagggggccctgggcggcgtgatggatgacaagagtgaagattccatgtccgtctccaccttgagcttcggtgtgaacagacccacgatttcctgcatattcgactatgggaaccgctaccatctacgctgctacatgtaccaggcccgggacctggctgcgatggacaaggactctttttctgatccctatgccatcgtctccttcctgcaccagagccagaagacggtggtggtgaagaacacccttaaccccacctgggaccagacgctcatcttctacgagatcgagatctttggcgagccggccacagttgctgagcaaccgcccagcattgtggtggagctgtacgaccatgacacttatggtgcagacgagtttatgggtcgctgcatctgtcaaccgagtctggaacggatgccacggctggcctggttcccactgacgaggggcagccagccgtcgggggagctgctggcctcttttgagctcatccagagagagaagccggccatccaccatattcctggttttgaggtgcaggagacatcaaggatcctggatgagtctgaggacacagacctgccctacccaccaccccagagggaggccaacatctacatggttcctcagaacatcaagccagcgctccagcgtaccgccatcgagatcctggcatggggcctgcggaacatgaagagttaccagctggccaacatctcctcccccagcctcgtggtagagtgtgggggccagacggtgcagtcctgtgtcatcaggaacctccggaagaaccccaactttgacatctgcaccctcttcatggaagtgatgctgcccagggaggagctctactgcccccccatcaccgtcaaggtcatcgataaccgccagtttggccgccggcctgtggtgggccagtgtaccatccgctccctggagagcttcctgtgtgacccctactcggcggagagtccatccccacagggtggcccagacgatgtgagcctactcagtcctggggaagacgtgctcatcgacattgatgacaaggagcccctcatccccatccaggaggaagagttcatcgattggtggagcaaattctttgcctccataggggagagggaaaagtgcggctcctacctggagaaggattttgacaccctgaaggtctatgacacacagctggagaatgtggaggcctttgagggcctgtctgacttttgtaacaccttcaagctgtaccggggcaagacgcaggaggagacagaagatccatctgtgattggtgaatttaagggcctcttcaaaatttatcccctcccagaagacccagccatccccatgcccccaagacagttccaccagctggccgcccagggaccccaggagtgcttggtccgtatctacattgtccgagcatttggcctgcagcccaaggaccccaatggaaagtgtgatccttacatcaagatctccatagggaagaaatcagtgagtgaccaggataactacatcccctgcacgctggagcccgtatttggaaagatgttcgagctgacctgcactctgcctctggagaaggacctaaagatcactctctatgactatgacctcctctccaaggacgaaaagatcggtgagacggtcgtcgacctggagaacaggctgctgtccaagtttggggctcgctgtggactcccacagacctactgtgtctctggaccgaaccagtggcgggaccagctccgcccctcccagctcctccacctcttctgccagcagcatagagtcaaggcacctgtgtaccggacagaccgtgtaatgtttcaggataaagaatattccattgaagagatagaggctggcaggatcccaaacccacacctgggcccagtggaggagcgtctggctctgcatgtgcttcagcagcagggcctggtcccggagcacgtggagtcacggcccctctacagccccctgcagccagacatcgagcaggggaagctgcagatgtgggtcgacctatttccgaaggccctggggcggcctggacctcccttcaacatcaccccacggagagccagaaggtttttcctgcgttgtattatctggaataccagagatgtgatcctggatgacctgagcctcacgggggagaagatgagcgacatttatgtgaaaggttggatgattggctttgaagaacacaagcaaaagacagacgtgcattatcgttccctgggaggtgaaggcaacttcaactggaggttcattttccccttcgactacctgccagctgagcaagtctgtaccattgccaagaaggatgccttctggaggctggacaagactgagagcaaaatcccagcacgagtggtgttccagatctgggacaatgacaagttctcctttgatgattttctgggctccctgcagctcgatctcaaccgcatgcccaagccagccaagacagccaagaagtgctccttggaccagctggatgatgctttccacccagaatggtttgtgtccctttttgagcagaaaacagtgaagggctggtggccctgtgtagcagaagagggtgagaagaaaatactggcgggcaagctggaaatgaccttggagattgtagcagagagtgagcatgaggagcggcctgctggccagggccgggatgagcccaacatgaaccctaagcttgaggacccaaggcgccccgacacctccttcctgtggtttacctccccatacaagaccatgaagttcatcctgtggcggcgtttccggtgggccatcatcctcttcatcatcctcttcatcctgctgctgttcctggccatcttcatctacgccttcccgaactatgctgccatgaagctggtgaagcccttcagctgaggactctcctgccctgtagaaggggccgtggggtcccctccagcatgggactggcctgcctcctccgcccagctcggcgagctcctccagacctcctaggcctgattgtcctgccagggtgggcagacagacagatggaccggcccacactcccagagttgctaacatggagctctgagatcaccccacttccatcatttccttctcccccaacccaacgcttttttggatcagctcagacatatttcagtataaaacagttggaaccaca

SEQ ID NO: 49056 - protein, 2119 aa, Artificial Sequence
  derived and/or modified sequence
MLCCLLVRASNLPSAKKDRRSDPVASLTFRGVKKRTKVIKNSVNPVWNEGFEWDLKGIPLDQGSELHVVVKDHETMGRNRFLGEAKVPLREVLATPSLSASFNAPLLDTKKQPTGASLVLQVSYTPLPGAVPLFPPPTPLEPSPTLPDLDVVAGGGQSRAETWSLLSDSTMDTRYSGKKWPAPTDTGGEEDTEDQGLTGDEAEPFLDQSGGPGAPTTPRKLPSRPPPHYPGIKRKRSAPTSRKLLSDKPQDFQIRVQVIEGRQLPGVNIKPVVKVTAAGQTKRTRIHKGNSPLFNETLFFNLFDSPGELFDEPIFITVVDSRSLRTDALLGEFRMDVGTIYREPRHAYLRKWLLLSDPDDFSAGARGYLKTSLCVLGPGDEAPLERKDPSEDKEDIESNLLRPTGVALRGAHFCLKVFRAEDLPQMDDAVMDNVKQIFGFESNKKNLVDPFVEVSFAGKMLCSKILEKTANPQWNQNITLPAMFPSMCEKMRIRIIDWDRLTHNDIVATTYLSMSKISAPGGEIEVDDYLGFLPTFGPCYINLYGSPREFTGFPDPYTELNTGKGEGVAYRGRLLLSLETKLVEHSEQKVEDLPADDILRVEKYLRRRKYSLFAAFYSATMLQDVDDAIQFEVSIGNYGNKFDMTCLPLASTTQYSRAVFDGCHYYYLPWGNVKPVVVLSSYWEDISHRIETQNQLLGIADRLEAGLEQVHLALKAQCSTEDVDSLVAQLTDELIAGCSQPLGDIHETPSATHLDQYLYQLRTHHLSQITEAALALKLGHSELPAALEQAEDWLLRLRALAEEPQNSLPDIVIWMLQGDKRVAYQRVPAHQVLFSRRGANYCGKNCGKLQTIFLKYPMEKVPGARMPVQIRVKLWFGLSVDEKEFNQFAEGKLSVFAETYENETKLALVGNWGTTGLTYPKFSDVTGKIKLPKDSFRPSAGWTWAGDWFVCPEKTLLHDMDAGHLSFVEEVFENQTRLPGGQWIYMSDNYTDVNGEKVLPKDDIECPLGWKWEDEEWSTDLNRAVDEQGWEYSITIPPERKPKHWVPAEKMYYTHRRRRWVRLRRRDLSQMEALKRHRQAEAEGEGWEYASLFGWKFHLEYRKTDAFRRRRWRRRMEPLEKTGPAAVFALEGALGGVMDDKSEDSMSVSTLSFGVNRPTISCIFDYGNRYHLRCYMYQARDLAAMDKDSFSDPYAIVSFLHQSQKTVVVKNTLNPTWDQTLIFYEIEIFGEPATVAEQPPSIVVELYDHDTYGADEFMGRCICQPSLERMPRLAWFPLTRGSQPSGELLASFELIQREKPAIHHIPGFEVQETSRILDESEDTDLPYPPPQREANIYMVPQNIKPALQRTAIEILAWGLRNMKSYQLANISSPSLVVECGGQTVQSCVIRNLRKNPNFDICTLFMEVMLPREELYCPPITVKVIDNRQFGRRPVVGQCTIRSLESFLCDPYSAESPSPQGGPDDVSLLSPGEDVLIDIDDKEPLIPIQLADGLSSLAPTNTASPPSSPHEEEFIDWWSKFFASIGEREKCGSYLEKDFDTLKVYDTQLENVEAFEGLSDFCNTFKLYRGKTQEETEDPSVIGEFKGLFKIYPLPEDPAIPMPPRQFHQLAAQGPQECLVRIYIVRAFGLQPKDPNGKCDPYIKISIGKKSVSDQDNYIPCTLEPVFGKMFELTCTLPLEKDLKITLYDYDLLSKDEKIGETVVDLENRLLSKFGARCGLPQTYCVSGPNQWRDQLRPSQLLHLFCQQHRVKAPVYRTDRVMFQDKEYSIEEIEAGRIPNPHLGPVEERLALHVLQQQGLVPEHVESRPLYSPLQPDIEQGKLQMWVDLFPKALGRPGPPFNITPRRARRFFLRCIIWNTRDVILDDLSLTGEKMSDIYVKGWMIGFEEHKQKTDVHYRSLGGEGNFNWRFIFPFDYLPAEQVCTIAKKDAFWRLDKTESKIPARVVFQIWDNDKFSFDDFLGSLQLDLNRMPKPAKTAKKCSLDQLDDAFHPEWFVSLFEQKTVKGWWPCVAEEGEKKILAGKLEMTLEIVAESEHEERPAGQGRDEPNMNPKLEDPRRPDTSFLWFTSPYKTMKFILWRRFRWAIILFIILFILLLFLAIFIYAFPNYAAMKLVKPFS

SEQ ID NO: 49057 - DNA, 6772 bp, Artificial Sequence
  derived and/or modified sequence
tctccgcggaggagcagcgaaggcgacagctctcttggcgcggctgcctgggagccgggcgcttgctgggtgggtgctcgggcccggtgctcccgctcccgccctgactgcgcgcctgtgtgccgccggggctgcccagccatgctgtgctgcctgctggtgagggccagcaacctccccagtgcgaagaaggaccggcgcagcgaccctgtcgcaagcctgactttccgaggggtgaagaagagaaccaaagtcatcaagaacagcgtgaaccctgtatggaatgagggatttgaatgggacctcaagggcatccccctggaccagggctctgagcttcatgtggtggtcaaagaccatgagacgatggggaggaacaggttcctgggggaagccaaggtcccactccgagaggtcctcgccacccctagtctgtccgccagcttcaatgcccccctgctggacaccaagaagcagcccacaggggcctcgctggtcctgcaggtgtcctacacaccgctgcctggagctgtgcccctgttcccgccccctactcctctggagccctccccgactctgcctgacctggatgtagtggcaggcgggggacagagccgggccgagacttggtccctgctcagtgacagcaccatggacacgagatactctggaaagaagtggccggcccccacggacacaggaggagaggaagacacagaggaccagggactcactggagatgaggcggagccattcctggatcaaagcggaggcccgggggctcccaccaccccaaggaaactaccttcacgtcctccgccccactaccccgggatcaaaagaaagcgaagtgcgcctacatctagaaagctgctgtcagacaaaccgcaggatttccagatcagggtccaggtgatcgaggggcgccagctgccgggggtgaacatcaagcctgtggtcaaggttaccgctgcagggcagaccaagcggacgcggatccacaagggaaacagcccactcttcaatgagactcttttcttcaacttgtttgactctcctggggagctgtttgatgagcccatctttatcacggtggtagactctcgttctctcaggacagatgctctcctcggggagttccggatggacgtgggcaccatttacagagagccccggcacgcctatctcaggaagtggctgctgctctcagaccctgatgacttctctgctggggccagaggctacctgaaaacaagcctttgtgtgctggggcctggggacgaagcgcctctggagagaaaagacccctctgaagacaaggaggacattgaaagcaacctgctccggcccacaggcgtagccctgcgaggagcccacttctgcctgaaggtcttccgggccgaggacttgccgcagatggacgatgccgtgatggacaacgtgaaacagatctttggcttcgagagtaacaagaagaacttggtggacccctttgtggaggtcagctttgcggggaaaatgctgtgcagcaagatcttggagaagacggccaaccctcagtggaaccagaacatcacactgcctgccatgtttccctccatgtgcgaaaaaatgaggattcgtatcatagactgggaccgcctgactcacaatgacatcgtggctaccacctacctgagtatgtcgaaaatctctgcccctggaggagaaatagaagtggatgactacctgggcttcctccccacttttgggccctgctacatcaacctctatggcagtcccagagagttcacaggcttcccagacccctacacagagctcaacacaggcaagggggaaggtgtggcttatcgtggccggcttctgctctccctggagaccaagctggtggagcacagtgaacagaaggtggaggaccttcctgcggatgacatcctccgggtggagaagtaccttaggaggcgcaagtactccctgtttgcggccttctactcagccaccatgctgcaggatgtggatgatgccatccagtttgaggtcagcatcgggaactacgggaacaagttcgacatgacctgcctgccgctggcctccaccactcagtacagccgtgcagtctttgacgggtgccactactactacctaccctggggtaacgtgaaacctgtggtggtgctgtcatcctactgggaggacatcagccatagaatcgagactcagaaccagctgcttgggattgctgaccggctggaagctggcctggagcaggtccacctggccctgaaggcgcagtgctccacggaggacgtggactcgctggtggctcagctgacggatgagctcatcgcaggctgcagccagcctctgggtgacatccatgagacaccctctgccacccacctggaccagtacctgtaccagctgcgcacccatcacctgagccaaatcactgaggctgccctggccctgaagctcggccacagtgagctccctgcagctctggagcaggcggaggactggctcctgcgtctgcgtgccctggcagaggagccccagaacagcctgccggacatcgtcatctggatgctgcagggagacaagcgtgtggcataccagcgggtgcccgcccaccaagtcctcttctcccggcggggtgccaactactgtggcaagaattgtgggaagctacagacaatctttctgaaatatccgatggagaaggtgcctggcgcccggatgccagtgcagatacgggtcaagctgtggtttgggctctcagtggatgagaaggagttcaaccagtttgctgaggggaagctgtctgtctttgctgaaacctatgagaacgagactaagttggcccttgttgggaactggggcacaacgggcctcacctaccccaagttttctgacgtcacgggcaagatcaagctacccaaggacagcttccgcccctcggccggctggacctgggctggagattggttcgtgtgtccggagaagactctgctccatgacatggacgccggtcacctgagcttcgtggaagaggtgtttgagaaccagacccggcttcccggaggccagtggatctacatgagtgacaactacaccgatgtgaacggggagaaggtgcttcccaaggatgacattgagtgcccactgggctggaagtgggaagatgaggaatggtccacagacctcaaccgggctgtcgatgagcaaggctgggagtatagcatcaccatccccccggagcggaagccgaagcactgggtccctgctgagaagatgtactacacacaccgacggcggcgctgggtgcgcctgcgcaggagggatctcagccaaatggaagcactgaaaaggcacaggcaggcggaggcggagggcgagggctgggagtacgcctctctttttggctggaagttccacctcgagtaccgcaagacagatgccttccgccgccgccgctggcgccgtcgcatggagccactggagaagacggggcctgcagctgtgtttgcccttgagggggccctgggcggcgtgatggatgacaagagtgaagattccatgtccgtctccaccttgagcttcggtgtgaacagacccacgatttcctgcatattcgactatgggaaccgctaccatctacgctgctacatgtaccaggcccgggacctggctgcgatggacaaggactctttttctgatccctatgccatcgtctccttcctgcaccagagccagaagacggtggtggtgaagaacacccttaaccccacctgggaccagacgctcatcttctacgagatcgagatctttggcgagccggccacagttgctgagcaaccgcccagcattgtggtggagctgtacgaccatgacacttatggtgcagacgagtttatgggtcgctgcatctgtcaaccgagtctggaacggatgccacggctggcctggttcccactgacgaggggcagccagccgtcgggggagctgctggcctcttttgagctcatccagagagagaagccggccatccaccatattcctggttttgaggtgcaggagacatcaaggatcctggatgagtctgaggacacagacctgccctacccaccaccccagagggaggccaacatctacatggttcctcagaacatcaagccagcgctccagcgtaccgccatcgagatcctggcatggggcctgcggaacatgaagagttaccagctggccaacatctcctcccccagcctcgtggtagagtgtgggggccagacggtgcagtcctgtgtcatcaggaacctccggaagaaccccaactttgacatctgcaccctcttcatggaagtgatgctgcccagggaggagctctactgcccccccatcaccgtcaaggtcatcgataaccgccagtttggccgccggcctgtggtgggccagtgtaccatccgctccctggagagcttcctgtgtgacccctactcggcggagagtccatccccacagggtggcccagacgatgtgagcctactcagtcctggggaagacgtgctcatcgacattgatgacaaggagcccctcatccccatccagcttgcagacggtctgtcgagcttggcccccactaacacggcttctcctccatccagtcctcatgaggaagagttcatcgattggtggagcaaattctttgcctccataggggagagggaaaagtgcggctcctacctggagaaggattttgacaccctgaaggtctatgacacacagctggagaatgtggaggcctttgagggcctgtctgacttttgtaacaccttcaagctgtaccggggcaagacgcaggaggagacagaagatccatctgtgattggtgaatttaagggcctcttcaaaatttatcccctcccagaagacccagccatccccatgcccccaagacagttccaccagctggccgcccagggaccccaggagtgcttggtccgtatctacattgtccgagcatttggcctgcagcccaaggaccccaatggaaagtgtgatccttacatcaagatctccatagggaagaaatcagtgagtgaccaggataactacatcccctgcacgctggagcccgtatttggaaagatgttcgagctgacctgcactctgcctctggagaaggacctaaagatcactctctatgactatgacctcctctccaaggacgaaaagatcggtgagacggtcgtcgacctggagaacaggctgctgtccaagtttggggctcgctgtggactcccacagacctactgtgtctctggaccgaaccagtggcgggaccagctccgcccctcccagctcctccacctcttctgccagcagcatagagtcaaggcacctgtgtaccggacagaccgtgtaatgtttcaggataaagaatattccattgaagagatagaggctggcaggatcccaaacccacacctgggcccagtggaggagcgtctggctctgcatgtgcttcagcagcagggcctggtcccggagcacgtggagtcacggcccctctacagccccctgcagccagacatcgagcaggggaagctgcagatgtgggtcgacctatttccgaaggccctggggcggcctggacctcccttcaacatcaccccacggagagccagaaggtttttcctgcgttgtattatctggaataccagagatgtgatcctggatgacctgagcctcacgggggagaagatgagcgacatttatgtgaaaggttggatgattggctttgaagaacacaagcaaaagacagacgtgcattatcgttccctgggaggtgaaggcaacttcaactggaggttcattttccccttcgactacctgccagctgagcaagtctgtaccattgccaagaaggatgccttctggaggctggacaagactgagagcaaaatcccagcacgagtggtgttccagatctgggacaatgacaagttctcctttgatgattttctgggctccctgcagctcgatctcaaccgcatgcccaagccagccaagacagccaagaagtgctccttggaccagctggatgatgctttccacccagaatggtttgtgtccctttttgagcagaaaacagtgaagggctggtggccctgtgtagcagaagagggtgagaagaaaatactggcgggcaagctggaaatgaccttggagattgtagcagagagtgagcatgaggagcggcctgctggccagggccgggatgagcccaacatgaaccctaagcttgaggacccaaggcgccccgacacctccttcctgtggtttacctccccatacaagaccatgaagttcatcctgtggcggcgtttccggtgggccatcatcctcttcatcatcctcttcatcctgctgctgttcctggccatcttcatctacgccttcccgaactatgctgccatgaagctggtgaagcccttcagctgaggactctcctgccctgtagaaggggccgtggggtcccctccagcatgggactggcctgcctcctccgcccagctcggcgagctcctccagacctcctaggcctgattgtcctgccagggtgggcagacagacagatggaccggcccacactcccagagttgctaacatggagctctgagatcaccccacttccatcatttccttctcccccaacccaacgcttttttggatcagctcagacatatttcagtataaaacagttggaaccaca

SEQ ID NO: 49058 - DNA, 6357 bp, Artificial Sequence
  derived and/or modified sequence
atgctgtgctgcctgctggtgcgcgccagcaacctgcccagcgccaagaaggaccgccgcagcgaccccgtggccagcctgaccttccgcggcgtgaagaagcgcaccaaggtgatcaagaacagcgtgaaccccgtgtggaacgagggcttcgagtgggacctgaagggcatccccctggaccagggcagcgagctgcacgtggtggtgaaggaccacgagaccatgggccgcaaccgcttcctgggcgaggccaaggtgcccctgcgcgaggtgctggccacccccagcctgagcgccagcttcaacgcccccctgctggacaccaagaagcagcccaccggcgccagcctggtgctgcaggtgagctacacccccctgcccggcgccgtgcccctgttccccccccccacccccctggagcccagccccaccctgcccgacctggacgtggtggccggcggcggccagagccgcgccgagacctggagcctgctgagcgacagcaccatggacacccgctacagcggcaagaagtggcccgcccccaccgacaccggcggcgaggaggacaccgaggaccagggcctgaccggcgacgaggccgagcccttcctggaccagagcggcggccccggcgcccccaccaccccccgcaagctgcccagccgcccccccccccactaccccggcatcaagcgcaagcgcagcgcccccaccagccgcaagctgctgagcgacaagccccaggacttccagatccgcgtgcaggtgatcgagggccgccagctgcccggcgtgaacatcaagcccgtggtgaaggtgaccgccgccggccagaccaagcgcacccgcatccacaagggcaacagccccctgttcaacgagaccctgttcttcaacctgttcgacagccccggcgagctgttcgacgagcccatcttcatcaccgtggtggacagccgcagcctgcgcaccgacgccctgctgggcgagttccgcatggacgtgggcaccatctaccgcgagccccgccacgcctacctgcgcaagtggctgctgctgagcgaccccgacgacttcagcgccggcgcccgcggctacctgaagaccagcctgtgcgtgctgggccccggcgacgaggcccccctggagcgcaaggaccccagcgaggacaaggaggacatcgagagcaacctgctgcgccccaccggcgtggccctgcgcggcgcccacttctgcctgaaggtgttccgcgccgaggacctgccccagatggacgacgccgtgatggacaacgtgaagcagatcttcggcttcgagagcaacaagaagaacctggtggaccccttcgtggaggtgagcttcgccggcaagatgctgtgcagcaagatcctggagaagaccgccaacccccagtggaaccagaacatcaccctgcccgccatgttccccagcatgtgcgagaagatgcgcatccgcatcatcgactgggaccgcctgacccacaacgacatcgtggccaccacctacctgagcatgagcaagatcagcgcccccggcggcgagatcgaggtggacgactacctgggcttcctgcccaccttcggcccctgctacatcaacctgtacggcagcccccgcgagttcaccggcttccccgacccctacaccgagctgaacaccggcaagggcgagggcgtggcctaccgcggccgcctgctgctgagcctggagaccaagctggtggagcacagcgagcagaaggtggaggacctgcccgccgacgacatcctgcgcgtggagaagtacctgcgccgccgcaagtacagcctgttcgccgccttctacagcgccaccatgctgcaggacgtggacgacgccatccagttcgaggtgagcatcggcaactacggcaacaagttcgacatgacctgcctgcccctggccagcaccacccagtacagccgcgccgtgttcgacggctgccactactactacctgccctggggcaacgtgaagcccgtggtggtgctgagcagctactgggaggacatcagccaccgcatcgagacccagaaccagctgctgggcatcgccgaccgcctggaggccggcctggagcaggtgcacctggccctgaaggcccagtgcagcaccgaggacgtggacagcctggtggcccagctgaccgacgagctgatcgccggctgcagccagcccctgggcgacatccacgagacccccagcgccacccacctggaccagtacctgtaccagctgcgcacccaccacctgagccagatcaccgaggccgccctggccctgaagctgggccacagcgagctgcccgccgccctggagcaggccgaggactggctgctgcgcctgcgcgccctggccgaggagccccagaacagcctgcccgacatcgtgatctggatgctgcagggcgacaagcgcgtggcctaccagcgcgtgcccgcccaccaggtgctgttcagccgccgcggcgccaactactgcggcaagaactgcggcaagctgcagaccatcttcctgaagtaccccatggagaaggtgcccggcgcccgcatgcccgtgcagatccgcgtgaagctgtggttcggcctgagcgtggacgagaaggagttcaaccagttcgccgagggcaagctgagcgtgttcgccgagacctacgagaacgagaccaagctggccctggtgggcaactggggcaccaccggcctgacctaccccaagttcagcgacgtgaccggcaagatcaagctgcccaaggacagcttccgccccagcgccggctggacctgggccggcgactggttcgtgtgccccgagaagaccctgctgcacgacatggacgccggccacctgagcttcgtggaggaggtgttcgagaaccagacccgcctgcccggcggccagtggatctacatgagcgacaactacaccgacgtgaacggcgagaaggtgctgcccaaggacgacatcgagtgccccctgggctggaagtgggaggacgaggagtggagcaccgacctgaaccgcgccgtggacgagcagggctgggagtacagcatcaccatcccccccgagcgcaagcccaagcactgggtgcccgccgagaagatgtactacacccaccgccgccgccgctgggtgcgcctgcgccgccgcgacctgagccagatggaggccctgaagcgccaccgccaggccgaggccgagggcgagggctgggagtacgccagcctgttcggctggaagttccacctggagtaccgcaagaccgacgccttccgccgccgccgctggcgccgccgcatggagcccctggagaagaccggccccgccgccgtgttcgccctggagggcgccctgggcggcgtgatggacgacaagagcgaggacagcatgagcgtgagcaccctgagcttcggcgtgaaccgccccaccatcagctgcatcttcgactacggcaaccgctaccacctgcgctgctacatgtaccaggcccgcgacctggccgccatggacaaggacagcttcagcgacccctacgccatcgtgagcttcctgcaccagagccagaagaccgtggtggtgaagaacaccctgaaccccacctgggaccagaccctgatcttctacgagatcgagatcttcggcgagcccgccaccgtggccgagcagccccccagcatcgtggtggagctgtacgaccacgacacctacggcgccgacgagttcatgggccgctgcatctgccagcccagcctggagcgcatgccccgcctggcctggttccccctgacccgcggcagccagcccagcggcgagctgctggccagcttcgagctgatccagcgcgagaagcccgccatccaccacatccccggcttcgaggtgcaggagaccagccgcatcctggacgagagcgaggacaccgacctgccctacccccccccccagcgcgaggccaacatctacatggtgccccagaacatcaagcccgccctgcagcgcaccgccatcgagatcctggcctggggcctgcgcaacatgaagagctaccagctggccaacatcagcagccccagcctggtggtggagtgcggcggccagaccgtgcagagctgcgtgatccgcaacctgcgcaagaaccccaacttcgacatctgcaccctgttcatggaggtgatgctgccccgcgaggagctgtactgcccccccatcaccgtgaaggtgatcgacaaccgccagttcggccgccgccccgtggtgggccagtgcaccatccgcagcctggagagcttcctgtgcgacccctacagcgccgagagccccagcccccagggcggccccgacgacgtgagcctgctgagccccggcgaggacgtgctgatcgacatcgacgacaaggagcccctgatccccatccagctggccgacggcctgagcagcctggcccccaccaacaccgccagcccccccagcagcccccacgaggaggagttcatcgactggtggagcaagttcttcgccagcatcggcgagcgcgagaagtgcggcagctacctggagaaggacttcgacaccctgaaggtgtacgacacccagctggagaacgtggaggccttcgagggcctgagcgacttctgcaacaccttcaagctgtaccgcggcaagacccaggaggagaccgaggaccccagcgtgatcggcgagttcaagggcctgttcaagatctaccccctgcccgaggaccccgccatccccatgcccccccgccagttccaccagctggccgcccagggcccccaggagtgcctggtgcgcatctacatcgtgcgcgccttcggcctgcagcccaaggaccccaacggcaagtgcgacccctacatcaagatcagcatcggcaagaagagcgtgagcgaccaggacaactacatcccctgcaccctggagcccgtgttcggcaagatgttcgagctgacctgcaccctgcccctggagaaggacctgaagatcaccctgtacgactacgacctgctgagcaaggacgagaagatcggcgagaccgtggtggacctggagaaccgcctgctgagcaagttcggcgcccgctgcggcctgccccagacctactgcgtgagcggccccaaccagtggcgcgaccagctgcgccccagccagctgctgcacctgttctgccagcagcaccgcgtgaaggcccccgtgtaccgcaccgaccgcgtgatgttccaggacaaggagtacagcatcgaggagatcgaggccggccgcatccccaacccccacctgggccccgtggaggagcgcctggccctgcacgtgctgcagcagcagggcctggtgcccgagcacgtggagagccgccccctgtacagccccctgcagcccgacatcgagcagggcaagctgcagatgtgggtggacctgttccccaaggccctgggccgccccggcccccccttcaacatcaccccccgccgcgcccgccgcttcttcctgcgctgcatcatctggaacacccgcgacgtgatcctggacgacctgagcctgaccggcgagaagatgagcgacatctacgtgaagggctggatgatcggcttcgaggagcacaagcagaagaccgacgtgcactaccgcagcctgggcggcgagggcaacttcaactggcgcttcatcttccccttcgactacctgcccgccgagcaggtgtgcaccatcgccaagaaggacgccttctggcgcctggacaagaccgagagcaagatccccgcccgcgtggtgttccagatctgggacaacgacaagttcagcttcgacgacttcctgggcagcctgcagctggacctgaaccgcatgcccaagcccgccaagaccgccaagaagtgcagcctggaccagctggacgacgccttccaccccgagtggttcgtgagcctgttcgagcagaagaccgtgaagggctggtggccctgcgtggccgaggagggcgagaagaagatcctggccggcaagctggagatgaccctggagatcgtggccgagagcgagcacgaggagcgccccgccggccagggccgcgacgagcccaacatgaaccccaagctggaggacccccgccgccccgacaccagcttcctgtggttcaccagcccctacaagaccatgaagttcatcctgtggcgccgcttccgctgggccatcatcctgttcatcatcctgttcatcctgctgctgttcctggccatcttcatctacgccttccccaactacgccgccatgaagctggtgaagcccttcagc

SEQ ID NO: 49059 - DNA, 6360 bp, Artificial Sequence
  derived and/or modified sequence
atgctgtgctgcctgctggtgagagccagcaacctgcccagcgccaagaaggacagaagaagcgaccccgtggccagcctgaccttcagaggcgtgaagaagagaaccaaggtgatcaagaacagcgtgaaccccgtgtggaacgagggcttcgagtgggacctgaagggcatccccctggaccagggcagcgagctgcacgtggtggtgaaggaccacgagaccatgggcagaaacagattcctgggcgaggccaaggtgcccctgagagaggtgctggccacccccagcctgagcgccagcttcaacgcccccctgctggacaccaagaagcagcccaccggcgccagcctggtgctgcaggtgagctacacccccctgcccggcgccgtgcccctgttccccccccccacccccctggagcccagccccaccctgcccgacctggacgtggtggccggcggcggccagagcagagccgagacctggagcctgctgagcgacagcaccatggacaccagatacagcggcaagaagtggcccgcccccaccgacaccggcggcgaggaggacaccgaggaccagggcctgaccggcgacgaggccgagcccttcctggaccagagcggcggccccggcgcccccaccacccccagaaagctgcccagcagaccccccccccactaccccggcatcaagagaaagagaagcgcccccaccagcagaaagctgctgagcgacaagccccaggacttccagatcagagtgcaggtgatcgagggcagacagctgcccggcgtgaacatcaagcccgtggtgaaggtgaccgccgccggccagaccaagagaaccagaatccacaagggcaacagccccctgttcaacgagaccctgttcttcaacctgttcgacagccccggcgagctgttcgacgagcccatcttcatcaccgtggtggacagcagaagcctgagaaccgacgccctgctgggcgagttcagaatggacgtgggcaccatctacagagagcccagacacgcctacctgagaaagtggctgctgctgagcgaccccgacgacttcagcgccggcgccagaggctacctgaagaccagcctgtgcgtgctgggccccggcgacgaggcccccctggagagaaaggaccccagcgaggacaaggaggacatcgagagcaacctgctgagacccaccggcgtggccctgagaggcgcccacttctgcctgaaggtgttcagagccgaggacctgccccagatggacgacgccgtgatggacaacgtgaagcagatcttcggcttcgagagcaacaagaagaacctggtggaccccttcgtggaggtgagcttcgccggcaagatgctgtgcagcaagatcctggagaagaccgccaacccccagtggaaccagaacatcaccctgcccgccatgttccccagcatgtgcgagaagatgagaatcagaatcatcgactgggacagactgacccacaacgacatcgtggccaccacctacctgagcatgagcaagatcagcgcccccggcggcgagatcgaggtggacgactacctgggcttcctgcccaccttcggcccctgctacatcaacctgtacggcagccccagagagttcaccggcttccccgacccctacaccgagctgaacaccggcaagggcgagggcgtggcctacagaggcagactgctgctgagcctggagaccaagctggtggagcacagcgagcagaaggtggaggacctgcccgccgacgacatcctgagagtggagaagtacctgagaagaagaaagtacagcctgttcgccgccttctacagcgccaccatgctgcaggacgtggacgacgccatccagttcgaggtgagcatcggcaactacggcaacaagttcgacatgacctgcctgcccctggccagcaccacccagtacagcagagccgtgttcgacggctgccactactactacctgccctggggcaacgtgaagcccgtggtggtgctgagcagctactgggaggacatcagccacagaatcgagacccagaaccagctgctgggcatcgccgacagactggaggccggcctggagcaggtgcacctggccctgaaggcccagtgcagcaccgaggacgtggacagcctggtggcccagctgaccgacgagctgatcgccggctgcagccagcccctgggcgacatccacgagacccccagcgccacccacctggaccagtacctgtaccagctgagaacccaccacctgagccagatcaccgaggccgccctggccctgaagctgggccacagcgagctgcccgccgccctggagcaggccgaggactggctgctgagactgagagccctggccgaggagccccagaacagcctgcccgacatcgtgatctggatgctgcagggcgacaagagagtggcctaccagagagtgcccgcccaccaggtgctgttcagcagaagaggcgccaactactgcggcaagaactgcggcaagctgcagaccatcttcctgaagtaccccatggagaaggtgcccggcgccagaatgcccgtgcagatcagagtgaagctgtggttcggcctgagcgtggacgagaaggagttcaaccagttcgccgagggcaagctgagcgtgttcgccgagacctacgagaacgagaccaagctggccctggtgggcaactggggcaccaccggcctgacctaccccaagttcagcgacgtgaccggcaagatcaagctgcccaaggacagcttcagacccagcgccggctggacctgggccggcgactggttcgtgtgccccgagaagaccctgctgcacgacatggacgccggccacctgagcttcgtggaggaggtgttcgagaaccagaccagactgcccggcggccagtggatctacatgagcgacaactacaccgacgtgaacggcgagaaggtgctgcccaaggacgacatcgagtgccccctgggctggaagtgggaggacgaggagtggagcaccgacctgaacagagccgtggacgagcagggctgggagtacagcatcaccatcccccccgagagaaagcccaagcactgggtgcccgccgagaagatgtactacacccacagaagaagaagatgggtgagactgagaagaagagacctgagccagatggaggccctgaagagacacagacaggccgaggccgagggcgagggctgggagtacgccagcctgttcggctggaagttccacctggagtacagaaagaccgacgccttcagaagaagaagatggagaagaagaatggagcccctggagaagaccggccccgccgccgtgttcgccctggagggcgccctgggcggcgtgatggacgacaagagcgaggacagcatgagcgtgagcaccctgagcttcggcgtgaacagacccaccatcagctgcatcttcgactacggcaacagataccacctgagatgctacatgtaccaggccagagacctggccgccatggacaaggacagcttcagcgacccctacgccatcgtgagcttcctgcaccagagccagaagaccgtggtggtgaagaacaccctgaaccccacctgggaccagaccctgatcttctacgagatcgagatcttcggcgagcccgccaccgtggccgagcagccccccagcatcgtggtggagctgtacgaccacgacacctacggcgccgacgagttcatgggcagatgcatctgccagcccagcctggagagaatgcccagactggcctggttccccctgaccagaggcagccagcccagcggcgagctgctggccagcttcgagctgatccagagagagaagcccgccatccaccacatccccggcttcgaggtgcaggagaccagcagaatcctggacgagagcgaggacaccgacctgccctacccccccccccagagagaggccaacatctacatggtgccccagaacatcaagcccgccctgcagagaaccgccatcgagatcctggcctggggcctgagaaacatgaagagctaccagctggccaacatcagcagccccagcctggtggtggagtgcggcggccagaccgtgcagagctgcgtgatcagaaacctgagaaagaaccccaacttcgacatctgcaccctgttcatggaggtgatgctgcccagagaggagctgtactgcccccccatcaccgtgaaggtgatcgacaacagacagttcggcagaagacccgtggtgggccagtgcaccatcagaagcctggagagcttcctgtgcgacccctacagcgccgagagccccagcccccagggcggccccgacgacgtgagcctgctgagccccggcgaggacgtgctgatcgacatcgacgacaaggagcccctgatccccatccagctggccgacggcctgagcagcctggcccccaccaacaccgccagcccccccagcagcccccacgaggaggagttcatcgactggtggagcaagttcttcgccagcatcggcgagagagagaagtgcggcagctacctggagaaggacttcgacaccctgaaggtgtacgacacccagctggagaacgtggaggccttcgagggcctgagcgacttctgcaacaccttcaagctgtacagaggcaagacccaggaggagaccgaggaccccagcgtgatcggcgagttcaagggcctgttcaagatctaccccctgcccgaggaccccgccatccccatgccccccagacagttccaccagctggccgcccagggcccccaggagtgcctggtgagaatctacatcgtgagagccttcggcctgcagcccaaggaccccaacggcaagtgcgacccctacatcaagatcagcatcggcaagaagagcgtgagcgaccaggacaactacatcccctgcaccctggagcccgtgttcggcaagatgttcgagctgacctgcaccctgcccctggagaaggacctgaagatcaccctgtacgactacgacctgctgagcaaggacgagaagatcggcgagaccgtggtggacctggagaacagactgctgagcaagttcggcgccagatgcggcctgccccagacctactgcgtgagcggccccaaccagtggagagaccagctgagacccagccagctgctgcacctgttctgccagcagcacagagtgaaggcccccgtgtacagaaccgacagagtgatgttccaggacaaggagtacagcatcgaggagatcgaggccggcagaatccccaacccccacctgggccccgtggaggagagactggccctgcacgtgctgcagcagcagggcctggtgcccgagcacgtggagagcagacccctgtacagccccctgcagcccgacatcgagcagggcaagctgcagatgtgggtggacctgttccccaaggccctgggcagacccggcccccccttcaacatcacccccagaagagccagaagattcttcctgagatgcatcatctggaacaccagagacgtgatcctggacgacctgagcctgaccggcgagaagatgagcgacatctacgtgaagggctggatgatcggcttcgaggagcacaagcagaagaccgacgtgcactacagaagcctgggcggcgagggcaacttcaactggagattcatcttccccttcgactacctgcccgccgagcaggtgtgcaccatcgccaagaaggacgccttctggagactggacaagaccgagagcaagatccccgccagagtggtgttccagatctgggacaacgacaagttcagcttcgacgacttcctgggcagcctgcagctggacctgaacagaatgcccaagcccgccaagaccgccaagaagtgcagcctggaccagctggacgacgccttccaccccgagtggttcgtgagcctgttcgagcagaagaccgtgaagggctggtggccctgcgtggccgaggagggcgagaagaagatcctggccggcaagctggagatgaccctggagatcgtggccgagagcgagcacgaggagagacccgccggccagggcagagacgagcccaacatgaaccccaagctggaggaccccagaagacccgacaccagcttcctgtggttcaccagcccctacaagaccatgaagttcatcctgtggagaagattcagatgggccatcatcctgttcatcatcctgttcatcctgctgctgttcctggccatcttcatctacgccttccccaactacgccgccatgaagctggtgaagcccttcagctag

SEQ ID NO: 49060 - DNA, 6360 bp, Artificial Sequence
  derived and/or modified sequence
atgctctgttgtctgctggttcgcgcatctaacctcccaagtgccaagaaggatcgccgctctgaccccgtggcatccctgacattccgcggcgttaaaaaaaggactaaagtcatcaaaaacagcgttaatccagtgtggaatgaggggtttgaatgggatttaaaggggattccactggaccaagggtctgaactacatgtcgttgtaaaagaccatgaaaccatgggtaggaaccgcttcctgggcgaagccaaggtgcccctgcgtgaagtgctggctactccgagcctatccgcgtccttcaacgcgccattgctggataccaagaagcagcccaccggagcctctctcgttctacaggtgtcctacactcctctgcctggggccgtacctctcttcccacccccaacacctcttgagccatctcccaccctacccgacctggacgtggtggctggcggaggccagagtcgcgcagagacgtggagtctgctaagcgattccacaatggacacacgctattctgggaagaaatggccggccccaacggatacggggggagaagaagacactgaggaccagggactcactggagatgaggccgaaccattcctggatcagagcgggggtccgggcgcacccactactccacgcaagttgccatcacggccgcctccccattatccggggatcaagaggaagaggtccgcacccacatcccggaagctgctttcagacaaaccacaagacttccagattagagtacaagtgatagagggtcgccagctgcctggagtgaacataaaacctgtggtgaaagtcacagctgccgggcaaacaaaacgaacacgcatccacaagggcaactcacctctgtttaatgaaacactgttcttcaatcttttcgattcacccggcgagctgtttgatgagccaattttcataacagtggtggactccagatccttgaggaccgatgctctccttggggaattcaggatggatgtgggaacgatctatagagaaccccggcatgcctacctgcgcaagtggctgctccttagcgaccccgacgatttcagcgctggtgctcgaggatacttaaaaacgtccctctgcgtgttgggccctggcgacgaagcccccttggaaaggaaggaccctagtgaggacaaggaggacattgaatctaatttgctccgcccaactggcgttgctcttcgcggcgcacatttctgcctcaaggtgtttcgggccgaggatttgccacagatggatgatgccgtgatggacaatgtcaagcagattttcgggttcgagtctaataaaaagaaccttgtcgatccatttgtggaagtctcttttgctggtaaaatgttgtgctccaagattttagagaagacggcaaacccccagtggaaccagaatatcaccctccccgctatgttcccttccatgtgcgagaagatgaggattagaattatagattgggaccgtctgacccataatgatattgtggcaacaacatacttaagcatgagcaagatcagcgcacctggcggagaaattgaagttgacgactacttaggctttcttccaacattcggaccatgctacataaacttatacgggtctcctcgtgagttcacaggctttcctgacccgtatacagagctgaacaccggaaaaggagagggggttgcatatagagggcgactgttactgtctctggagacgaagcttgtggaacactcagaacaaaaagtggaagacttacccgctgacgatatcttacgcgtcgagaaataccttcgaaggcgaaaatattcactcttcgctgcgttctactctgctaccatgctgcaggacgttgatgatgctattcaatttgaggtgagtatagggaactatggcaataaattcgatatgacgtgccttccgctcgccagcaccactcagtatagccgtgccgtcttcgatggctgtcactactactacttgccctgggggaatgttaagccagtggtggtgctctctagttattgggaagacatcagccatcggatcgagacgcaaaatcagctgctcggcatcgctgacaggttagaagctggtcttgaacaggtgcacttagcccttaaggcgcagtgttcgaccgaagacgtggatagtcttgtggcccagcttacagatgaacttatcgccggctgctcgcagcccctgggagacatccacgagacgcccagcgctacccacctggatcagtacttatatcagctaagaacacaccacttaagccagatcactgaagccgccctggctcttaagctggggcatagcgagctgcctgcagcactcgagcaggcagaagattggttgttgagactgcgggccctcgctgaggaacctcagaactctttgccggatattgtgatctggatgcttcagggcgacaagagagtggcctatcagcgtgtccctgcccaccaggtgctgttttctcggcgtggggccaactactgtggcaagaattgtggaaaattacaaacgatttttttaaagtaccctatggaaaaggtgcccggagcaagaatgcctgtccagatccgcgtgaagctttggtttgggctctccgtggacgagaaagagttcaatcaattcgccgaaggaaagctcagcgtctttgcagagacttatgagaacgaaaccaagctggctttagtaggcaactggggcactacgggtctcacctaccccaagttttccgacgtcacgggtaaaatcaagctgcccaaggattcattccgtcctagtgctggctggacttgggccggggattggtttgtctgtcctgagaagactctactgcatgatatggacgcaggtcatctgagtttcgtagaggaggtgttcgagaatcagactcgtctaccgggaggtcagtggatttatatgtcagacaactatacggacgtaaacggagagaaagtgcttccaaaggacgatatagagtgcccactcggttggaagtgggaggacgaagaatggagcacggatttgaatcgcgctgtggacgagcaggggtgggaatattctattaccataccccccgaacggaaacctaagcactgggttcccgcagaaaagatgtattacacgcaccgccgtcgcagatgggtgcggctacgcaggagggacctatcccagatggaggccctgaaacggcacaggcaggccgaggcggagggagaagggtgggagtacgcctctcttttcggttggaagtttcaccttgagtatcggaaaaccgatgcatttagacggagaaggtggcgccgtaggatggagcccctggagaaaactgggcccgccgctgtgttcgccctggaaggagccttaggcggagtgatggacgataagagcgaagacagcatgtctgtatccacattaagctttggtgttaacagacccacaatttcatgcatttttgactacggaaaccggtatcatctgcgctgctacatgtatcaggcacgcgacctggccgcaatggacaaagattctttctctgacccatatgccatcgtatcctttctgcaccaatcacaaaagacggtcgtggtgaaaaacaccctcaaccccacttgggaccagacacttattttttacgaaatcgaaattttcggggaaccggcaacagtggctgagcagcctccttcaatagtagtggagctatacgatcatgacacatatggggcagacgaatttatgggccggtgcatttgccagccttctctggaacggatgccgagattggcttggtttcccttgaccaggggctcccagccttcaggagaactgcttgcctcattcgagttgatacagagggaaaaaccagccattcaccacattccaggtttcgaggtacaggaaacctcgcgaatccttgacgagagcgaagacaccgacctgccctacccccccccacagagggaggccaatatctacatggtgcctcagaacattaaacctgccttgcagaggacggcaatagagatactggcctggggcctaaggaatatgaaatcgtatcagctggctaatatctcctccccctcactggtggtagagtgcggaggtcagaccgtgcagagctgcgtcatacggaacctcaggaaaaacccaaattttgacatatgtacgctttttatggaagtaatgcttcctagggaggagctatattgtccccccattaccgtcaaagtcattgacaatcggcagtttggccgcaggccagtcgtggggcaatgcacaattagaagcctggagagctttctgtgcgatccgtactcagctgagtcaccatcaccacaggggggacctgacgacgtgtcactgctgtcacctggcgaggacgtcctgatcgatattgatgacaaagaaccactcatcccaatccagttggcggacggactgagctccctggccccgacaaataccgcttctccaccctctagccctcacgaggaagaatttatagattggtggtccaagttctttgcatctattggggagcgagaaaaatgcggctcttatctggagaaggacttcgatacgctgaaggtgtacgacacacagctggagaacgttgaggcattcgaggggctgtccgacttctgtaatacatttaagctctaccggggtaaaacacaggaagaaaccgaggatccctcggtgataggagaattcaaagggctgtttaagatctatccgcttcccgaggaccccgccatccccatgcctcctcgacagttccaccaactggccgctcagggaccacaagagtgcctagtgcggatctacatcgtccgagcgtttggtttgcagccaaaggatcctaacgggaaatgtgatccttatattaaaatcagcatcggtaaaaagtctgtatcagatcaggacaactacatcccctgcactctcgaacccgtgttcggaaaaatgttcgagctgacctgcacactccctctggaaaaagatctgaagattactctttatgactacgacttgctgagcaaagacgagaagatcggagaaacagtcgtagatcttgagaataggctactgagtaagtttggagctcgatgtggcttgccccagacatactgcgtttcaggtcccaatcagtggcgggaccagttgagacctagccagctactacacctcttttgccagcaacatcgagtgaaagcccccgtttatcgaactgacagggtgatgtttcaggacaaggagtacagtattgaggaaatcgaagcaggtaggatacccaacccacaccttggccccgtggaagagagacttgcattgcacgtgctgcaacagcagggcttggtgcccgagcacgttgaatctcggccattatacagcccattgcagcccgacatcgaacaggggaagttacaaatgtgggtcgacctgtttcccaaggcactcggtaggcccggacctccatttaatattactcctcggcgggctaggcgcttctttttgaggtgtatcatttggaatacccgggacgtcatccttgacgacctctccctcaccggcgagaaaatgtccgatatttacgttaagggttggatgatagggttcgaggagcataagcagaagactgacgttcactacaggtctctcgggggagaaggcaacttcaattggcgctttatcttcccctttgattacctaccagctgaacaagtttgtacaatcgctaaaaaggatgcattttggagacttgacaagaccgagtcaaaaataccagcccgagtggtttttcagatatgggacaacgataagttttcatttgatgacttcctggggtctctccagcttgatctaaacagaatgcccaagccagccaagaccgccaaaaaatgtagcttagaccagctggatgacgcctttcatcccgagtggttcgtctctctgtttgaacagaagacagttaagggctggtggccatgtgtggctgaagagggggagaagaagatacttgccggcaaactggagatgacgcttgagatagttgcagagtccgagcatgaagaacgtcccgccggtcaaggcagggatgagccgaacatgaatccgaagctggaggaccccaggcggcccgacaccagctttctgtggttcacatctccttataaaactatgaagtttatcttgtggcgccggtttaggtgggccatcatcttgttcattattcttttcattctgctgctgtttctggcaatctttatatacgcgtttccgaattatgccgctatgaagttagttaaaccatttagttag

SEQ ID NO: 49061 - DNA, 6360 bp, Artificial Sequence
  derived and/or modified sequence
atgctgtgctgcctgctggtgcgggccagcaacctgcccagcgccaagaaggacagaagaagtgaccctgtggccagcctgaccttccggggcgtgaagaagaggaccaaggtgatcaagaacagcgtgaaccctgtgtggaatgaaggatttgagtgggacctgaagggcatccccctggaccagggcagcgagctgcacgtggtggtgaaggaccacgagaccatgggcaggaaccgcttcctgggggaggccaaggtgcccctgcgggaggtgctggccacccccagcctgagcgccagcttcaatgcccccctgctggacaccaagaagcagcccaccggggccagcctggtgctgcaggtgtcctacacccccctgcccggggctgtgcccctcttccccccacccacccccctggagcccagccccaccctgcctgacctggatgtggtggccggcggcggccagagcagagctgagacctggagcctgctgagtgacagcaccatggacacccgctacagcggcaagaagtggccagcccccacagacaccggcggggaggaggacacagaggaccagggcctgactggagatgaggccgagcccttcctggaccagagcggcggccctggggcccccaccacccccaggaagctgcccagccggcccccaccccactacccaggcatcaagaggaagaggtctgcccccaccagcaggaagctgctgagtgacaagccccaggacttccagatccgggtgcaggtgattgagggccggcagctgcccggggtgaacatcaagcctgtggtgaaggtgacagctgctggccagaccaagaggacccgcatccacaagggcaacagccccctcttcaatgagaccctcttcttcaacctgtttgacagccctggagagctgtttgatgagcccatcttcatcaccgtggtggacagccgcagcctgaggacagatgccctgctgggggagttcaggatggatgtgggcaccatctaccgggagcccaggcatgcctacctgaggaagtggctgctgctgagtgaccctgatgacttctctgctggggcccggggctacctgaagaccagcctgtgtgtgctgggccctggagatgaggcccccctggagaggaaggaccccagcgaggacaaggaggacatcgagagcaacctgctgcggcccaccggggtggccctgcggggggcccacttctgcctgaaggtgttccgggcagaggacctgccccagatggatgatgctgtgatggacaacgtgaagcagatcttcggctttgagagcaacaagaagaacctggtggacccctttgtggaggtgtcctttgctgggaagatgctgtgcagcaagatcctggagaagacagccaacccccagtggaaccagaacatcaccctgcctgccatgttccccagcatgtgtgagaagatgaggatccgcatcatcgactgggaccggctgacccacaatgacatcgtggccaccacctacctgtccatgagcaagatcagcgcccctggaggagaaattgaggtggatgactacctgggcttcctgcccaccttcggcccctgctacatcaacctgtatggcagcccccgggagttcaccggcttcccagacccctacacagagctgaacacaggcaagggggagggcgtggcctaccggggccgcctgctgctgagcctggagaccaagctggtggagcacagcgagcagaaggtggaggacctgcctgcagatgacatcctgcgggtggagaagtacctgcggcggaggaagtacagcctgtttgctgccttctacagcgccaccatgctgcaggatgtggatgatgccatccagtttgaggtgtccatcggcaactacggcaacaagtttgacatgacctgcctgcccctggccagcaccacccagtacagcagagctgtgtttgatggctgccactactactacctgccctggggcaatgtgaagcctgtggtggtgctgagcagctactgggaggacatcagccaccgcatcgagacccagaaccagctgctgggcattgctgaccggctggaggccggcctggagcaggtgcacctggccctgaaggcccagtgcagcacagaagatgtggacagcctggtggcccagctgacagatgagctgattgctggctgcagccagcccctgggggacatccacgagacccccagcgccacccacctggaccagtacctgtaccagctgcggacccaccacctgagccagatcacagaggccgccctggccctgaagctgggccacagcgagctgcctgctgccctggagcaggccgaggactggctgctgcggctgcgggccctggccgaggagccccagaacagcctgcctgacatcgtcatctggatgctgcagggcgacaagagggtggcctaccagagggtgcctgcccaccaggtgctcttcagccggcggggggccaactactgtgggaagaactgtgggaagctgcagaccatcttcctgaagtaccccatggagaaggtgcctggggccaggatgcctgtgcagatccgggtgaagctgtggtttggcctgtctgtggatgagaaggagttcaaccagtttgctgagggcaagctgtctgtgtttgctgagacctatgaaaatgagaccaagctggccctggtgggcaactggggcaccaccggcctgacctaccccaagttcagtgatgtgacaggcaagatcaagctgcccaaggacagcttccggcccagcgctggctggacctgggccggggactggtttgtgtgcccagagaagaccctgctgcatgacatggatgctggccacctgagctttgtggaggaggtgtttgagaaccagacccggctgcccggcggccagtggatctacatgtctgacaactacacagatgtgaatggagagaaggtgctgcccaaggatgacattgaatgtcccctgggctggaagtgggaggatgaggagtggagcacagacctgaacagagctgtggatgagcagggctgggagtacagcatcaccatccccccagagaggaagcccaagcactgggtgcctgctgagaagatgtactacacccacagaagaagacgctgggtgcggctgcggcggcgggacctgagccagatggaggccctgaagaggcaccggcaggccgaggccgagggggagggctgggagtatgccagcctgtttggctggaagttccacctggagtacaggaagacagatgccttcagaagaagacgctggaggaggaggatggagcccctggagaagacaggccctgctgctgtgtttgccctggagggcgccctgggcggcgtgatggatgacaagtcagaagattccatgtctgtgtccaccctgagctttggagtgaaccggcccaccatcagctgcatctttgattatggcaaccgctaccacctgcgctgctacatgtaccaggcccgggacctggccgccatggacaaggacagcttcagtgacccctatgccatcgtgtccttcctgcaccagagccagaagacagtggtggtgaagaacaccctgaaccccacctgggaccagaccctcatcttctatgaaattgagatctttggagagcccgccaccgtggccgagcagcccccatccatcgtggtggagctgtatgaccatgacacctacggggctgatgagttcatgggccgctgcatctgccagcccagcctggagaggatgccccggctggcctggttccccctgacccggggcagccagcccagcggggagctgctggccagctttgagctgatccagcgggagaagccagccatccaccacatccctggctttgaggtgcaggagaccagccgcatcctggatgaaagtgaggacacagacctgccctaccccccaccccagcgggaggccaacatctacatggtgccccagaacatcaagccagccctgcagaggacagccatcgagatcctggcctggggcctgaggaacatgaagagctaccagctggccaacatcagcagccccagcctggtggtggagtgtggcggccagacagtgcagagctgtgtgatccggaacctgaggaagaaccccaactttgacatctgcaccctcttcatggaggtgatgctgccccgggaggagctgtactgcccccccatcaccgtgaaggtgattgacaaccggcagtttggaagaagacctgtggtgggccagtgcaccatccgcagcctggagagcttcctgtgtgacccctacagcgctgagagccccagcccccagggcggcccagatgatgtgtccctgctgagccctggagaagatgtgctgattgatattgatgacaaggagcccctcatccccatccagctggctgatggcctgagcagcctggcccccaccaacacagccagcccccccagcagcccccatgaggaggagttcatcgactggtggagcaagttctttgccagcatcggggagcgggagaagtgtggcagctacctggagaaggactttgacaccctgaaggtgtatgacacccagctggagaatgtggaggcctttgagggcctgagtgacttctgcaacaccttcaagctgtaccggggcaagacccaggaggagacagaggaccccagcgtgattggagagttcaagggcctcttcaagatctaccccctgcctgaagatcctgccatccccatgccaccccggcagttccaccagctggccgcccagggcccccaggagtgcctggtgcgcatctacatcgtgcgggccttcggcctgcagcccaaggaccccaatggaaaatgtgacccctacatcaagatcagcatcggcaagaagtctgtgtctgaccaggacaactacatcccctgcaccctggagcctgtgtttgggaagatgtttgagctgacctgcaccctgcccctggagaaggacctgaagatcaccctgtatgactatgacctgctgagcaaggatgagaagatcggggagaccgtggtggacctggagaaccggctgctgagcaagtttggagcccgctgtggcctgccccagacctactgtgtgtctggccccaaccagtggagggaccagctgcggcccagccagctgctgcacctgttctgccagcagcaccgggtgaaggcccctgtgtacagaacagacagagtgatgttccaggacaaggagtacagcattgaggagattgaggccggccgcatccccaacccccacctgggccctgtggaggagcggctggccctgcacgtgctgcagcagcagggcctggtgcctgagcacgtggagagccggcccctgtacagccccctgcagcctgacatcgagcagggcaagctgcagatgtgggtggacctcttccccaaggccctgggccggcccggcccccccttcaacatcaccccaagaagagcccggcgcttcttcctgcgctgcatcatctggaacaccagagatgtgatcctggatgacctgagcctgaccggggagaagatgtctgacatctacgtgaagggctggatgattggatttgaggagcacaagcagaagacagatgtgcactaccgcagcctgggcggggagggcaacttcaactggaggttcatcttcccctttgactacctgcctgctgagcaggtgtgcaccatcgccaagaaggatgccttctggaggctggacaagacagagagcaagatcccagcccgggtggtgttccagatctgggacaatgacaagttctcctttgatgacttcctgggcagcctgcagctggacctgaacaggatgcccaagccagccaagacagccaagaagtgcagcctggaccagctggatgatgccttccaccctgagtggtttgtgtccctgtttgagcagaagacagtgaagggctggtggccctgtgtggccgaggagggggagaagaagatcctggccggcaagctggagatgaccctggagatcgtggccgagagcgagcacgaggagaggcctgctggccagggcagagatgagcccaacatgaaccccaagctggaggacccccggcggccagacaccagcttcctgtggttcaccagcccctacaagaccatgaagttcatcctgtggaggcgcttccgctgggccatcatcctcttcatcatcctcttcatcctgctgctcttcctggccatcttcatctatgccttccccaactatgctgccatgaagctggtgaagcccttctcctag

SEQ ID NO: 49062 - DNA, 6657 bp, Artificial Sequence
  derived and/or modified sequence
tctccgcggaggagcagcgaaggcgacagctctcttggcgcggctgcctgggagccgggcgcttgctgggtgggtgctcgggcccggtgctcccgctcccgccctgactgcgcgcctgtgtgccgccggggctgcccagccatgctgtgctgcctgctggtgagggccagcaacctccccagtgcgaagaaggaccggcgcagcgaccctgtcgcaagcctgactttccgaggggtgaagaagagaaccaaagtcatcaagaacagcgtgaaccctgtatggaatgagggatttgaatgggacctcaagggcatccccctggaccagggctctgagcttcatgtggtggtcaaagaccatgagacgatggggaggaacaggttcctgggggaagccaaggtcccactccgagaggtcctcgccacccctagtctgtccgccagcttcaatgcccccctgctggacaccaagaagcagcccacaggggcctcgctggtcctgcaggtgtcctacacaccgctgcctggagctgtgcccctgttcccgccccctactcctctggagccctccccgactctgcctgacctggatgtagtggcaggcgggggacagagccgggccgagacttggtccctgctcagtgacagcaccatggacacgagatactctggaaagaagtggccggcccccacggacacaggaggagaggaagacacagaggaccagggactcactggagatgaggcggagccattcctggatcaaagcggaggcccgggggctcccaccaccccaaggaaactaccttcacgtcctccgccccactaccccgggatcaaaagaaagcgaagtgcgcctacatctagaaagctgctgtcagacaaaccgcaggatttccagatcagggtccaggtgatcgaggggcgccagctgccgggggtgaacatcaagcctgtggtcaaggttaccgctgcagggcagaccaagcggacgcggatccacaagggaaacagcccactcttcaatgagactcttttcttcaacttgtttgactctcctggggagctgtttgatgagcccatctttatcacggtggtagactctcgttctctcaggacagatgctctcctcggggagttccggatggacgtgggcaccatttacagagagccccggcacgcctatctcaggaagtggctgctgctctcagaccctgatgacttctctgctggggccagaggctacctgaaaacaagcctttgtgtgctggggcctggggacgaagcgcctctggagagaaaagacccctctgaagacaaggaggacattgaaagcaacctgctccggcccacaggcgtagccctgcgaggagcccacttctgcctgaaggtcttccgggccgaggacttgccgcagatggacgatgccgtgatggacaacgtgaaacagatctttggcttcgagagtaacaagaagaacttggtggacccctttgtggaggtcagctttgcggggaaaatgctgtgcagcaagatcttggagaagacggccaaccctcagtggaaccagaacatcacactgcctgccatgtttccctccatgtgcgaaaaaatgaggattcgtatcatagactgggaccgcctgactcacaatgacatcgtggctaccacctacctgagtatgtcgaaaatctctgcccctggaggagaaatagaagtggatgactacctgggcttcctccccacttttgggccctgctacatcaacctctatggcagtcccagagagttcacaggcttcccagacccctacacagagctcaacacaggcaagggggaaggtgtggcttatcgtggccggcttctgctctccctggagaccaagctggtggagcacagtgaacagaaggtggaggaccttcctgcggatgacatcctccgggtggagaagtaccttaggaggcgcaagtactccctgtttgcggccttctactcagccaccatgctgcaggatgtggatgatgccatccagtttgaggtcagcatcgggaactacgggaacaagttcgacatgacctgcctgccgctggcctccaccactcagtacagccgtgcagtctttgacgggtgccactactactacctaccctggggtaacgtgaaacctgtggtggtgctgtcatcctactgggaggacatcagccatagaatcgagactcagaaccagctgcttgggattgctgaccggctggaagctggcctggagcaggtccacctggccctgaaggcgcagtgctccacggaggacgtggactcgctggtggctcagctgacggatgagctcatcgcaggctgcagccagcctctgggtgacatccatgagacaccctctgccacccacctggaccagtacctgtaccagctgcgcacccatcacctgagccaaatcactgaggctgccctggccctgaagctcggccacagtgagctccctgcagctctggagcaggcggaggactggctcctgcgtctgcgtgccctggcagaggagccccagaacagcctgccggacatcgtcatctggatgctgcagggagacaagcgtgtggcataccagcgggtgcccgcccaccaagtcctcttctcccggcggggtgccaactactgtggcaagaattgtgggaagctacagacaatctttctgaaatatccgatggagaaggtgcctggcgcccggatgccagtgcagatacgggtcaagctgtggtttgggctctcagtggatgagaaggagttcaaccagtttgctgaggggaagctgtctgtctttgctgaaacctatgagaacgagactaagttggcccttgttgggaactggggcacaacgggcctcacctaccccaagttttctgacgtcacgggcaagatcaagctacccaaggacagcttccgcccctcggccggctggacctgggctggagattggttcgtgtgtccggagaagactctgctccatgacatggacgccggtcacctgagcttcgtggaagaggtgtttgagaaccagacccggcttcccggaggccagtggatctacatgagtgacaactacaccgatgtgaacggggagaaggtgcttcccaaggatgacattgagtgcccactgggctggaagtgggaagatgaggaatggtccacagacctcaaccgggctgtcgatgagcaaggctgggagtatagcatcaccatccccccggagcggaagccgaagcactgggtccctgctgagaagatgtactacacacaccgacggcggcgctgggtgcgcctgcgcaggagggatctcagccaaatggaagcactgaaaaggcacaggcaggcggaggcggagggcgagggctgggagtacgcctctctttttggctggaagttccacctcgagtaccgcaagacagatgccttccgccgccgccgctggcgccgtcgcatggagccactggagaagacggggcctgcagctgtgtttgcccttgagggggccctgggcggcgtgatggatgacaagagtgaagattccatgtccgtctccaccttgagcttcggtgtgaacagacccacgatttcctgcatattcgactatgggaaccgctaccatctacgctgctacatgtaccaggcccgggacctggctgcgatggacaaggactctttttctgatccctatgccatcgtctccttcctgcaccagagccagaagacggtggtggtgaagaacacccttaaccccacctgggaccagacgctcatcttctacgagatcgagatctttggcgagccggccacagttgctgagcaaccgcccagcattgtggtggagctgtacgaccatgacacttatggtgcagacgagtttatgggtcgctgcatctgtcaaccgagtctggaacggatgccacggctggcctggttcccactgacgaggggcagccagccgtcgggggagctgctggcctcttttgagctcatccagagagagaagccggccatccaccatattcctggttttgaggtgcaggagacatcaaggatcctggatgagtctgaggacacagacctgccctacccaccaccccagagggaggccaacatctacatggttcctcagaacatcaagccagcgctccagcgtaccgccatcgagatcctggcatggggcctgcggaacatgaagagttaccagctggccaacatctcctcccccagcctcgtggtagagtgtgggggccagacggtgcagtcctgtgtcatcaggaacctccggaagaaccccaactttgacatctgcaccctcttcatggaagtgatgctgcccagggaggagctctactgcccccccatcaccgtcaaggtcatcgataaccgccagtttggccgccggcctgtggtgggccagtgtaccatccgctccctggagagcttcctgtgtgacccctactcggcggagagtccatccccacagggtggcccagacgatgtgagcctactcagtcctggggaagacgtgctcatcgacattgatgacaaggagcccctcatccccatccagcttgcagacggtctgtcgagcttggcccccactaacacggcttctcctccatccagtcctcatgaggaagagttcatcgattggtggagcaaattctttgcctccataggggagagggaaaagtgcggctcctacctggagaaggattttgacaccctgaaggtctatgacacacagctggagaatgtggaggcctttgagggcctgtctgacttttgtaacaccttcaagctgtaccggggcaagacgcaggaggagacagaagatccatctgtgattggtgaatttaagggcctcttcaaaatttatcccctcccagaagacccagccatccccatgcccccaagacagttccaccagctggccgcccagggaccccaggagtgcttggtccgtatctacattgtccgagcatttggcctgcagcccaaggaccccaatggaaagtgtgatccttacatcaagatctccatagggaagaaatcagtgagtgaccaggataactacatcccctgcacgctggagcccgtatttggaaagatgttcgagctgacctgcactctgcctctggagaaggacctaaagatcactctctatgactatgacctcctctccaaggacgaaaagatcggtgagacggtcgtcgacctggagaacaggctgctgtccaagtttggggctcgctgtggactcccacagacctactgtgtctctggaccgaaccagtggcgggaccagctccgcccctcccagctcctccacctcttctgccagcagcatagagtcaaggcacctgtgtaccggacagaccgtgtaatgtttcaggataaagaatattccattgaagagatagaggctggcaggatcccaaacccacacctgggcccagtggaggagcgtctggctctgcatgtgcttcagcagcagggcctggtcccggagcacgtggagtcacggcccctctacagccccctgcagccagacatcgagcaggggaagctgcagatgtgggtcgacctatttccgaaggccctggggcggcctggacctcccttcaacatcaccccacggagagccagaaggtttttcctgcgttgtattatctggaataccagagatgtgatcctggatgacctgagcctcacgggggagaagatgagcgacatttatgtgaaaggttggatgattggctttgaagaacacaagcaaaagacagacgtgcattatcgttccctgggaggtgaaggcaacttcaactggaggttcattttccccttcgactacctgccagctgagcaagtctgtaccattgccaagaaggatgccttctggaggctggacaagactgagagcaaaatcccagcacgagtggtgttccagatctgggacaatgacaagttctcctttgatgattttctgggctccctgcagctcgatctcaaccgcatgcccaagccagccaagacagccaagaagtgctccttggaccagctggatgatgctttccacccagaatggtttgtgtccctttttgagcagaaaacagtgaagggctggtggccctgtgtagcagaagagggtgagaagaaaatactggcgggcaagctggaaatgaccttggagattgtagcagagagtgagcatgaggagcggcctgctggccagggccgggatgagcccaacatgaaccctaagcttgaggacccaaggcgccccgacacctccttcctgtggtttacctccccatacaagaccatgaagttcatcctgtggcggcgtttccggtgggccatcatcctcttcatcatcctcttcatcctgctgctgttcctggccatcttcatctacgccttcccgaactatgctgccatgaagctggtgaagcccttcagctgaggactctcctgccctgtagaaggggccgtggggtcccctccagcatgggactggcctgcctcctccgcccagctcggcgagctcctccagacctcctaggcctgattgtcctgccagggtgggcagacagacagatggaccggcccacactcccag

SEQ ID NO: 49063 - DNA, 6360 bp, Artificial Sequence
  derived and/or modified sequence
atgctgtgctgcctgctggtgcgggccagcaacctgcccagcgccaaaaaggaccggcggtctgacccagttgcctcgctaacctttaggggggtgaaaaaacgaacaaaggtgataaagaattccgtgaaccccgtgtggaacgagggatttgagtgggatctgaaaggaatacctttggaccaaggttcggaactacacgttgtagtgaaggatcacgaaactatgggaaggaacagatttttgggcgaagctaaagttcctctgagggaggttctggccactccatcattgtccgcttccttcaacgcgccccttttggatacaaagaagcaacccaccggcgcgtctctagttcttcaggtctcttatacaccactacctggcgccgtcccactcttcccaccccctacaccactcgaacctagccctactctgccggatctcgacgttgtcgccggtggtggacaaagtagagccgagacatggtcgcttctgtccgactcgacaatggacaccagatattctggaaagaagtggcccgccccaaccgataccggcggcgaagaagataccgaagatcaggggctgacaggcgacgaggcagagccttttctcgatcagagtggaggacccggcgctcccaccacccccagaaagctgccatctcgccctccacctcattacccgggtattaagcggaaaaggtcagcaccaacttcgcgaaagcttctgtctgacaagccacaagacttccagatccgggtccaagtgattgaaggtcgccagttaccgggagtaaatataaagccagtcgtaaaggtgacagcagccgggcaaacaaagagaacccgaatccacaaaggaaactccccactgttcaacgagactctattcttcaacctgtttgactctccaggggaattatttgatgaacccatatttatcactgtggtagactctagatcactaaggactgatgctctgctgggggaattcaggatggatgtagggaccatatatcgcgagccccggcacgcttatctacggaagtggttactgctgtctgatcctgatgacttttccgccggggcgcgcggctacctgaaaacctcactatgcgttctgggtcccggggacgaggctcctttggaaagaaaggacccgagcgaggataaagaagatattgagtcaaacctgctccgacctacaggtgttgccctacggggagcccatttctgcctgaaggtgtttcgagccgaggacttaccccagatggatgacgccgtgatggacaacgtgaagcagattttcggcttcgagagtaataagaagaaccttgtggatccatttgtagaggtctcctttgctgggaaaatgctctgctcaaagatactggagaaaaccgccaacccccaatggaatcagaatattacccttcccgcgatgtttccatccatgtgtgaaaaaatgaggattcgaattattgattgggaccggctgactcataatgatatagtggccaccacctacttgtccatgtctaagatcagcgctccaggcggggaaattgaggtcgatgattatcttggtttcctacctacttttggtccctgttatattaatctgtacgggtcgccgcgcgagtttactggatttccggatccctacactgagctaaacactggcaagggagagggggtggcctatcggggacggttgctcctgtctctcgagaccaagctcgtggaacatagcgagcagaaggtggaagacctgccagccgatgatatcctgagggtggaaaagtatttacggcgtcggaaatactcactgttcgccgccttctacagcgccacaatgctgcaggatgtagacgatgccatccagtttgaggtcagcattggcaactatgggaataagttcgacatgacttgtctgcctttagcctctactacccaatattcacgagctgttttcgatggttgccactattattatttgccttggggcaatgttaaacccgtggtcgtgctgagcagctactgggaagacataagtcatcgtatagaaacccagaatcagttactcggcattgccgaccgcctggaggccggcctagaacaagttcatcttgcgctgaaggctcagtgtagtactgaagatgttgattctctggtggcccagttaacagacgagcttattgcaggttgcagccagcctctgggggacatccacgagaccccttcagcaacccatttagaccagtacctgtaccagctgaggacacaccatctgagccagatcacagaagcagctcttgcattgaagctcggacactccgaactacctgctgccctagagcaggctgaggattggctgttgagactgcgtgccctcgctgaagagccccagaacagtctgcctgatatcgttatatggatgctgcaaggggataagagagtagcctatcagagggtgcccgctcaccaagtcctgttctctcgccggggcgccaattactgcggcaagaactgtgggaagcttcagacaattttcctcaaatatccaatggaaaaggtacctggggcacgtatgccagtgcagattcgggttaaactctggtttggtctgtccgttgatgagaaggaatttaatcagttcgctgaggggaagctgtctgtgttcgcagaaacctatgaaaacgagaccaagctcgcgctggtagggaactgggggacaacaggcctgacttatcctaaattcagtgatgtcacagggaagataaagctgcccaaagactcgttcagacccagcgctggctggacctgggctggagactggttcgtttgccctgagaagacgttgctccatgatatggatgccggacacctgagcttcgtcgaagaggtcttcgagaatcagacacgactgcctggcggccagtggatatatatgtctgacaactacacggacgtgaatggagagaaagtactgcccaaggatgatatcgaatgtccactgggatggaagtgggaagatgaagagtggtctaccgacctgaatagggcagtggatgaacaggggtgggaatacagcatcaccattccccccgagcgaaagcccaagcattgggtaccagcagagaaaatgtactacactcatcgcagaaggcgctgggtcaggttacggcgcagagatctgtcgcagatggaggccctaaaaagacacaggcaggctgaagctgaaggggaaggatgggaatacgcttccctgtttgggtggaagttccatctcgagtacaggaaaacagacgcgttcagacgccgcaggtggcggcgccggatggagccattagaaaaaactggacccgcagccgtctttgctctggagggtgcactggggggagtgatggatgacaagtccgaagactcaatgtccgtgtctacccttagcttcggagtcaatcggcccaccatctcttgcatattcgactacggcaatagatatcatctaagatgctacatgtaccaggcaagggatctggcggccatggacaaagatagtttctcagatccctacgcaatcgtcagcttcctgcaccagtctcagaaaaccgtggtagttaaaaacaccttaaaccctacttgggaccaaaccctgatattttacgaaatagagatctttggggaaccagcaaccgtggcagaacaaccaccatctattgtggtcgagctgtatgaccacgacacctacggtgccgacgagttcatgggtcgctgtatctgccagccatcactggaacgcatgcctcgactggcttggtttcctttgactcgaggaagtcaaccatcgggagaactcctggccagcttcgagctgattcaaagggagaagcctgcaattcatcatatacctgggtttgaggtacaggagactagccgcattctcgatgaatctgaagacaccgatttgccgtatccccctccccaaagagaagccaatatctacatggtgccacagaatatcaagcctgctctacaacgtactgccatcgagattttggcatggggtctgcggaacatgaaaagttaccaactagcgaatatctcctccccgtcgctcgtagtggagtgtgggggccagaccgtacagtcatgtgtcatccgcaatttaagaaagaacccaaatttcgatatctgcacgctttttatggaggttatgctgcctcgagaagagctgtattgcccccctatcaccgttaaagtgattgataatagacagttcggccggcgcccagtggtgggccagtgcactatccgttctctggagtctttcctgtgcgacccatattctgctgaaagcccctcacctcagggcggcccagacgatgtgtcactgctgtcccctggcgaagacgtgttgattgatatcgacgacaaagaaccgctgattcctatccagctcgctgatggactgagctctctcgcccccactaatacagcatccccacccagttctccccacgaggaggagtttatcgactggtggtctaagttcttcgccagcataggtgagagggagaagtgcgggtcgtacctggagaaggatttcgatacacttaaggtgtatgacactcagctcgaaaacgtggaggcattcgagggtctgtccgacttttgcaatacctttaagctatatcgggggaagactcaggaggagacagaagatccttccgtgatcggggaatttaaagggcttttcaaaatctatccactccccgaagaccctgctattcctatgccgcctaggcagtttcatcagctggccgcacaggggccccaggaatgtttggtgagaatatacattgtgcgcgcctttggcctgcagcccaaggatccaaatggaaagtgcgacccctacattaagatctctatcggaaaaaaatctgtatcggaccaggacaactacattccttgcacactggagcctgtctttggaaagatgtttgagctcacatgtactctgccacttgaaaaggacctaaagattacgctgtacgattatgacctgctctcaaaggatgagaaaattggagagacagtggtagacttggaaaatagattgctctccaagttcggggctcgatgcggactgccacagacgtattgtgttagcggtcctaatcaatggagggaccagctccgcccttcccagctgttgcacctgttttgccagcagcacagggtgaaggcgccagtgtaccgaaccgacagggtgatgttccaagataaggaatattcaatcgaggagattgaggccggccgcattcctaatccccaccttggccctgtggaagagcggcttgctcttcatgttctgcagcagcagggtctagtgccagaacacgtcgagtctcggccactttatagtcccttgcagcccgatattgagcagggtaaactccagatgtgggtggacctgttcccgaaagctctcggccggccggggccacccttcaatattactccccgcagggcaaggcgattctttctgcgatgcatcatttggaatacccgggacgtcattctcgacgacctgtccctcactggggaaaagatgagcgacatatacgtgaagggctggatgattgggtttgaggagcacaagcagaagaccgacgtgcactaccgctccttgggcggagagggtaatttcaactggagattcatttttccatttgattaccttccagcagagcaggtgtgcaccattgctaagaaagatgcattctggcgcttagataaaaccgagtctaagattccagctagagtggtgtttcagatttgggacaatgacaaattctcatttgacgatttcctgggctcactgcaactggacctcaatagaatgcctaagcctgcaaagaccgctaaaaagtgctccctggaccagctcgacgacgcattccaccccgaatggtttgtgagcctgttcgagcagaagaccgtgaaaggctggtggccatgtgtggccgaagaaggagaaaagaaaattctggccgggaaactagaaatgaccctggagatcgtcgccgagtctgagcacgaggagcgcccagccggacagggtagagacgaaccaaacatgaatccaaagcttgaggatccccgtcggccagacacgagtttcctctggtttacatcaccctataaaaccatgaaattcatcctttggcggagattcagatgggcgatcattttgttcataattctattcatactgttactgttccttgcaattttcatctacgctttccccaattatgccgctatgaaactagtgaagccctttagctag

SEQ ID NO: 49064 - DNA, 6360 bp, Artificial Sequence
  derived and/or modified sequence
atgttatgctgcctgctcgtgagggcgtccaatttgccatccgccaaaaaggatagacggagcgacccagtggcatctctgacttttagaggagtcaaaaaacggactaaggtgatcaaaaacagtgtaaaccctgtttggaatgaagggtttgagtgggatttgaaaggaattccgctggatcagggctcagagctccacgtggtggtgaaagaccatgagaccatgggtcgaaatcgcttcctgggcgaggccaaggtgcctcttagggaagtgttagctactccaagcttaagcgcttctttcaacgcgccactgctcgatacaaagaaacagcccacgggcgcatccctagttcttcaggtgagctacacacccctgccaggtgccgtgcccctcttcccccctcccacaccactggagccttcacctaccctgccagatctggacgttgtggcagggggtggtcaatcacgcgctgagacttggtctcttttatcagactcaaccatggataccagatactctggtaagaaatggcctgctcctacggataccgggggtgaagaggatactgaagatcagggactgaccggcgatgaggcggagccctttctggatcagagcggagggccaggggcaccaacgactcccagaaaactgccaagccgaccccctcctcactaccccggaatcaaaaggaagcgatctgctccaacaagccgtaaactcctatccgacaagccccaggacttccaaattcgtgtgcaggtcattgagggaagacaactgcctggggttaacatcaaacccgtggtgaaggttaccgcagctgggcagaccaagagaactcgtattcacaagggaaattcgccactgtttaacgaaaccctctttttcaacctgttcgactcccccggagagttgttcgacgagccgatcttcataacagtggtggactcccggtcccttcggaccgatgccttactgggggagtttcgcatggatgtgggcacaatctatcgtgagcctaggcacgcctacttacgcaagtggctgttgctgtccgacccagatgacttttctgctggcgcacgcggatatctgaaaacatctctctgcgtcctgggcccaggagacgaggcccctctggaacggaaggatccctctgaggataaagaagacatcgagtctaatctactgaggccgacaggagttgcgttgagaggggctcatttttgcctgaaagtgttcagagccgaagatctcccacagatggatgacgccgtgatggataatgtcaaacagattttcggcttcgagagcaataagaaaaatttagtggatccgttcgtagaggtgtcattcgccggaaagatgctgtgctccaagattctcgaaaaaacagctaatccccagtggaatcagaacataacacttcccgctatgttccccagcatgtgcgagaagatgcgaataaggataatcgactgggatcgtctgacccataatgatatcgtggcgactacatatctgtcgatgtctaagatcagcgcacccggtggggaaattgaggtggatgactacttaggattcctgcccacctttggcccatgttacatcaacctctacggttccccaagagaattcacagggttccctgatccgtatacagagttgaacaccggcaaaggcgagggcgtagcctaccggggtagactcctgttgtctctcgaaacaaagctcgtcgagcacagcgagcagaaagtagaggatctaccagcagatgacattcttcgagtggagaaatatctcaggcgaaggaaatacagtctgttcgctgccttttatagcgccaccatgctgcaggatgtggacgacgccatccaatttgaggtttcaataggtaactacgggaataagttcgatatgacatgtctccccctagcttcgaccactcagtattcccgcgcagtttttgatgggtgccattattattacctgccctggggcaatgtgaaacccgtggtggtgctcagtagttactgggaagacatatcacacagaatagagacgcagaatcaactgctagggatagctgacaggcttgaagccggacttgagcaggttcacctggcactaaaggcacagtgctctaccgaagacgtcgacagcctagtggcacagcttacggatgagctgatagccggttgttctcagccgctgggtgacatccatgaaaccccctcagccacgcatctggaccaatatctgtatcaactgagaacccatcacttaagtcaaattaccgaagccgcactggccctcaagctgggacatagtgaacttcctgccgctctggaacaggctgaggactggctgctccgcctgcgggctcttgctgaagagccacagaactccttgccagacatcgtcatttggatgctacagggagataagcgcgtggcctaccagcgcgtgccagcccaccaggtgctcttcagcaggaggggagctaattactgcggcaagaactgtggaaagctccagactatctttctgaagtatcctatggaaaaagtcccaggcgctaggatgcccgtgcaaatcagggtgaaattgtggtttgggctcagtgtggatgaaaaagagtttaatcagttcgctgagggaaaactctctgtgtttgcagagacctacgaaaatgagactaaattagccctggtggggaattggggtaccacaggccttacatatcccaagttcagtgatgtcacaggcaagatcaaattgcctaaggactcattcagaccctcagccggttggacatgggcgggagactggttcgtctgccctgagaaaaccctgctgcacgatatggatgctggacatctgagttttgtggaggaggtgttcgaaaaccagaccaggctccccggtgggcagtggatttatatgagcgacaattatacggacgttaacggcgagaaggtgctgccaaaggacgacatcgagtgcccactaggatggaagtgggaggatgaggagtggagtactgatctcaaccgggcagtcgacgagcagggatgggaatacagcatcacgatccctccagaaagaaaacctaagcactgggtgccagcagagaaaatgtactacactcatcggcgtagacggtgggtgaggttacgaagacgcgatcttagtcagatggaggcactgaaacggcacagacaggctgaggccgagggggaagggtgggaatacgcctctctctttggctggaagttccatctggagtaccggaagactgatgctttccggagaagacggtggcggaggcggatggagcctctggaaaagacaggtccagctgcggtctttgccctcgaaggggcactcggcggagtcatggacgataagtcagaggattcaatgtcagtatccaccctctcctttggtgtgaacaggcccaccatcagttgcatattcgattacggcaatagatatcacctccgttgttacatgtaccaagccagagatctggcagcaatggataaggacagtttctcagatccttacgctattgtttcattcctccatcagtcccaaaagaccgtcgtagttaagaacactctgaatcccacttgggaccagactttaattttttatgaaatcgagatatttggcgagccagcaacggtcgcggaacaaccacccagtatagtcgttgagctgtatgatcacgacacatatggcgctgacgagttcatgggaaggtgcatctgccaacccagtctcgaacgaatgcccaggctggcatggtttcctctaacgcgcggatcacagccttctggtgaactcctggcctccttcgagctgattcagcgtgaaaagccagcgattcatcacattcccggttttgaagtgcaggagaccagcagaatccttgatgaatctgaggatacagatctcccttatcccccaccccagcgcgaggccaacatttacatggtaccacaaaacataaaacccgcactccagcggaccgctatcgagatattggcgtggggcctgcggaacatgaaatcctaccagcttgccaatatctcatcacctagcttggtggtggagtgcggcggtcagacagtacagtcgtgtgtgatccgcaatctgaggaaaaacccaaattttgatatttgcacgttatttatggaggtcatgctgcctcgagaggaactgtattgccccccaatcactgtgaaagtaatcgataacagacagttcggacggagaccagtggtgggccagtgtaccattcggtcactggagagcttcctgtgcgacccatacagtgcagagtcgccgtctcctcagggcggacccgacgacgtttccctgctctcaccgggagaggatgtactgattgacatcgatgataaggagccactgattcctatacaactagccgatggcctttcatcactagcacctactaatactgccagcccccctagttcgcctcacgaagaggagttcatcgattggtggtccaagtttttcgcttctatcggtgagagagaaaaatgtgggtcctacttagaaaaggacttcgacactttgaaggtgtacgatacccaattggaaaacgtggaagcgtttgagggattgtccgacttctgtaatacatttaaactctacaggggcaagacccaagaagaaaccgaggatccttcagtgatcggtgagttcaaaggtctgttcaagatctatcctctccctgaagatccagccatccctatgcctcccagacagttccatcagctggctgcacaggggccacaggaatgtctcgtaagaatttatattgtgagagccttcggactccagcctaaggacccaaacggtaagtgtgatccatatattaaaatatcgataggtaaaaagagcgtctccgaccaggacaactacatcccatgcactctggaacccgtgttcggtaaaatgtttgaattaacctgcacactgcccttagaaaaggacctaaagatcacactgtatgattacgacctgctgtctaaagacgagaagattggagagactgttgtggatctcgaaaaccgcctcctcagcaagttcggggcaagatgcggccttcctcagacctattgcgtctcaggccctaaccaatggcgtgatcagctgaggccaagccaactcctgcatctattttgccagcagcacagggtgaaggccccagtctaccgaacagacagggtgatgtttcaggacaaagagtattccattgaggagatcgaagcagggaggattcccaacccccacctcggaccggtggaggagcgcctcgcattgcatgttctccagcagcagggattggtccccgaacatgtcgaatctcggccattatattctccactccaacctgatatcgaacaggggaaacttcaaatgtgggtcgacctgtttcctaaagctttggggcgtcctggtcctccctttaatatcacacctcgtcgggcaaggcggtttttcctgcgatgcatcatctggaatacccgtgacgtcatccttgacgacttgtccctaacaggcgagaaaatgagcgatatttacgtgaagggttggatgattggatttgaggagcataagcagaagactgacgtgcattatagatcacttgggggagagggcaattttaactggcggttcatcttcccctttgactacctccccgctgagcaggtgtgtaccattgcaaaaaaagacgcgttttggcgcctggacaaaaccgagtccaagatccccgctagggttgtcttccagatctgggataatgataagttcagcttcgacgactttctgggcagccttcagctcgacctaaaccgaatgcccaaaccagccaagaccgccaagaaatgtagccttgatcagctcgatgacgcctttcacccagagtggtttgtatctcttttcgagcaaaaaaccgtcaaggggtggtggccatgtgttgcagaagagggtgagaaaaagatcctggccggaaagctcgaaatgacacttgaaattgtcgccgaatccgagcacgaggagagacctgccggtcagggcagagatgagcctaacatgaatcctaagctagaagaccctcggagacctgatacttctttcctgtggtttacttccccctacaaaacaatgaagtttatcttgtggcggaggtttcgctgggcgattattctctttatcattctctttatcttgctcctcttcttagcgatttttatctatgctttccctaattacgcagcaatgaaattagtcaagcctttttcatag

SEQ ID NO: 49065 - DNA, 6360 bp, Artificial Sequence
  derived and/or modified sequence
atgctgtgctgcctgctggtccgagcgtctaaccttccttcggctaaaaaagaccgtcgaagcgatcccgtcgcttccttgacattccgaggggtgaagaaacgaacaaaggtcatcaagaattctgttaatcccgtctggaacgaaggcttcgaatgggacctgaagggcatcccgctggaccagggatccgagctgcacgttgtcgtgaaagaccacgagactatggggcgcaacagattcctcggcgaggcaaaagtcccactgagagaagtgttagcaacccctagcctgagcgcttccttcaatgcccccctcttggacacgaaaaagcagccaacgggtgccagcctggtgctgcaagtcagctatactcccttgcctggggctgtccctctgtttcccccacctacacctcttgaaccctctccaaccctccctgatctggacgtggtggccggcgggggtcaatcgcgggccgagacgtggtctctgttaagcgacagcacaatggatacacgctatagtggtaagaaatggccggctcccacagacaccggaggtgaggaggacactgaagatcagggcctaactggagacgaggccgagccattcctcgaccagtctggcggtcccggtgcacccaccacaccgcgcaaactgccatcaagaccgcctccccactacccaggcattaaacggaaaagaagcgctcccacctctcggaagttactgagtgacaagccgcaagatttccagatcagggtgcaagtgattgagggacgccagctgccaggggtgaacatcaaacccgtggtaaaggtcaccgccgctggacagactaagcgaacgcggatccataaaggcaattcccctctgtttaacgagactctgttcttcaacttatttgattcgccaggcgaattgtttgacgagcccatcttcattactgtggtcgacagccggtcacttaggaccgatgctctgcttggcgaatttaggatggatgtgggtaccatctatcgagagccccgacatgcctacttgagaaagtggctcctactttcggacccggatgacttctcagcaggcgctcgcggatacctgaaaacttctctgtgtgtactcggacctggtgacgaggccccactggagcgcaaggatccgtcggaagacaaagaagacatcgagagtaatctgttgcgcccaaccggagtggccctgaggggcgcccatttctgcctgaaggtgttcagggccgaagatctgcctcagatggacgacgctgtgatggacaatgtgaaacaaatcttcggcttcgaatccaataagaagaaccttgtcgacccgtttgtggaagttagctttgcaggcaaaatgttgtgtagcaagatacttgagaagactgccaatccacagtggaatcagaacatcacactgccagcgatgttcccctccatgtgtgagaagatgagaattcgtataatcgattgggatcgcctcactcacaatgatatcgttgcgactacttatttgagcatgagcaagattagcgctcccgggggtgaaatcgaggtcgacgactatctgggctttctgccaacctttggtccatgctatatcaatctatacggctctccccgcgaatttaccgggtttcctgacccttacactgaacttaacacaggcaaaggagagggcgtcgcttaccgtgggcgcctgctactgtcccttgagacaaaactcgtggagcactcagagcaaaaagtcgaggatctccctgccgatgacatccttcgcgtggaaaaataccttaggagacgcaaatactcattattcgccgctttctactcagcaactatgttgcaggatgtggacgatgcaattcagtttgaagtcagcattgggaactacgggaataagttcgatatgacctgccttccactggcatccacaactcagtattcaagggccgtgttcgacggatgtcattactactatctgccttggggaaacgtgaaacctgtcgtcgtgctttcttcatattgggaggatattagtcatcgcatagagactcagaatcagcttctgggaatcgccgaccgcctggaagcgggacttgaacaggtccacctggccctcaaagctcagtgtagtaccgaagatgttgacagccttgtggctcagttgacagatgaattgatagcggggtgtagtcaacctcttggcgacattcacgaaactcccagcgccacccaccttgatcagtatctgtaccagttgcgtacccaccacctctcacagatcaccgaagccgctcttgctcttaagctgggccatagcgagctgcccgctgccctggagcaggcggaagattggctgctgcgcctcagagctctagctgaagaaccacaaaactccctgcccgatatcgttatctggatgcttcaaggtgataagcgagtggcctaccagagggtacctgcgcaccaggtactttttagtcgacgcggggcaaattattgcggaaagaattgcgggaaacttcagaccattttcctgaagtaccccatggaaaaagtcccgggtgcccgaatgccagttcagataagagtgaagttgtggttcggccttagcgtcgacgaaaaagaattcaatcagttcgcagaagggaagctgagcgtttttgcagaaacatacgaaaacgagaccaagcttgccctggtggggaattgggggacaactggactgacatatccaaagttttctgacgttacgggcaagataaagttgccaaaggactcatttcgcccttctgctgggtggacctgggccggcgactggtttgtctgcccagaaaagacactcttgcacgatatggatgctggacacctatcttttgtggaagaggtgttcgagaaccaaacgagactgcccgggggccagtggatttacatgtccgacaattatactgatgtgaacggagagaaagtattgcccaaagacgacatcgaatgcccacttgggtggaagtgggaagacgaagaatggagcaccgacctcaacagagcagtggacgagcagggatgggagtacagtatcaccatcccacccgaacggaagcctaagcattgggttcccgctgagaaaatgtactatacgcaccgaagacgtcgctgggtacggctgaggcgtcgtgacctgtctcagatggaggcgctcaagagacaccgacaggccgaagctgagggcgaaggttgggaatacgcatcactgttcggatggaaattccatctagagtaccgcaagaccgacgcttttagacgacgccgatggcgccggaggatggaacccctagagaagacaggaccagccgccgtgttcgctttagaaggtgcactcggaggcgtgatggacgacaaatcggaggatagtatgtccgtgtccactctgtcatttggagtcaaccgccctacaatctcctgcattttcgactatgggaacagataccacttgcggtgctatatgtatcaggctcgggacttagcagcaatggacaaggacagcttctctgacccctacgctatagtatctttccttcaccagtctcagaaaaccgtggtagtaaagaacaccctgaaccctacatgggatcagactttgatcttttatgaaatcgaaatctttggtgaacccgcgaccgtcgctgagcagcccccatctatcgtggtggagctgtacgaccacgacacgtacggggctgatgagtttatggggcgctgtatttgccagccatcactggagaggatgcccagattagcctggtttccactgacaaggggctcccagccatctggtgaattattggctagctttgaactgatacagcgggaaaaaccggccattcatcacattcccggctttgaggtccaggaaacttctcggatactggacgaatccgaagacacagacctgccataccccccaccacaacgtgaggcaaatatctacatggtgccccaaaatatcaagcctgccctgcaacgaacagcgatcgagatactcgcctgggggctcagaaatatgaagtcctaccagctcgcaaacatatcgtctcccagcttggtggtcgaatgcggaggtcaaacagttcagagctgcgttatacggaaccttcgaaagaacccaaattttgatatatgcacgctattcatggaggtaatgctgccccgggaggagctctactgtcccccaatcaccgttaaagtgattgataatagacagttcggacggcgacctgttgttggacaatgtactatacgaagtctagagagctttctgtgtgacccgtattcggcagaaagcccctccccccagggaggccccgacgatgtgtccctactcagccccggcgaggacgtgctcattgacattgacgataaagagccattaatccctattcagctcgcagacgggctttctagtctggctccaactaatactgccagccctccatccagcccacatgaagaggagttcattgactggtggagcaagttctttgccagcattggagaaagagaaaaatgcgggtcttatctcgagaaggattttgataccctgaaagtgtatgacactcagctggagaatgtggaggcctttgaaggcttgtctgatttttgtaacacatttaagctgtaccggggcaagacacaggaagaaaccgaagatccatcagtaatcggagagttcaaaggcctgttcaagatctacccactgccagaggatccggctatacctatgcctccaaggcagttccaccagctggctgctcaaggaccacaggaatgcttagtgcgtatttacatcgtgcgtgccttcggactgcaacctaaggacccaaatggtaagtgtgatccatacataaaaatctctatcggtaaaaagagtgtgtctgatcaggataactatatcccttgtactctcgagccagtgtttggcaaaatgtttgagcttacgtgcactctgcccctggaaaaggacctaaagataaccctgtacgactatgatctgctgtcgaaggatgagaagattggggagacagtggtcgatttggaaaatcgcttactgagcaagtttggagctcggtgcggccttccacagacctattgcgtgtcaggccctaaccagtggcgagaccagttgcgcccgtcgcaattgctgcacttgttttgtcaacagcatcgcgtgaaagccccggtctatcgtacagatcgcgttatgttccaggataaagagtactccatagaggagatcgaagcaggtcggatacccaatccacatctcggcccagtggaggagcggctggccctgcacgtgctgcagcagcagggacttgtcccagagcatgttgagtctcgtccactttactcccctttgcagcccgacattgaacagggaaaattgcagatgtgggtcgatctattcccgaaagctctaggccgacccggtcccccgttcaacatcacaccacgacgagctcgcaggttctttctccggtgtataatatggaacactagagatgtgatcctggatgatctttctctgaccggggaaaaaatgagtgacatctatgtaaagggctggatgatcggcttcgaagaacacaagcagaaaaccgacgttcactacagatctttaggtggtgaagggaattttaattggaggtttattttcccattcgactacctgcccgccgaacaagtctgtacaattgctaagaaggacgcattctggagactcgacaagactgaaagcaaaattccagcaagagtggtgtttcaaatttgggataatgataagttcagtttcgacgattttctcggctccttgcaactggacctaaacagaatgcccaaacccgctaagaccgcaaaaaagtgctccctggatcagctcgacgacgcatttcacccagaatggttcgtgtcacttttcgagcagaaaaccgtcaagggctggtggccctgtgtggccgaagaaggcgagaagaagattctcgctgggaaattagagatgacgctagagatcgtcgctgagtccgagcatgaagagcgacctgccggacagggcagagacgagcccaatatgaacccaaaattagaagacccccggcggcctgacacatcattcctctggtttacctcaccttacaaaacaatgaaatttattttatggaggcgctttaggtgggccattatcctcttcatcatacttttcattctgctgctgtttctggcaatattcatttacgcctttcctaactacgccgctatgaagctcgtgaaacccttctcttag

SEQ ID NO: 49066 - DNA, 6360 bp, Artificial Sequence
  derived and/or modified sequence
atgttatgctgcttactagtacgcgcttctaacctccctagtgccaagaaggataggcggtcggatcccgtggcttcgctgacatttagaggtgttaaaaaacggactaaggtgataaagaattcggtgaaccctgtgtggaacgaaggctttgaatgggacctaaagggaatccccctggatcagggaagcgaactgcatgttgtggtgaaagatcacgagacaatgggcaggaatcgattcctgggcgaagcgaaagttccgctgcgagaagttttagccacaccttcattgtccgcgagcttcaacgccccgctccttgacacaaagaaacagcccacaggtgcctcgctcgtgcttcaagtgtcttacacaccattaccgggggcagtgcccctgtttccacctccaacacccttagaaccttctccaacattgcccgatctcgacgtcgtcgctggaggcggacagagccgagcagaaacgtggtccctactctcagattcgaccatggacaccagatacagcggaaagaaatggcctgccccaacagacactggcggcgaagaagataccgaagatcagggtcttaccggcgatgaggccgaaccatttttggatcagtcaggcggaccaggcgctcccacaactcctcgtaaattgccgtccaggccccccccccactatcccggaattaagcgaaaaagatccgcaccaacaagccgaaaactgttatccgacaagcctcaggattttcagatacgggttcaggtcatcgaaggtcggcagctaccgggcgtgaatatcaaaccggtcgtcaaggtgactgccgctgggcagaccaagcgcacaagaattcacaaaggaaactctccattatttaatgagacgctgttttttaatctctttgatagtccaggagaactgttcgacgagcccatctttattacagttgtcgattcgagaagcctacgcaccgacgccctattaggcgagtttagaatggatgtgggaactatctatagagagcctaggcacgcttatctcagaaagtggctactgctatcagaccctgatgacttcagcgccggagcccgtgggtacctaaaaactagtctctgtgtgctaggtcctggcgacgaggcccctttggaacgcaaggatccaagcgaggataaggaagacatcgaaagtaatctgctgagaccaaccggagtggcgttgagaggtgcccatttttgtctgaaagtgttcagagcagaggatctgccccagatggatgatgccgtgatggataacgttaaacaaattttcggctttgagtctaataaaaaaaatctggtcgatcctttcgtcgaagtttcgttcgccggaaagatgttatgttccaaaattctcgaaaagaccgctaaccctcaatggaaccaaaatattacattaccagccatgtttcccagtatgtgcgaaaagatgcggatccgcataattgattgggaccgcctcactcacaatgatatcgttgcgactacttatttgagcatgagcaagattagcgctcccgggggtgaaatcgaggtcgacgactatctgggctttctgccaacctttggtccatgctatatcaatctatacggctctccccgcgaatttaccgggtttcctgacccttacactgaacttaacacaggcaaaggagagggcgtcgcttaccgtgggcgcctgctactgtcccttgagacaaaactcgtggagcactcagagcaaaaagtcgaggatctccctgccgatgacatccttcgcgtggaaaaataccttaggagacgcaaatactcattattcgccgctttctactcagcaactatgttgcaggatgtggacgatgcaattcagtttgaagtcagcattgggaactacgggaataagttcgatatgacctgccttccactggcatccacaactcagtattcaagggccgtgttcgacggatgtcattactactatctgccttggggaaacgtgaaacctgtcgtcgtgctttcttcatattgggaggatattagtcatcgcatagagactcagaatcagcttctgggaatcgccgaccgactggaggccggactggagcaggtgcatcttgcccttaaagcccagtgctctaccgaagacgtagattctctcgtggctcagttaacggacgagcttatcgccggatgctctcagcccttgggcgacattcatgaaacaccatccgctacgcatttagatcagtacctctaccagttacgcacacaccatctgtcccagatcaccgaggcagcattagccctcaagttaggtcactccgaattgccggctgcgctcgagcaggctgaagactggttacttaggttgcgagctctagccgaagagcctcagaacagtttgcccgatatcgttatctggatgctgcaaggagataaaagggtagcgtaccaacgagtaccagcgcaccaagtcctgttctctcggaggggcgcgaactactgcgggaagaattgtggaaagctgcagaccatcttcttaaagtatcccatggagaaagtgccaggcgccaggatgcccgttcaaatcagagtgaagctgtggtttggtttaagcgtcgatgagaaagagtttaatcagttcgccgaaggaaagttatccgtgtttgctgaaacctatgaaaatgagacaaagcttgcacttgtcgggaattggggaactacaggattgacttaccccaagtttagcgacgttactggcaaaatcaaactacccaaagactcctttaggccatccgctggatggacgtgggccggcgactggtttgtgtgcccagaaaagacactcctgcatgacatggatgcaggccacttgagtttcgtcgaagaggtatttgagaatcagacaagactgcctggaggccaatggatttatatgagtgacaactacaccgatgtcaatggcgagaaggttctacccaaagatgatatcgagtgtccccttggctggaaatgggaggatgaggagtggtcgactgacctcaaccgggccgttgatgagcaagggtgggagtacagtatcacgattccccccgagaggaaaccaaagcactgggtccccgctgagaaaatgtactacacacacaggaggagacggtgggtcaggctacggagaagagacctttcccaaatggaagccctaaagagacacagacaggcagaggctgaaggcgaaggttgggagtatgcatctctgttcggatggaaatttcacctcgagtaccgcaagacagacgcctttcggagacgtcgttggagacgaagaatggaacccctggagaagacgggccctgcagcagtgttcgccttagaaggcgccctgggtggcgtcatggatgacaagtctgaggattctatgtccgtatccactctgtcattcggtgttaaccggcccactatatcttgtattttcgattatggcaatagataccatcttagatgttacatgtaccaggcccgggacttggctgccatggataaagattcattctctgacccatacgctatcgtgagtttcctgcaccaaagccagaagacagtcgttgtgaaaaatactctaaatcctacctgggaccaaacactgatcttttacgaaattgagatttttggagagcctgcaactgtggccgaacaaccaccgagtatcgttgtagaactgtatgaccacgacacttacggggcagacgagttcatgggccgctgcatttgtcaaccctccctggagcgtatgcctcgactggcctggtttccgctgacacggggttctcagccctctggagagttacttgcttcgtttgagctgattcaacgcgaaaaacccgcaatccatcatatccctggatttgaagtgcaggaaaccagccgcatactagacgaaagtgaagatacagatctcccatatcctcctccccagcgcgaagccaatatatacatggttcctcagaacatcaaacctgcattgcagcggaccgcaattgagattctagcttgggggctgcgaaatatgaagtcctatcagcttgctaatatcagtagcccttccctcgtcgtcgagtgcggaggacagaccgtgcaatcttgtgtgatcagaaacctgagaaagaaccccaattttgacatatgtacactattcatggaagtaatgctgcctagagaagagctctattgccctccaattaccgtgaaggttatcgacaaccgtcagtttggacgtaggccagttgtcggtcagtgcactattaggtctctcgaaagtttcctgtgtgacccgtactctgccgagagtccctccccacaaggcggccctgatgatgtttccttgcttagccccggagaagacgtcctgatcgatattgacgacaaagagcctctgatccccattcagctggctgatggcctgtctagcttagccccgacgaacacagcctcaccacccagctccccccacgaggaggaattcatcgactggtggtccaaattctttgcatcaatcggagagagagagaagtgtggatcgtacctggagaaggactttgatacattgaaggtttatgatacacaactggagaatgtagaagcatttgagggtctaagcgatttctgtaacacctttaagctgtacaggggaaagactcaggaagagaccgaggacccatctgtgataggcgagtttaaaggcttgttcaaaatctatcccttgcctgaagatcccgccatcccgatgcctccccggcagttccaccaactggccgctcaaggacctcaggaatgtctggtgcgaatctacatcgtaagagccttcggtctgcaacctaaagacccaaatggaaagtgtgatccgtatataaaaataagtatcggtaagaaatccgtgagtgatcaggacaactacataccctgtacattggagcctgttttcggaaaaatgtttgaactgacttgcacattaccattagagaaagacctgaaaatcacgctttacgactatgacctgctatctaaagacgagaaaatcggcgaaaccgtcgtggacttggaaaatagactccttagcaaattcggtgcccgctgcggattacctcagacgtattgtgtttcaggcccaaatcaatggagagatcagcttcgcccttctcaactgctccaccttttttgtcagcagcaccgcgtgaaggctccagtctacaggaccgatagagtgatgtttcaggacaaggaatattctatagaagagatcgaggccggtagaatacccaatccacacttgggtccagtcgaagagagactagctctgcacgtgctccagcagcagggacttgtgcctgagcacgtcgaatccaggcctctgtactcacctttacagcctgacattgaacagggaaaattacagatgtgggtcgatctgttccccaaagccttgggccgacctggacctcctttcaatatcaccccaagacgagctaggcgattttttctgcggtgcataatctggaacacacgcgatgtgatactggacgatctgagcctcactggcgaaaagatgagtgatatatatgtaaaaggatggatgatcggtttcgaggaacacaagcaaaagactgatgtccattaccgctccctgggcggcgagggcaatttcaactggcgcttcatcttcccttttgactacctacccgcagaacaggtgtgtactattgcaaaaaaggacgccttctggagattagacaagacagaaagtaaaatccccgctagagtggtattccagatctgggacaacgataaattctccttcgacgactttttgggatccctgcaactcgaccttaatcggatgcctaaacccgccaagactgctaagaagtgtagcctggaccagctggacgacgcatttcatcccgagtggttcgtgtccttatttgagcagaaaacagtgaagggttggtggccttgtgtcgcggaggagggcgagaagaaaatcctggcaggaaaattggagatgacacttgaaatagttgcagaatccgaacatgaggagcgaccggccggacagggcagagatgagcctaacatgaaccctaaactcgaggaccccagacgaccagatacctcattcctttggttcacatccccatacaaaaccatgaaattcatcctttggcgacgttttcgatgggcgattatcctcttcatcattctgttcattttactgctattcttggcaatctttatatatgcttttccaaactacgccgcaatgaaattagttaaacctttctcctag

SEQ ID NO: 49067 - RNA, 6360 nt, Artificial Sequence
  derived and/or modified sequence
augcugugcugccugcugguccgagcgucuaaccuuccuucggcuaaaaaagaccgucgaagcgaucccgucgcuuccuugacauuccgaggggugaagaaacgaacaaaggucaucaagaauucuguuaaucccgucuggaacgaaggcuucgaaugggaccugaagggcaucccgcuggaccagggauccgagcugcacguugucgugaaagaccacgagacuauggggcgcaacagauuccucggcgaggcaaaagucccacugagagaaguguuagcaaccccuagccugagcgcuuccuucaaugccccccucuuggacacgaaaaagcagccaacgggugccagccuggugcugcaagucagcuauacucccuugccuggggcugucccucuguuucccccaccuacaccucuugaacccucuccaacccucccugaucuggacgugguggccggcgggggucaaucgcgggccgagacguggucucuguuaagcgacagcacaauggauacacgcuauagugguaagaaauggccggcucccacagacaccggaggugaggaggacacugaagaucagggccuaacuggagacgaggccgagccauuccucgaccagucuggcggucccggugcacccaccacaccgcgcaaacugccaucaagaccgccuccccacuacccaggcauuaaacggaaaagaagcgcucccaccucucggaaguuacugagugacaagccgcaagauuuccagaucagggugcaagugauugagggacgccagcugccaggggugaacaucaaacccgugguaaaggucaccgccgcuggacagacuaagcgaacgcggauccauaaaggcaauuccccucuguuuaacgagacucuguucuucaacuuauuugauucgccaggcgaauuguuugacgagcccaucuucauuacuguggucgacagccggucacuuaggaccgaugcucugcuuggcgaauuuaggauggauguggguaccaucuaucgagagccccgacaugccuacuugagaaaguggcuccuacuuucggacccggaugacuucucagcaggcgcucgcggauaccugaaaacuucucuguguguacucggaccuggugacgaggccccacuggagcgcaaggauccgucggaagacaaagaagacaucgagaguaaucuguugcgcccaaccggaguggcccugaggggcgcccauuucugccugaagguguucagggccgaagaucugccucagauggacgacgcugugauggacaaugugaaacaaaucuucggcuucgaauccaauaagaagaaccuugucgacccguuuguggaaguuagcuuugcaggcaaaauguuguguagcaagauacuugagaagacugccaauccacaguggaaucagaacaucacacugccagcgauguuccccuccaugugugagaagaugagaauucguauaaucgauugggaucgccucacucacaaugauaucguugcgacuacuuauuugagcaugagcaagauuagcgcucccgggggugaaaucgaggucgacgacuaucugggcuuucugccaaccuuugguccaugcuauaucaaucuauacggcucuccccgcgaauuuaccggguuuccugacccuuacacugaacuuaacacaggcaaaggagagggcgucgcuuaccgugggcgccugcuacugucccuugagacaaaacucguggagcacucagagcaaaaagucgaggaucucccugccgaugacauccuucgcguggaaaaauaccuuaggagacgcaaauacucauuauucgccgcuuucuacucagcaacuauguugcaggauguggacgaugcaauucaguuugaagucagcauugggaacuacgggaauaaguucgauaugaccugccuuccacuggcauccacaacucaguauucaagggccguguucgacggaugucauuacuacuaucugccuuggggaaacgugaaaccugucgucgugcuuucuucauauugggaggauauuagucaucgcauagagacucagaaucagcuucugggaaucgccgaccgccuggaagcgggacuugaacagguccaccuggcccucaaagcucaguguaguaccgaagauguugacagccuuguggcucaguugacagaugaauugauagcgggguguagucaaccucuuggcgacauucacgaaacucccagcgccacccaccuugaucaguaucuguaccaguugcguacccaccaccucucacagaucaccgaagccgcucuugcucuuaagcugggccauagcgagcugcccgcugcccuggagcaggcggaagauuggcugcugcgccucagagcucuagcugaagaaccacaaaacucccugcccgauaucguuaucuggaugcuucaaggugauaagcgaguggccuaccagaggguaccugcgcaccagguacuuuuuagucgacgcggggcaaauuauugcggaaagaauugcgggaaacuucagaccauuuuccugaaguaccccauggaaaaagucccgggugcccgaaugccaguucagauaagagugaaguugugguucggccuuagcgucgacgaaaaagaauucaaucaguucgcagaagggaagcugagcguuuuugcagaaacauacgaaaacgagaccaagcuugcccugguggggaauugggggacaacuggacugacauauccaaaguuuucugacguuacgggcaagauaaaguugccaaaggacucauuucgcccuucugcuggguggaccugggccggcgacugguuugucugcccagaaaagacacucuugcacgauauggaugcuggacaccuaucuuuuguggaagagguguucgagaaccaaacgagacugcccgggggccaguggauuuacauguccgacaauuauacugaugugaacggagagaaaguauugcccaaagacgacaucgaaugcccacuuggguggaagugggaagacgaagaauggagcaccgaccucaacagagcaguggacgagcagggaugggaguacaguaucaccaucccacccgaacggaagccuaagcauuggguucccgcugagaaaauguacuauacgcaccgaagacgucgcuggguacggcugaggcgucgugaccugucucagauggaggcgcucaagagacaccgacaggccgaagcugagggcgaagguugggaauacgcaucacuguucggauggaaauuccaucuagaguaccgcaagaccgacgcuuuuagacgacgccgauggcgccggaggauggaaccccuagagaagacaggaccagccgccguguucgcuuuagaaggugcacucggaggcgugauggacgacaaaucggaggauaguauguccguguccacucugucauuuggagucaaccgcccuacaaucuccugcauuuucgacuaugggaacagauaccacuugcggugcuauauguaucaggcucgggacuuagcagcaauggacaaggacagcuucucugaccccuacgcuauaguaucuuuccuucaccagucucagaaaaccgugguaguaaagaacacccugaacccuacaugggaucagacuuugaucuuuuaugaaaucgaaaucuuuggugaacccgcgaccgucgcugagcagcccccaucuaucgugguggagcuguacgaccacgacacguacggggcugaugaguuuauggggcgcuguauuugccagccaucacuggagaggaugcccagauuagccugguuuccacugacaaggggcucccagccaucuggugaauuauuggcuagcuuugaacugauacagcgggaaaaaccggccauucaucacauucccggcuuugagguccaggaaacuucucggauacuggacgaauccgaagacacagaccugccauaccccccaccacaacgugaggcaaauaucuacauggugccccaaaauaucaagccugcccugcaacgaacagcgaucgagauacucgccugggggcucagaaauaugaaguccuaccagcucgcaaacauaucgucucccagcuugguggucgaaugcggaggucaaacaguucagagcugcguuauacggaaccuucgaaagaacccaaauuuugauauaugcacgcuauucauggagguaaugcugccccgggaggagcucuacugucccccaaucaccguuaaagugauugauaauagacaguucggacggcgaccuguuguuggacaauguacuauacgaagucuagagagcuuucugugugacccguauucggcagaaagccccuccccccagggaggccccgacgaugugucccuacucagccccggcgaggacgugcucauugacauugacgauaaagagccauuaaucccuauucagcucgcagacgggcuuucuagucuggcuccaacuaauacugccagcccuccauccagcccacaugaagaggaguucauugacugguggagcaaguucuuugccagcauuggagaaagagaaaaaugcgggucuuaucucgagaaggauuuugauacccugaaaguguaugacacucagcuggagaauguggaggccuuugaaggcuugucugauuuuuguaacacauuuaagcuguaccggggcaagacacaggaagaaaccgaagauccaucaguaaucggagaguucaaaggccuguucaagaucuacccacugccagaggauccggcuauaccuaugccuccaaggcaguuccaccagcuggcugcucaaggaccacaggaaugcuuagugcguauuuacaucgugcgugccuucggacugcaaccuaaggacccaaaugguaagugugauccauacauaaaaaucucuaucgguaaaaagagugugucugaucaggauaacuauaucccuuguacucucgagccaguguuuggcaaaauguuugagcuuacgugcacucugccccuggaaaaggaccuaaagauaacccuguacgacuaugaucugcugucgaaggaugagaagauuggggagacaguggucgauuuggaaaaucgcuuacugagcaaguuuggagcucggugcggccuuccacagaccuauugcgugucaggcccuaaccaguggcgagaccaguugcgcccgucgcaauugcugcacuuguuuugucaacagcaucgcgugaaagccccggucuaucguacagaucgcguuauguuccaggauaaagaguacuccauagaggagaucgaagcaggucggauacccaauccacaucucggcccaguggaggagcggcuggcccugcacgugcugcagcagcagggacuugucccagagcauguugagucucguccacuuuacuccccuuugcagcccgacauugaacagggaaaauugcagaugugggucgaucuauucccgaaagcucuaggccgacccggucccccguucaacaucacaccacgacgagcucgcagguucuuucuccgguguauaauauggaacacuagagaugugauccuggaugaucuuucucugaccggggaaaaaaugagugacaucuauguaaagggcuggaugaucggcuucgaagaacacaagcagaaaaccgacguucacuacagaucuuuagguggugaagggaauuuuaauuggagguuuauuuucccauucgacuaccugcccgccgaacaagucuguacaauugcuaagaaggacgcauucuggagacucgacaagacugaaagcaaaauuccagcaagagugguguuucaaauuugggauaaugauaaguucaguuucgacgauuuucucggcuccuugcaacuggaccuaaacagaaugcccaaacccgcuaagaccgcaaaaaagugcucccuggaucagcucgacgacgcauuucacccagaaugguucgugucacuuuucgagcagaaaaccgucaagggcugguggcccuguguggccgaagaaggcgagaagaagauucucgcugggaaauuagagaugacgcuagagaucgucgcugaguccgagcaugaagagcgaccugccggacagggcagagacgagcccaauaugaacccaaaauuagaagacccccggcggccugacacaucauuccucugguuuaccucaccuuacaaaacaaugaaauuuauuuuauggaggcgcuuuaggugggccauuauccucuucaucauacuuuucauucugcugcuguuucuggcaauauucauuuacgccuuuccuaacuacgccgcuaugaagcucgugaaacccuucucuuag

SEQ ID NO: 49068 - RNA, 6360 nt, Artificial Sequence
  derived and/or modified sequence
auguuaugcugcuuacuaguacgcgcuucuaaccucccuagugccaagaaggauaggcggucggaucccguggcuucgcugacauuuagagguguuaaaaaacggacuaaggugauaaagaauucggugaacccuguguggaacgaaggcuuugaaugggaccuaaagggaaucccccuggaucagggaagcgaacugcauguuguggugaaagaucacgagacaaugggcaggaaucgauuccugggcgaagcgaaaguuccgcugcgagaaguuuuagccacaccuucauuguccgcgagcuucaacgccccgcuccuugacacaaagaaacagcccacaggugccucgcucgugcuucaagugucuuacacaccauuaccgggggcagugccccuguuuccaccuccaacacccuuagaaccuucuccaacauugcccgaucucgacgucgucgcuggaggcggacagagccgagcagaaacguggucccuacucucagauucgaccauggacaccagauacagcggaaagaaauggccugccccaacagacacuggcggcgaagaagauaccgaagaucagggucuuaccggcgaugaggccgaaccauuuuuggaucagucaggcggaccaggcgcucccacaacuccucguaaauugccguccaggccccccccccacuaucccggaauuaagcgaaaaagauccgcaccaacaagccgaaaacuguuauccgacaagccucaggauuuucagauacggguucaggucaucgaaggucggcagcuaccgggcgugaauaucaaaccggucgucaaggugacugccgcugggcagaccaagcgcacaagaauucacaaaggaaacucuccauuauuuaaugagacgcuguuuuuuaaucucuuugauaguccaggagaacuguucgacgagcccaucuuuauuacaguugucgauucgagaagccuacgcaccgacgcccuauuaggcgaguuuagaauggaugugggaacuaucuauagagagccuaggcacgcuuaucucagaaaguggcuacugcuaucagacccugaugacuucagcgccggagcccguggguaccuaaaaacuagucucugugugcuagguccuggcgacgaggccccuuuggaacgcaaggauccaagcgaggauaaggaagacaucgaaaguaaucugcugagaccaaccggaguggcguugagaggugcccauuuuugucugaaaguguucagagcagaggaucugccccagauggaugaugccgugauggauaacguuaaacaaauuuucggcuuugagucuaauaaaaaaaaucuggucgauccuuucgucgaaguuucguucgccggaaagauguuauguuccaaaauucucgaaaagaccgcuaacccucaauggaaccaaaauauuacauuaccagccauguuucccaguaugugcgaaaagaugcggauccgcauaauugauugggaccgccucacucacaaugauaucguugcgacuacuuauuugagcaugagcaagauuagcgcucccgggggugaaaucgaggucgacgacuaucugggcuuucugccaaccuuugguccaugcuauaucaaucuauacggcucuccccgcgaauuuaccggguuuccugacccuuacacugaacuuaacacaggcaaaggagagggcgucgcuuaccgugggcgccugcuacugucccuugagacaaaacucguggagcacucagagcaaaaagucgaggaucucccugccgaugacauccuucgcguggaaaaauaccuuaggagacgcaaauacucauuauucgccgcuuucuacucagcaacuauguugcaggauguggacgaugcaauucaguuugaagucagcauugggaacuacgggaauaaguucgauaugaccugccuuccacuggcauccacaacucaguauucaagggccguguucgacggaugucauuacuacuaucugccuuggggaaacgugaaaccugucgucgugcuuucuucauauugggaggauauuagucaucgcauagagacucagaaucagcuucugggaaucgccgaccgacuggaggccggacuggagcaggugcaucuugcccuuaaagcccagugcucuaccgaagacguagauucucucguggcucaguuaacggacgagcuuaucgccggaugcucucagcccuugggcgacauucaugaaacaccauccgcuacgcauuuagaucaguaccucuaccaguuacgcacacaccaucugucccagaucaccgaggcagcauuagcccucaaguuaggucacuccgaauugccggcugcgcucgagcaggcugaagacugguuacuuagguugcgagcucuagccgaagagccucagaacaguuugcccgauaucguuaucuggaugcugcaaggagauaaaaggguagcguaccaacgaguaccagcgcaccaaguccuguucucucggaggggcgcgaacuacugcgggaagaauuguggaaagcugcagaccaucuucuuaaaguaucccauggagaaagugccaggcgccaggaugcccguucaaaucagagugaagcugugguuugguuuaagcgucgaugagaaagaguuuaaucaguucgccgaaggaaaguuauccguguuugcugaaaccuaugaaaaugagacaaagcuugcacuugucgggaauuggggaacuacaggauugacuuaccccaaguuuagcgacguuacuggcaaaaucaaacuacccaaagacuccuuuaggccauccgcuggauggacgugggccggcgacugguuugugugcccagaaaagacacuccugcaugacauggaugcaggccacuugaguuucgucgaagagguauuugagaaucagacaagacugccuggaggccaauggauuuauaugagugacaacuacaccgaugucaauggcgagaagguucuacccaaagaugauaucgaguguccccuuggcuggaaaugggaggaugaggaguggucgacugaccucaaccgggccguugaugagcaagggugggaguacaguaucacgauuccccccgagaggaaaccaaagcacuggguccccgcugagaaaauguacuacacacacaggaggagacggugggucaggcuacggagaagagaccuuucccaaauggaagcccuaaagagacacagacaggcagaggcugaaggcgaagguugggaguaugcaucucuguucggauggaaauuucaccucgaguaccgcaagacagacgccuuucggagacgucguuggagacgaagaauggaaccccuggagaagacgggcccugcagcaguguucgccuuagaaggcgcccuggguggcgucauggaugacaagucugaggauucuauguccguauccacucugucauucgguguuaaccggcccacuauaucuuguauuuucgauuauggcaauagauaccaucuuagauguuacauguaccaggcccgggacuuggcugccauggauaaagauucauucucugacccauacgcuaucgugaguuuccugcaccaaagccagaagacagucguugugaaaaauacucuaaauccuaccugggaccaaacacugaucuuuuacgaaauugagauuuuuggagagccugcaacuguggccgaacaaccaccgaguaucguuguagaacuguaugaccacgacacuuacggggcagacgaguucaugggccgcugcauuugucaacccucccuggagcguaugccucgacuggccugguuuccgcugacacgggguucucagcccucuggagaguuacuugcuucguuugagcugauucaacgcgaaaaacccgcaauccaucauaucccuggauuugaagugcaggaaaccagccgcauacuagacgaaagugaagauacagaucucccauauccuccuccccagcgcgaagccaauauauacaugguuccucagaacaucaaaccugcauugcagcggaccgcaauugagauucuagcuugggggcugcgaaauaugaaguccuaucagcuugcuaauaucaguagcccuucccucgucgucgagugcggaggacagaccgugcaaucuugugugaucagaaaccugagaaagaaccccaauuuugacauauguacacuauucauggaaguaaugcugccuagagaagagcucuauugcccuccaauuaccgugaagguuaucgacaaccgucaguuuggacguaggccaguugucggucagugcacuauuaggucucucgaaaguuuccugugugacccguacucugccgagagucccuccccacaaggcggcccugaugauguuuccuugcuuagccccggagaagacguccugaucgauauugacgacaaagagccucugauccccauucagcuggcugauggccugucuagcuuagccccgacgaacacagccucaccacccagcuccccccacgaggaggaauucaucgacuggugguccaaauucuuugcaucaaucggagagagagagaaguguggaucguaccuggagaaggacuuugauacauugaagguuuaugauacacaacuggagaauguagaagcauuugagggucuaagcgauuucuguaacaccuuuaagcuguacaggggaaagacucaggaagagaccgaggacccaucugugauaggcgaguuuaaaggcuuguucaaaaucuaucccuugccugaagaucccgccaucccgaugccuccccggcaguuccaccaacuggccgcucaaggaccucaggaaugucuggugcgaaucuacaucguaagagccuucggucugcaaccuaaagacccaaauggaaagugugauccguauauaaaaauaaguaucgguaagaaauccgugagugaucaggacaacuacauacccuguacauuggagccuguuuucggaaaaauguuugaacugacuugcacauuaccauuagagaaagaccugaaaaucacgcuuuacgacuaugaccugcuaucuaaagacgagaaaaucggcgaaaccgucguggacuuggaaaauagacuccuuagcaaauucggugcccgcugcggauuaccucagacguauuguguuucaggcccaaaucaauggagagaucagcuucgcccuucucaacugcuccaccuuuuuugucagcagcaccgcgugaaggcuccagucuacaggaccgauagagugauguuucaggacaaggaauauucuauagaagagaucgaggccgguagaauacccaauccacacuuggguccagucgaagagagacuagcucugcacgugcuccagcagcagggacuugugccugagcacgucgaauccaggccucuguacucaccuuuacagccugacauugaacagggaaaauuacagaugugggucgaucuguuccccaaagccuugggccgaccuggaccuccuuucaauaucaccccaagacgagcuaggcgauuuuuucugcggugcauaaucuggaacacacgcgaugugauacuggacgaucugagccucacuggcgaaaagaugagugauauauauguaaaaggauggaugaucgguuucgaggaacacaagcaaaagacugauguccauuaccgcucccugggcggcgagggcaauuucaacuggcgcuucaucuucccuuuugacuaccuacccgcagaacagguguguacuauugcaaaaaaggacgccuucuggagauuagacaagacagaaaguaaaauccccgcuagagugguauuccagaucugggacaacgauaaauucuccuucgacgacuuuuugggaucccugcaacucgaccuuaaucggaugccuaaacccgccaagacugcuaagaaguguagccuggaccagcuggacgacgcauuucaucccgagugguucguguccuuauuugagcagaaaacagugaaggguugguggccuugugucgcggaggagggcgagaagaaaauccuggcaggaaaauuggagaugacacuugaaauaguugcagaauccgaacaugaggagcgaccggccggacagggcagagaugagccuaacaugaacccuaaacucgaggaccccagacgaccagauaccucauuccuuugguucacauccccauacaaaaccaugaaauucauccuuuggcgacguuuucgaugggcgauuauccucuucaucauucuguucauuuuacugcuauucuuggcaaucuuuauauaugcuuuuccaaacuacgccgcaaugaaauuaguuaaaccuuucuccuag

SEQ ID NO: 49069 - protein, 999 aa, Artificial Sequence
  derived and/or modified sequence
MADKVRRQRPRRRVCWALVAVLLADLLALSDTLAVMSVDLGSESMKVAIVKPGVPMEIVLNKESRRKTPVIVTLKENERFFGDSAASMAIKNPKATLRYFQHLLGKQADNPHVALYQARFPEHELTFDPQRQTVHFQISSQLQFSPEEVLGMVLNYSRSLAEDFAEQPIKDAVITVPVFFNQAERRAVLQAARMAGLKVLQLINDNTATALSYGVFRRKDINTTAQNIMFYDMGSGSTVCTIVTYQMVKTKEAGMQPQLQIRGVGFDRTLGGLEMELRLRERLAGLFNEQRKGQRAKDVRENPRAMAKLLREANRLKTVLSANADHMAQIEGLMDDVDFKAKVTRVEFEELCADLFERVPGPVQQALQSAEMSLDEIEQVILVGGATRVPRVQEVLLKAVGKEELGKNINADEAAAMGAVYQAAALSKAFKVKPFVVRDAVVYPILVEFTREVEEEPGIHSLKHNKRVLFSRMGPYPQRKVITFNRYSHDFNFHINYGDLGFLGPEDLRVFGSQNLTTVKLKGVGDSFKKYPDYESKGIKAHFNLDESGVLSLDRVESVFETLVEDSAEEESTLTKLGNTISSLFGGGTTPDAKENGTDTVQEEEESPAEGSKDEPGEQVELKEEAEAPVEDGSQPPPPEPKGDATPEGEKATEKENGDKSEAQKPSEKAEAGPEGVAPAPEGEKKQKPARKRRMVEEIGVELVVLDLPDLPEDKLAQSVQKLQDLTLRDLEKQEREKAANSLEAFIFETQDKLYQPEYQEVSTEEQREEISGKLSAASTWLEDEGVGATTVMLKEKLAELRKLCQGLFFRVEERKKWPERLSALDNLLNHSSMFLKGARLIPEMDQIFTEVEMTTLEKVINETWAWKNATLAEQAKLPATEKPVLLSKDIEAKMMALDREVQYLLNKAKFTKPRPRPKDKNGTRAEPPLNASASDQGEKVIPPAGQTEDAEPISEPEKVETGSEPGDTEPLELGGPGAEPEQKEQSTGQKRPLKNDEL

SEQ ID NO: 49070 - protein, 848 aa, Artificial Sequence [sequence omitted]

SEQ ID NO: 49071 - DNA, 444 bp, Artificial Sequence
  derived and/or modified sequence
atggccgataaagttcgtcggcagaggcctagacgtagagtgtgttgggctctggtggccgtcctgctggccgacctgcttgccctgtccgacactctcgccgtgatgtccgttgaccttggcagcgaatcaatgaaggtcgcgatcgtaaagccgggagtcccaatggagatagtgcttaataaggagagccggcgaaagacgccagtgatagttacactgaaagaaaatgagcggttttttggagacagcgcggcttctatggcgatcaagaaccccaaggcaactttgaggtacttccagcacctcttgggcaagcaagctgataatccccacgttgctctgtatcaggctagattccccgagcatgagctcacattcgatccccagcgccagacagtgcactttcagatcagttcacagctgcagttttcgcccctctag

SEQ ID NO: 49072 - DNA, 444 bp, Artificial Sequence
  derived and/or modified sequence
atggctgacaaggtgcggcggcagaggccccggcggcgggtgtgctgggccctggtggccgtgctgctggccgacctgctggccctgagtgacaccctggccgtgatgtctgtggacctgggcagcgagagcatgaaggtggccatcgtgaagccaggagtgcccatggagatcgtgctgaacaaggagagcaggaggaagacccctgtgattgtgaccctgaaggaaaatgaacgcttctttggagacagcgctgcctccatggccatcaagaaccccaaggccaccctgcgctacttccagcacctgctgggcaagcaggccgacaacccccacgtggccctgtaccaggcccgcttccctgagcacgagctgacctttgacccccagaggcagacagtgcacttccagatcagcagccagctgcagttcagccccctgtag

SEQ ID NO: 49073 - DNA, 444 bp, Artificial Sequence
  derived and/or modified sequence
atggccgacaaggtgcggcggcagcggccccggcggcgggtgtgctgggcactggtggcagtcctgctggcagacctgttggccttatcagataccctcgccgtgatgagtgtggacctcggcagcgagtccatgaaagtagcgattgtcaagcctggtgtcccaatggagattgtcctcaataaagagtctaggcggaaaacacccgttatagtgacactgaaggagaacgaacggttctttggtgacagcgccgccagtatggccatcaagaaccccaaggcgacccttcgatactttcagcacctgctaggcaaacaggcggacaaccctcacgtagctctctaccaagcccgcttccccgagcatgaattaactttcgatcctcagagacagactgtgcattttcagattagtagccagctccagtttagtcccctttag

SEQ ID NO: 49074 - DNA, 444 bp, Artificial Sequence
  derived and/or modified sequence
atggcagacaaggtgagaagacagcgtcccagacgacgggtctgctgggctctggttgcagtgctcctagccgacctgctggccttgagtgacacgctggctgtgatgagcgtggacctgggcagcgaaagcatgaaggtggcaatagtgaagcctggggtgcccatggagattgttttgaataaggagtctaggagaaagactccagtgatagtaacactgaaggagaacgagaggttctttggcgatagcgccgcatcaatggctatcaaaaatccgaaagccacgctgaggtactttcagcatctgctggggaaacaggcagataatccgcacgttgctctttaccaggcccgtttcccagagcacgaactgacattcgatcctcagagacaaaccgtgcactttcagatttcatcacagctgcaatttagccccctgtag

SEQ ID NO: 49075 - DNA, 444 bp, Artificial Sequence
  derived and/or modified sequence
atggccgacaaggtgagaagacagagacccagaagaagagtgtgctgggccctggtggccgtgctgctggccgacctgctggccctgagcgacaccctggccgtgatgagcgtggacctgggcagcgagagcatgaaggtggccatcgtgaagcccggcgtgcccatggagatcgtgctgaacaaggagagcagaagaaagacccccgtgatcgtgaccctgaaggagaacgagagattcttcggcgacagcgccgccagcatggccatcaagaaccccaaggccaccctgagatacttccagcacctgctgggcaagcaggccgacaacccccacgtggccctgtaccaggccagattccccgagcacgagctgaccttcgacccccagagacagaccgtgcacttccagatcagcagccagctgcagttcagccccctgtag

SEQ ID NO: 49076 - protein, 157 aa, Artificial Sequence
  derived and/or modified sequence
MDPPAGFVRAGNPAVAAPQSPLSPEGAHFRAAHHPRSTGSRCPGSLQPSRPLVANWLQSLPEMPVDFTGYWKMLVNENFEEYLRALDVNVALRKIANLLKPDKEIVQDGDHMIIRTLSTFRNYIMDFQVGKEFEEDLTGIDDRKCMAGVQSRDLSSL

SEQ ID NO: 49077 - DNA, 474 bp, Artificial Sequence
  derived and/or modified sequence
atggacccccccgccggcttcgtgagagccggcaaccccgccgtggccgccccccagagccccctgagccccgagggcgcccacttcagagccgcccaccaccccagaagcaccggcagcagatgccccggcagcctgcagcccagcagacccctggtggccaactggctgcagagcctgcccgagatgcccgtggacttcaccggctactggaagatgctggtgaacgagaacttcgaggagtacctgagagccctggacgtgaacgtggccctgagaaagatcgccaacctgctgaagcccgacaaggagatcgtgcaggacggcgaccacatgatcatcagaaccctgagcaccttcagaaactacatcatggacttccaggtgggcaaggagttcgaggaggacctgaccggcatcgacgacagaaagtgcatggccggcgtgcagagcagagacctgagcagcctgtag

SEQ ID NO: 49078 - DNA, 474 bp, Artificial Sequence
  derived and/or modified sequence
atggaccctcccgccgggtttgtgagggccggcaatcccgccgtggccgcaccccagtctccacttagcccagaaggcgcacactttagggctgcccatcatccccggtcaacaggaagtcggtgtcccggctctctccaaccctcccgtcctctagttgcgaactggctccaatcactcccagagatgcccgtagacttcaccggatactggaagatgctcgtgaatgaaaacttcgaggagtatctacgggctctggatgtcaacgtggcactgcgaaaaatagcaaacctgctgaaacccgataaggagatagtgcaagatggagatcatatgataatccggacattatcgacctttcgcaactacatcatggacttccaagtggggaaagagttcgaggaagacctgacgggcatcgatgataggaagtgtatggccggagtacagtcgagagacttgagcagtctgtag

SEQ ID NO: 49079 - DNA, 474 bp, Artificial Sequence
  derived and/or modified sequence
atggaccccccagctggctttgtgcgggccggcaacccagctgtggccgccccccagagccccctgagccctgagggcgcccacttccgggccgcccaccaccccaggagcacaggcagccgctgccccggcagcctgcagcccagccggcccctggtggccaactggctgcagagcctgcctgagatgcctgtggacttcaccggctactggaagatgctggtgaatgaaaattttgaggagtacctgcgggccctggatgtgaatgtggccctgaggaagatcgccaacctgctgaagccagacaaggagatcgtgcaggatggagaccacatgatcatccgcaccctgagcaccttcaggaactacatcatggacttccaggtgggcaaggagtttgaggaggacctgaccggcattgatgacaggaagtgcatggccggcgtgcagagccgggacctgagcagcctgtag

SEQ ID NO: 49080 - DNA, 474 bp, Artificial Sequence
  derived and/or modified sequence
atggacccccccgccggcttcgtgcgggccggcaaccccgccgtggcagcaccccagagccctctatcccccgaaggtgctcactttagggccgcccaccatccaaggtcaactggatctagatgccccggatctcttcaaccatctaggccccttgttgcaaattggctccagagcctccctgaaatgcccgtggatttcaccggttattggaaaatgctagtaaatgagaatttcgaagaatatctcagggcacttgatgtgaatgtcgctctgcgcaagatagccaacctgctgaaacccgacaaggaaatcgtacaagacggtgatcatatgatcatacggactctgtccacattccggaactatattatggacttccaggttggcaaggagtttgaggaagatctgacggggattgatgaccgcaaatgtatggctggagtgcagtctagggatctttcgtctctctag

SEQ ID NO: 49081 - DNA, 474 bp, Artificial Sequence
  derived and/or modified sequence
atggaccctcctgctggcttcgttagggcaggcaaccctgcagttgctgctccccaatccccattgagcccagaaggtgctcacttccgggcagcccaccacccccgttccaccggctcccggtgtccagggtcgcttcagccctctagaccactcgttgccaactggctccagagcttacccgagatgccagtggatttcactggatattggaagatgctggtgaacgagaattttgaggaatatcttcgagctctggatgtaaatgttgctctgcggaaaatagcaaacctgctaaagcccgacaaagagattgtgcaggacggagatcatatgattattcgaacactgagtacattcaggaactacatcatggacttccaggtggggaaggaattcgaggaggatcttacaggcatagacgacaggaagtgtatggcaggggtgcagagccgggatctcagttcgttgtag

SEQ ID NO: 49082 - DNA, 1487 bp, Artificial Sequence
  derived and/or modified sequence
aaacgaactgaacgtctgaaacgaaggtggcgcggcctggacaaacctgacccttcgacatcccccgcccctgcgcccgccctcgctaagcggggaggagcgaccgctacaatggatcctcccgcaggctttgtgcgcgctgggaatccagctgtcgccgccccgcagagccccctgtccccggagggcgctcatttccgggccgcccaccacccgcgtagcaccggcagccgctgtcccggcagtctccagccgtcccgcccgcttgtggccaactggctccagtcactccccgaaatgccagtcgacttcactgggtactggaagatgttggtcaacgagaatttcgaggagtacctgcgcgccctcgacgtcaatgtggccttgcgcaaaatcgccaacttgctgaagccagacaaagagatcgtgcaggacggtgaccatatgatcatccgcacgctgagcacttttaggaactacatcatggacttccaggttgggaaggagtttgaggaggatctgacaggcatagatgaccgcaagtgcatggctggagtgcaatcgcgtgatctcagctcactgtaacctctgcctcccgggttcaagcaattctcctgcctcagcctcccaagtagctgggattacagtcacacgccaccacacctggataattttgtatttttggtagagacagggtttcactatgttggtcaggctggtctcaaactcctgagctcaggtgatccatctgcctcagcctcccaaaatgctgggattacaagtgtgagccactacacctggttcttctttccactgtttgctaactcccatggtgttttctggcatcacttccagcattatttctagccttacctcttccaggaagccttccctgatgggcctctgtctctaccttaaaggctgtcgaggtgccttctgacttccataacctccagcatttgtctaccagtacttaccattctgctggaattctctgtcttcttaccttcttctcagataatctgtgagccctcaagagcaggccactgaccttacttccctctctccagcacctacagctggtgcataggaggtgtgaaacccatgattgctgaatgccgttcccttgcacagaaccacgtggtgaattcctattgctcagtcaagggtcagtttaaagcagggaactgcagagcacagtcatcaagagcatgagctctagagccaaatctcatctccccacttcacggctgggtgaacttcaggcctcagtctccacatttgtaaaatgatgagaagcatacctgctctaggaggttgtcaggagtcaactggtatgacatatactttgcctagtaccctgcccagcacataatgttgggcattatcattatcataacaacacatgttgttatgatattgattatggtgactgataatgacagcaatgctatcactcccaccagggagccttccctgacccccca

SEQ ID NO: 49083 - protein, 153 aa, Artificial Sequence
  derived and/or modified sequence
MDPPAGFVRAGNPAVAAPQSPLSPEGAHFRAAHHPRSTGSRCPGSLQPSRPLVANWLQSLPEMPVDFTGYWKMLVNENFEEYLRALDVNVALRKIANLLKPDKEIVQDGDHMIIRTLSTFRNYIMDFQVGKEFEEDLTGIDDRKCMSETGFSS

SEQ ID NO: 49084 - DNA, 462 bp, Artificial Sequence
  derived and/or modified sequence
atggacccccccgccggcttcgtgagagccggcaaccccgccgtggccgccccccagagccccctgagccccgagggcgcccacttcagagccgcccaccaccccagaagcaccggcagcagatgccccggcagcctgcagcccagcagacccctggtggccaactggctgcagagcctgcccgagatgcccgtggacttcaccggctactggaagatgctggtgaacgagaacttcgaggagtacctgagagccctggacgtgaacgtggccctgagaaagatcgccaacctgctgaagcccgacaaggagatcgtgcaggacggcgaccacatgatcatcagaaccctgagcaccttcagaaactacatcatggacttccaggtgggcaaggagttcgaggaggacctgaccggcatcgacgacagaaagtgcatgagcgagaccggcttcagcagctag

SEQ ID NO: 49085 - DNA, 462 bp, Artificial Sequence
  derived and/or modified sequence
atggaccctccagctgggttcgtgagagccgggaatcccgctgtggccgctccacagtctcctctctctcccgagggggcccactttcgggccgcccaccacccccgttctaccggatctcggtgccctgggtccctgcagccttctaggccactggttgccaactggctgcagtctctacccgagatgccagtggatttcacaggctactggaagatgttggtgaatgagaatttcgaggagtacttgcgcgccctagacgtgaacgtggccctacggaagatcgcgaacctgctgaaaccagataaagagattgtccaggacggggatcacatgatcatccgaacattatctacattccgaaattacattatggatttccaggttggcaaggaattcgaagaagacctgacgggcattgacgatcgtaagtgcatgagcgaaactggctttagctcttag

SEQ ID NO: 49086 - DNA, 462 bp, Artificial Sequence
  derived and/or modified sequence
atggaccccccagctggctttgtgcgggccggcaacccagctgtggccgccccccagagccccctgagccctgagggcgcccacttccgggccgcccaccaccccaggagcacaggcagccgctgccccggcagcctgcagcccagccggcccctggtggccaactggctgcagagcctgcctgagatgcctgtggacttcaccggctactggaagatgctggtgaatgaaaattttgaggagtacctgcgggccctggatgtgaatgtggccctgaggaagatcgccaacctgctgaagccagacaaggagatcgtgcaggatggagaccacatgatcatccgcaccctgagcaccttcaggaactacatcatggacttccaggtgggcaaggagtttgaggaggacctgaccggcattgatgacaggaagtgcatgtctgaaacaggcttcagcagctag

SEQ ID NO: 49087 - DNA, 462 bp, Artificial Sequence
  derived and/or modified sequence
atggacccccccgccggcttcgtgcgggccggcaaccccgccgtggcagccccccaaagcccattgagtccggaaggagctcacttcagagcggcgcatcaccctagaagcaccggctcccgttgccccggaagtctccagccgtcgcgacctctggtcgccaactggctgcagtcactgcccgaaatgccagtggacttcactggctactggaaaatgctggtgaacgaaaacttcgaagagtatctgcgggctttggatgtgaacgttgcactgcgcaagattgcaaatctgctgaagccagataaggaaatcgtacaggatggcgaccatatgattattcggacattgagtacattccgcaattacatcatggacttccaagttggcaaagaatttgaagaagatctcactggaattgacgatcggaagtgtatgtccgagactggcttctcttcctag

SEQ ID NO: 49088 - DNA, 462 bp, Artificial Sequence
  derived and/or modified sequence
atggatccccctgccggtttcgttcgtgcaggaaacccggctgtggctgcaccgcagagccccctctcccccgagggcgctcatttccgggcagcccaccatccaagatctaccgggagtcggtgcccagggtcactacaaccgtccaggcctctggtggctaactggctccaatcgctcccagagatgcccgttgacttcactggatactggaaaatgctggtcaacgaaaacttcgaagagtacttgagggctctggatgtcaacgtggcattacgcaagattgcaaacctactgaagccagataaagagatcgtgcaggacggcgaccatatgataatccggaccctttccacattccggaattacattatggacttccaagtgggcaaagagtttgaggaggacttgacagggatagacgaccggaagtgcatgtccgagaccggtttcagctcatag

SEQ ID NO: 49089 - DNA, 1935 bp, Artificial Sequence
  derived and/or modified sequence
aatggatcctcccgcaggctttgtgcgcgctgggaatccagctgtcgccgccccgcagagccccctgtccccggagggcgctcatttccgggccgcccaccacccgcgtagcaccggcagccgctgtcccggcagtctccagccgtcccgcccgcttgtggccaactggctccagtcactccccgaaatgccagtcgacttcactgggtactggaagatgttggtcaacgagaatttcgaggagtacctgcgcgccctcgacgtcaatgtggccttgcgcaaaatcgccaacttgctgaagccagacaaagagatcgtgcaggacggtgaccatatgatcatccgcacgctgagcacttttaggaactacatcatggacttccaggttgggaaggagtttgaggaggatctgacaggcatagatgaccgcaagtgcatgagtgaaactggcttttcctcttgaatgtgctgacttttgattccagccccccaggaatggatcagagaagaggagccgctacccacccactcatcagcctggcctcaggggcagctcatggactttttagccagagagaaccgggttcaagttatggctcaagccctaaccccttggtgatgggctggttacttatagaagcctaatttttatcagctctaaagcttgaagatttagtgaaacattgtggaaagctcccagcacagtacctggcacctggcaggttctctgtcatctcccctacttttccctcctgatcacttatttaacacaagcaccagatgctgaaaaccctctaattgtcccaggaacacacataccctcaaagggagaagcacactttcaaatcaaactccaggatttgcatcttttagcaatttccattatgcggagaaagtatctactcactgtctggttttgaaattttaccccaaatcgaaagagcatgggttttggtgtcagacctgggtcggtcctggctctggcctttgcaggcagtatcaccacgggcaaggcttcacctctcataacctggctgtggaaccacagaaacaacagaattcagtcccagccctccagaggtggatccgtaaacagagggactactagggctgggtggagggctgtgagtgatccaacatcccctgctcttgagagtggtgttttagcatgggagtgttaatgaatgtcacaagtttcttgataccaaatagagttcctaccatttgcaggtcataccggtcactgccaagagatggcttatttagtgggaattgtctggcactcctagtataagtcacctaagtggggcaagtgggccttgaaacatccctgggagacactcactcaggctgcctgtgggagctgggctttttgtgtcactctcccatgcagcagtgacggctggggtttctaagtggtcagaggagctggaaaatggcttctgaagtaacagtcccttgtcatagtggtacaaagatgtcttcattcatctgttggcacatgtctctgggtaaactgccggcaaggccaaagtgatgggggttattattagtttttaatagaaaagttagactggcttcactttccaaccagcttccctagttccagcccatttgcagacttttgggtggtctgtgggatgaaaatttcttgtgaggaggtgagctgaagatggccatccctcctggttgctcttggattgtctgggcttcatttctaaggcggtcccagagcccatgtgggggttgggggaagcagcattgtctagcccctttggtttgtacccatgttcaccccacccccacagccacctgccttttctgtgggacttgaaaagcatcaggaatatcttcctacctgaaattcttccattagaccctgattaattggattaatctaggaaaccagattaaatgaccatttaacgacccttt

SEQ ID NO: 49090 - protein, 835 aa, Artificial Sequence
  derived and/or modified sequence
MLSRLFRMHGLFVASHPWEVIVGTVTLTICMMSMNMFTGNNKICGWNYECPKFEEDVLSSDIIILTITRCIAILYIYFQFQNLRQLGSKYILGIAGLFTIFSSFVFSTVVIHFLDKELTGLNEALPFFLLLIDLSRASTLAKFALSSNSQDEVRENIARGMAILGPTFTLDALVECLVIGVGTMSGVRQLEIMCCFGCMSVLANYFVFMTFFPACVSLVLELSRESREGRPIWQLSHFARVLEEEENKPNPVTQRVKMIMSLGLVLVHAHSRWIADPSPQNSTADTSKVSLGLDENVSKRIEPSVSLWQFYLSKMISMDIEQVITLSLALLLAVKYIFFEQTETESTLSLKNPITSPVVTQKKVPDNCCRREPMLVRNNQKCDSVEEETGINRERKVEVIKPLVAETDTPNRATFVVGNSSLLDTSSVLVTQEPEIELPREPRPNEECLQILGNAEKGAKFLSDAEIIQLVNAKHIPAYKLETLMETHERGVSIRRQLLSKKLSEPSSLQYLPYRDYNYSLLGGGASSRVLADGMTRGPVVRLPRACDSAEVKAWLETSEGFAVIKEAFDSTSRFARLQKLHTSIAGRNLYIRFQSRSGDAMGMNMISKGTEKALSKLHEYFPEMQILAVSGNYCTDKKPAAINWIEGRGKSVVCEAVIPAKVVREVLKTTTEAMIEVNINKNLVGSAMAGSIGGYNAHAANIVTAIYIACGQDAAQNVGSSNCITLMEASGPTNEDLYISCTMPSIEIGTVGGGTNLLPQQACLQMLGVQGACKDNPGENARQLARIVCGTVMAGELSLMAALAAGHLVKSHMIHNRSKINLQDLQGACTKKTA

SEQ ID NO: 49091 - protein, 18 aa, Artificial Sequence
  derived and/or modified sequence
MLSRLFRMHGLFVASHPW

SEQ ID NO: 49092 - DNA, 2508 bp, Artificial Sequence
  derived and/or modified sequence
atgctgagtaggctctttaggatgcatggcctgttcgtggcttctcacccttgggaggtgatcgttggaactgtcacactaaccatatgcatgatgagcatgaacatgttcacaggaaacaataagatttgtggctggaattatgagtgccccaaattcgaggaagacgtactttcctccgatataataattctgactattacacgctgcatcgccatcctgtatatctacttccagtttcagaacttgcggcagttgggctcaaagtacatcctcggcattgctgggctttttacgatcttttcctcctttgttttctccacggtggttattcacttcctagacaaagagctcaccggactcaatgaggccttgccattttttctactgttaatcgatctgagccgcgcttccactctcgctaaattcgctctgtccagcaacagccaggacgaagtgagggaaaatatagcccgtgggatggcaattctgggaccaacgtttacgttggacgcgctggtcgagtgtctggtgatcggcgtcgggacgatgtctggcgtgaggcaactagaaatcatgtgctgtttcggctgcatgtcagtgctcgcaaattactttgtcttcatgacctttttccccgcctgcgtctctctggttttggagcttagccgcgagtcgagggaaggtcggcctatttggcagctctcccattttgccagagtactggaagaggaggagaacaagccaaatcctgttactcaacgagtgaagatgataatgtcattgggcctggtcctggtccacgcacattctagatggatcgccgatcccagccctcagaatagcacggccgatacaagcaaggtctcattgggcctggatgagaacgtttccaagaggatcgagccttccgtgagtctgtggcagttttatctgtccaagatgattagcatggacatcgagcaagtgatcactctcagcctggcactgctgctcgctgttaagtacatttttttcgagcagacagagacagagagtactctgtccttgaagaatccaattacctctcccgtggtcacccaaaaaaaggtgccagataactgttgcaggcgggaaccgatgctagtccggaacaaccaaaaatgcgacagcgttgaggaagagacaggcattaatagggagcgcaaggtagaagtgatcaagccgctggttgccgagacagatacccctaaccgggcaacttttgtggttggaaattcctcactcttagatacctcctcagtactcgtgactcaggaaccggagatcgaactgccacgcgagcctcgcccgaacgaggaatgtttgcagatcttagggaatgcggagaagggggccaagttcctttccgacgccgagatcattcaactggtcaacgccaagcacatccccgcttacaagctcgagacactgatggagacacacgaaagaggtgtgtccatccgccgacaactactgtctaagaaactgagcgagccatcatctctgcagtacctcccctatcgcgactacaattatagcctgcttggtggtggagcgagctctcgcgtgctggcagacggtatgaccaggggccctgtggtgaggcttcctcgtgcatgcgattctgcggaggtaaaggcatggctcgagactagtgaagggttcgcagttatcaaggaggcgtttgactctacctctaggttcgcacggctgcagaagcttcacacgagcatcgccggcagaaacctctacatccgctttcagtcccggtcgggcgacgctatggggatgaacatgatcagcaaaggtaccgagaaggccctgagcaaactgcacgagtactttccagagatgcaaattctcgcagtctcgggcaactactgtacagacaagaaaccagctgcaatcaattggatcgaggggcgcggaaagtcagtggtatgtgaagcggtgatcccagccaaagtcgtccgcgaagtgctcaagactacaaccgaggccatgattgaggtgaacatcaataagaatctggtcgggagtgccatggccggctcgatagggggatacaacgctcacgcagctaacattgtgactgcgatttacatcgcctgcggacaggacgccgcccaaaacgtcgggagttcaaactgcattactctcatggaagcatcaggaccaacgaacgaggacctttatatctcttgtaccatgccgagtatagaaatcgggaccgtgggcggggggactaatctgctgcctcaacaggcatgcctgcagatgcttggggttcaaggggcttgtaaggataaccccggcgagaacgcccgacaactggcccgaatagtttgcggtaccgtcatggccggcgagctgtccctgatggccgccctggcggccggccacttagtgaagagccacatgattcataatagaagcaagataaacttacaggacctccagggcgcatgcaccaagaaaactgcatag

SEQ ID NO: 49093 - DNA, 798 bp, Artificial Sequence
  derived and/or modified sequence
atgttatccaggctcttccgaatgcacggcttgtttgttgcatcacacccttgggaggtgatagtgggcactgttacactcacaatctgtatgatgtcaatgaatatgttcaccgagggcaccgaaaaagccttaagtaaactgcacgagtattttccggagatgcagattcttgcggtgagtggaaattattgcacagacaagaaacctgccgccatcaattggattgaggggagagggaagtccgtcgtatgtgaagcagttattcccgctaaggtggtcagggaagtgctgaagacaacaaccgaggcgatgatcgaggtcaacatcaataagaacctggtcggctctgccatggccggatcaatcggaggctacaacgcccacgccgctaatatcgtgacagccatttatatcgcatgcgggcaggatgcagcacagaacgtgggatcgtcgaactgcatcactctgatggaggcgtccggccctactaatgaggacctgtacatatcctgcactatgccatcaattgagatcgggacagttggcggggggactaacctgttaccacagcaggcctgtctccaaatgttgggggtacagggcgcctgcaaagataatcctggggagaacgctcggcaactcgctcgcatagtgtgtggaaccgtgatggctggcgagctcagcctcatggctgcactagcagcagggcatctcgtcaaatctcatatgatccacaacagatctaagataaacctccaggacctccagggtgcatgtaccaagaagaccgcttag

SEQ ID NO: 49094 - DNA, 336 bp, Artificial Sequence
  derived and/or modified sequence
atgctgtcccgactgtttcgcatgcacgggctgtttgtcgccagtcatccctgggaggtgatcgtgggtaccgtaactttaactatttgtatgatgtccatgaacatgttcaccggaaacaacaagatttgcggatggaactatgagtgtccgaaatttgaggaggatgtcctgtccagcgacatcattatacttacgataactcggtgtattgctatcctgtatatctatttccagtttcaaaatctgcgccagctcggctccaagtatattctcggcattgccggcttgtttaccatctttagcagtttcgtattcagcacagtcgtgatttag

SEQ ID NO: 49095 - DNA, 2555 bp, Artificial Sequence
  derived and/or modified sequence
atgttgtcaagactttttcgaatgcatggcctctttgtggcctcccatccctgggaagtcatagtggggacagtgacactgaccatctgcatgatgtccatgaacatgtttactgaaggtacagagaaagcactttcaaaacttcacgagtatttccctgaaatgcagattctagccgttagtggtaactattgtactgacaagaaacctgctgctataaattggatagagggaagaggaaaatctgttgtttgtgaagctgtcattccagccaaggttgtcagagaagtattaaagactaccacagaggctatgattgaggtcaacattaacaagaatttagtgggctctgccatggctgggagcataggaggctacaacgcccatgcagcaaacattgtcaccgccatctacattgcctgtggacaggatgcagcacagaatgttggtagttcaaactgtattactttaatggaagcaagtggtcccacaaatgaagatttatatatcagctgcaccatgccatctatagagataggaacggtgggtggtgggaccaacctactacctcagcaagcctgtttgcagatgctaggtgttcaaggagcatgcaaagataatcctggggaaaatgcccggcagcttgcccgaattgtgtgtgggaccgtaatggctggggaattgtcacttatggcagcattggcagcaggacatcttgtcaaaagtcacatgattcacaacaggtcgaagatcaatttacaagacctccaaggagcttgcaccaagaagacagcctgaatagcccgacagttctgaactggaacatgggcattgggttctaaaggactaacataaaatctgtgaattaaaaaagctcaatgcattgtcttgtggaggatgaatagatgtgatcactgagacagccacttggtttttggctctttcagagaggtctcaggttctttccatgcagactcctcagatctgaacacagtttagtgctttacatgctgtgctctttgaagagatttcaacaagaatattgtatgttaaagcatcagagatggtaatctacagctcacctctgaaggcaaatataagctgggaaaaaagttttgatgaaattcttgaagttcatggtgatcagtgcaattgaccttctccctcactcctgccagttgaaaatggatttttaaattatactgtagctgatgaaactcctgattttgtagttaatttattaagtctgggatgtagaacttcaagaagtaagagctaagttctaagttcatgtttgtaaattaatacttcatttggtgctggtctattttgattttggggggtaatcagcattattcttcagaaggggacctgttttcttcaagggaagaaacactcttattcccaaactacagaataatgtgttaaacatgctaaatagttctatcaggaaaacaaatcactgtatttatctccgcaggctatttgttcagagaggccttttgtttaaatataaatgtttaaatataaatgtttgtctggattggctataacatgtctttcagcattaggcttttaagaaacacagggttttgtattctttactaaagatatcagagctcttaatgttgcttagatgagggtgactgtcaagtacaagcaagactgggaccttagaaatcattgtagaaacacagttttgaaagaaaaataccatgtctctaagccaactttaattgcttaaaagacatttttatttagttgaaaaatctagttttttttgtaaactgtatcaaatctgtatatgttgtaataaaacttatgctagtttattggaagtgttcaagaaataaaaatcaacttgtgtactgataaaatactctagcctgggccagagaagataatgttctttaatgttgtccaggaaaccctggcttgcttgccgagcctaatgaaagggaaagtcagctttcagagccagtgaaggagccacgtgaatggccctagaactgtgcctagttcctgtggccaggaggttggtgactgaaacattcacacagggctctttgatggacccacgaacgctcttagctttctcagggggtcagcagagttattgaatcttaattttttttaatgtacaagttttgtataaataataaagaactccttattttgtattacatctaatgcttcaagtgttgctcttggaaagctgatgatgtctcttgtagaagatggactctgaaaaacattccaggaaaccatggcagcatggagagcctcttagtgattgtgtctgcattgttattgtggaagatttaccttttctgttgtacgtaaagcttaaattgcttttgttgtgactttttagccagtgactttttctgagcttttcatggaagtggcagtgaaaaatatgttgagtgttcattttagtgactgtaattaatatcttgctggattaatgttttgtacaattactaaattgtatacattttgttatagaatacttttttctagtttcagtaaataatgaaaaggaagttaatacc

SEQ ID NO: 49096 - DNA, 2508 bp, Artificial Sequence
  derived and/or modified sequence
atgctgagccgcctcttcaggatgcacggcctgtttgtggccagccacccctgggaggtgattgtgggcaccgtgaccctgaccatctgcatgatgtccatgaacatgttcaccggcaacaacaagatctgtggctggaactatgaatgtcccaagtttgaagaagatgtgctgagcagtgacatcatcatcctgaccatcacccgctgcatcgccatcctgtacatctacttccagttccagaacctgcggcagctgggcagcaagtacatcctgggcattgctggcctcttcaccatcttcagcagctttgtgttcagcacagtggtgatccacttcctggacaaggagctgaccggcctgaatgaggccctgcccttcttcctgctgctgattgacctgagccgggccagcaccctggccaagtttgccctgagcagcaacagccaggatgaggtgagagaaaatattgcccggggcatggccatcctgggccccaccttcaccctggatgccctggtggagtgcctggtgattggagtgggcaccatgtctggagtgcggcagctggagatcatgtgctgcttcggctgcatgtctgtgctggccaactactttgtgttcatgaccttcttccctgcctgtgtgtccctggtgctggagctgagccgggagagccgggagggccggcccatctggcagctgagccactttgcccgggtgctggaggaggaggagaacaagcccaaccctgtgacccagagggtgaagatgatcatgagcctgggcctggtgctggtgcacgcccacagccgctggattgctgaccccagcccccagaacagcacagctgacaccagcaaggtgtccctgggcctggatgaaaatgtgtccaagagaattgagcccagcgtgtccctgtggcagttctacctgagcaagatgatctccatggacatcgagcaggtgatcaccctgagcctggccctgctgctggccgtgaagtacatcttctttgagcagacagaaacagagagcaccctgagcctgaagaaccccatcaccagccctgtggtgacccagaagaaggtgcctgacaactgctgccggcgggagcccatgctggtgaggaacaaccagaagtgtgacagcgtggaggaggagaccggcatcaaccgggagaggaaggtggaggtgatcaagcccctggtggccgagacagacacccccaacagagccacctttgtggtgggcaacagcagcctgctggacaccagctctgtgctggtgacccaggagcctgagattgagctgccccgggagccccggcccaatgaagaatgtctgcagatcctgggcaatgctgagaagggggccaagttcctgagtgatgctgagatcatccagctggtgaatgccaagcacatcccagcctacaagctggagaccctgatggagacccatgagcggggcgtgtccatccggcggcagctgctgagcaagaagctgtctgagcccagcagcctgcagtacctgccctacagagactacaactacagcctgctgggcggcggggccagcagccgggtgctggctgatggcatgacccggggccctgtggtgcggctgccccgggcctgtgacagcgctgaggtgaaggcctggctggagaccagcgagggctttgctgtgatcaaggaggcctttgacagcaccagcagatttgcccggctgcagaagctgcacaccagcattgctggcaggaacctgtacatccgcttccagagccgctctggagatgccatgggcatgaacatgatcagcaaaggaacagagaaggccctgagcaagctgcacgagtacttccctgagatgcagatcctggccgtgtctggcaactactgcacagacaagaagccagctgccatcaactggattgagggccggggcaagtctgtggtgtgtgaggccgtcatcccagccaaggtggtgcgggaggtgctgaagaccaccacagaggccatgattgaggtgaacatcaacaagaacctggtgggcagcgccatggccggcagcattggaggctacaatgcccacgccgccaacatcgtgacagccatctacatcgcctgtggccaggatgctgcccagaatgtgggcagcagcaactgcatcaccctgatggaggccagcggccccaccaatgaagacctgtacatcagctgcaccatgcccagcattgaaattggaacagtgggcggcggcaccaacctgctgccccagcaggcctgcctgcagatgctgggcgtgcagggcgcctgcaaggacaaccctggagaaaatgcccggcagctggcccgcatcgtgtgtggcaccgtgatggccggggagctgagcctgatggccgccctggccgccggccacctggtgaagagccacatgatccacaacagaagcaagatcaacctgcaggacctgcagggcgcctgcaccaagaagacagcctag

SEQ ID NO: 49097 - DNA, 798 bp, Artificial Sequence
  derived and/or modified sequence
atgctgagccgcctcttcaggatgcacggcctgtttgtggccagccacccctgggaggtgattgtgggcaccgtgaccctgaccatctgcatgatgtccatgaacatgttcacagagggcacagagaaggccctgagcaagctgcacgagtacttccctgagatgcagatcctggccgtgtctggcaactactgcacagacaagaagccagctgccatcaactggattgagggccggggcaagtctgtggtgtgtgaggccgtcatcccagccaaggtggtgcgggaggtgctgaagaccaccacagaggccatgattgaggtgaacatcaacaagaacctggtgggcagcgccatggccggcagcattggaggctacaatgcccacgccgccaacatcgtgacagccatctacatcgcctgtggccaggatgctgcccagaatgtgggcagcagcaactgcatcaccctgatggaggccagcggccccaccaatgaagacctgtacatcagctgcaccatgcccagcattgaaattggaacagtgggcggcggcaccaacctgctgccccagcaggcctgcctgcagatgctgggcgtgcagggcgcctgcaaggacaaccctggagaaaatgcccggcagctggcccgcatcgtgtgtggcaccgtgatggccggggagctgagcctgatggccgccctggccgccggccacctggtgaagagccacatgatccacaacagaagcaagatcaacctgcaggacctgcagggcgcctgcaccaagaagacagcctag

SEQ ID NO: 49098 - DNA, 336 bp, Artificial Sequence
  derived and/or modified sequence
atgctgagccgcctcttcaggatgcacggcctgtttgtggccagccacccctgggaggtgattgtgggcaccgtgaccctgaccatctgcatgatgtccatgaacatgttcaccggcaacaacaagatctgtggctggaactatgaatgtcccaagtttgaagaagatgtgctgagcagtgacatcatcatcctgaccatcacccgctgcatcgccatcctgtacatctacttccagttccagaacctgcggcagctgggcagcaagtacatcctgggcattgctggcctcttcaccatcttcagcagctttgtgttcagcacagtggtgatctag

SEQ ID NO: 49099 - DNA, 2508 bp, Artificial Sequence
  derived and/or modified sequence
atgctgagccggctgttccggatgcacggcctgttcgtggccagccacccttgggaggtcatcgtggggaccgtaaccctcacaatttgcatgatgtcaatgaacatgtttaccggcaacaataaaatttgcggctggaattatgaatgtcctaaattcgaagaagacgtcctttcctcagatattatcatcttaactatcacacggtgtatcgccatactgtacatctactttcagtttcagaatttaaggcagctcggatccaaatacatcctcggaattgccggcctctttacaatatttagcagcttcgtgttcagcaccgtggtaattcatttcctggataaggaactaacaggcctgaatgaggccttgcccttctttctgcttttaatagatctaagtcgagccagtaccctggctaaattcgcactgtcatcaaatagtcaggacgaagtgagggagaatattgccagaggtatggctattctggggccaactttcacactcgacgccctggtggaatgcttagtaattggagttggcaccatgagtggtgtaaggcagcttgagatcatgtgttgcttcggttgtatgtctgtcttagcaaattattttgttttcatgacatttttccctgcctgtgtgtcactcgttctcgaactgagcagagagtcacgcgagggcaggcccatctggcagctatcccacttcgccagagtcttggaggaggaagaaaataaaccaaatcccgtgacacaacgcgtaaaaatgataatgagtctcgggctcgtgctggtccacgcccacagtagatggatcgcggatccaagccctcaaaactctaccgccgatacatccaaggtctctctcggcctcgatgagaacgtgagcaagagaatcgaaccatccgtttccctatggcagttctatctgtctaagatgatttcaatggacatcgagcaggtaataactctgagccttgccctcctgctggctgtcaaatacatcttcttcgagcagacggaaactgagtccacacttagcctcaagaaccccatcacctcgccagtcgtgacccagaagaaagtacctgataactgctgcagaagagagccaatgctggtcagaaacaatcaaaaatgtgactccgtggaagaggaaactgggattaaccgggaaagaaaagtcgaggtgatcaaaccgctcgtcgccgaaactgacacccctaatagagcaacttttgtggtcggcaacagttctcttctggatacctctagcgttcttgtcactcaggagcccgagatagaattacccagggagccgcggcctaatgaggaatgcctgcaaatattgggcaatgccgagaaaggggccaaatttcttagtgacgcggaaattattcagttagtgaacgcgaagcatattccagcctataagcttgaaaccctgatggagacccatgagcggggtgtttctattcgccgccagcttctgagcaaaaaattgagcgaacccagcagcctgcagtatcttccttatagagattataactacagcttgttgggcgggggagcgtcaagtagagtactggcggatggcatgacaagaggacccgtcgtcaggcttccccgcgcatgtgattcagcagaggtcaaagcatggctagagacgtccgagggatttgccgtgatcaaggaggcctttgactcaacctcccgctttgctagactccagaaactgcacaccagtatcgccggtcgcaatctgtatataagattccagtctcggtctggggacgctatggggatgaatatgatttctaagggcacagagaaagccctctcgaagttacacgaatacttcccagaaatgcagattctggccgtctccgggaactattgtacagataagaaacccgcagccataaactggatcgaaggccgtggaaagtcagtagtctgcgaggcagtgattccggccaaggtcgtacgtgaagtgttgaagaccactactgaggcaatgattgaagtgaacataaataagaatctggtcggtagcgctatggcgggctcaatcggcgggtataacgcgcatgccgccaacatcgtgactgcaatctacatagcctgcggccaggatgcggcacaaaacgtgggttcatcgaactgcataaccttgatggaagccagcggacccaccaacgaggatctatatatctcatgtaccatgccctccattgagattggcactgtcggaggcgggaccaatctgcttccacagcaagcatgcctgcagatgctcggggtccagggagcatgcaaggataacccaggggagaatgccaggcaactcgctagaatcgtctgtggcacagtaatggcaggcgagttgagtctaatggcggccctcgctgcaggccacctcgtgaaatcccacatgatacacaacagatctaaaatcaatctccaagatctccagggtgcttgtacaaagaaaaccgcctag

SEQ ID NO: 49100 - DNA, 798 bp, Artificial Sequence
  derived and/or modified sequence
atgctgagccggctgttccggatgcacggcctgttcgtggccagccatccgtgggaggtgatcgtcggtaccgtcacactcaccatctgcatgatgagcatgaatatgtttacagagggcaccgagaaagccctgagtaaactccacgaatattttccagagatgcagatcttggctgtgtcaggaaattactgtactgataaaaaacctgcggctattaactggatcgagggccggggtaagtcagttgtctgcgaagcggtgatccccgccaaagtagttcgggaagtactgaaaactacaaccgaggctatgatagaggttaacatcaacaagaacctggtgggatccgcaatggccggcagcattggaggttataacgcacatgccgcaaatatcgtaactgctatttatattgcgtgtggtcaggatgcagcgcaaaacgtgggatcttctaattgcatcacattgatggaagctagcgggccgactaatgaggatctctatatttcctgtacgatgcccagcatcgaaataggtacagtgggaggtggcactaatctgctccctcaacaggcatgtttgcaaatgctgggggtgcagggggcgtgtaaggataaccccggagagaacgctaggcagcttgctaggatagtgtgtgggaccgtgatggccggagaattgagtctgatggccgccctcgcggctgggcacttggtaaagagtcatatgatacacaaccgctcaaagatcaacctgcaagaccttcagggtgcctgcacaaaaaagacagcatag

SEQ ID NO: 49101 - DNA, 336 bp, Artificial Sequence
  derived and/or modified sequence
atgctgagccggctgttccggatgcacggcctgttcgtggccagccatccgtgggaagtgatcgtggggacagtaaccctcacaatctgtatgatgtcaatgaatatgttcaccgggaacaataagatatgcggctggaattatgagtgtccaaagtttgaggaggatgtgctcagttcagatatcatcatcttgacaatcacccgctgcatcgctattctgtatatatatttccaattccagaacctccgccagttaggttccaaatacatcctggggatcgcaggactgttcacaattttttcctcattcgtgttctctacagtcgttatatag

SEQ ID NO: 49102 - DNA, 2508 bp, Artificial Sequence
  derived and/or modified sequence
atgctgtctagactgttcagaatgcatggcctgtttgttgcctcccacccctgggaagtgattgtcggtacggttaccttaaccatctgcatgatgtccatgaacatgttcacaggcaacaataaaatctgtggctggaattatgagtgtccaaagtttgaggaagatgtcctgtccagcgatataatcattctgactattaccaggtgcatcgcaatcctgtatatttattttcagtttcagaatctgaggcagctggggtccaagtacattttagggattgccggtttgttcactatttttagcagctttgtgtttagtacagtcgtgatccacttcttggataaggagctcactggcctgaacgaggctctgcccttctttctcctcctgatcgacctgtcccgggcatccacattggccaaattcgcgcttagctccaattcccaggacgaggttcgcgaaaatattgccagaggaatggccatcctgggcccaacctttaccctggacgcccttgttgaatgcctggtgattggcgtcggcacaatgtcaggagttcggcagttagagatcatgtgttgcttcggctgcatgagtgtcctggcgaactacttcgttttcatgactttttttcccgcatgtgtcagtcttgtgctcgaactgtcccgggagagtcgcgagggcagacccatctggcagttaagtcacttcgccagagtcctcgaggaagaggaaaacaagcctaatcctgtcactcaaagggtcaagatgatcatgagtctgggactggtgctcgtgcacgcccactcaaggtggatcgcagatccctcacctcagaattctactgctgatacttctaaagtgtctcttggccttgatgaaaatgtgtccaaacgaatcgagccttccgtaagcctctggcagttctatctgtccaagatgatcagcatggacattgagcaggtcatcactctgagcctggcgctgttgctggccgttaaatacatctttttcgaacagacggagactgagagcacactgtcattaaaaaaccctatcacttccccagtggtgacacagaaaaaggtacctgataactgttgcagaagagagcccatgctggtccggaacaatcagaaatgtgattcggtggaggaggaaacaggcattaatcgcgagaggaaggtggaggttatcaagcctttggttgccgaaactgatactcctaatcgagcaactttcgtggtcggtaactcgtccctgctggacactagttcagtcctcgttacacaggagcccgaaattgagctcccacgagaacccaggcctaacgaagaatgtctccagatccttggaaacgccgagaagggcgctaaatttctgtcggacgctgaaatcattcagctggtaaacgccaagcatatccccgcatacaaactggagactcttatggaaacccacgagcgcggagtgagcattagaagacagttactgagtaaaaagttatccgaacccagctctctacagtacctcccctatagagactataattattcgctactcgggggtggggcatcttcacgcgttctggccgatggaatgactcggggacccgtggtgcggctgccacgcgcttgtgacagcgccgaagtgaaggcttggttggagacgtccgagggctttgcagttataaaagaggctttcgactccacctctaggtttgcccgattgcaaaaattgcacaccagcatagcaggacggaatctgtacatccgatttcagtcacgttcaggcgacgctatgggcatgaacatgatctccaagggaactgagaaggccctctccaagctccacgagtactttcccgagatgcaaatcctggctgtatccggcaattattgcaccgataagaaacccgctgcaatcaattggattgagggccgtggaaagtcagtggtctgcgaagcggtgattcccgcaaaggtagtgcgggaggttctcaaaaccacaaccgaggccatgattgaagtgaacatcaacaagaacctggttgggagcgccatggccggaagtattggaggctacaatgctcatgctgccaacatcgtgacagccatctacatcgcctgcgggcaagatgccgctcagaacgttgggagcagcaactgtattacgctgatggaagcctctggtccaaccaacgaggacctatacatatcatgcaccatgccctctatagagattggcacagtgggcggaggcaccaaccttttgccgcaacaggcctgcttgcaaatgctgggggtgcagggtgcctgcaaggacaatcccggtgagaacgcgcgacagctggctcgtattgtgtgtgggaccgtgatggcgggagaactgtctctaatggcagcactggccgcaggccacctagtgaaatcccatatgattcataatagatcgaagattaatcttcaggatctgcagggtgcatgtacgaagaagacagcttag

SEQ ID NO: 49103 - DNA, 798 bp, Artificial Sequence
  derived and/or modified sequence
atgctcagtagactcttccggatgcacggcttgtttgtcgcctcacacccctgggaggtcatagttggcaccgttacattgaccatatgtatgatgagtatgaacatgttcacagagggaacagagaaagccttgagcaaattacatgagtatttccctgagatgcagatcctcgccgttagtggaaactactgcaccgataagaaacccgcagcaataaattggatcgagggcagaggtaagtctgttgtatgtgaagcagtcatccctgctaaagtggtgcgagaggtgctgaaaacaactaccgaagccatgattgaggtgaatatcaacaaaaacctcgttggttcagcaatggctggttctatcggcggatacaacgcacatgcagcaaacatcgtcacagccatatacattgcctgcggccaggacgccgcacaaaatgtaggaagtagcaactgcatcactctcatggaggcgtcggggcctaccaacgaggacctctatatttcctgcaccatgccgtcaattgagatcggaacagtcggcggtggaacaaatctgctcccccagcaggcctgcctacaaatgctaggcgtgcagggcgcatgcaaagataatccaggagaaaatgcacgtcagttggctaggatcgtgtgtggcacagtaatggcgggagagctgagtctgatggcagccttggcggcagggcacctcgttaagtctcacatgattcataaccgtagcaagataaacctccaggatcttcagggtgcctgtacaaagaagacagcctag

SEQ ID NO: 49104 - DNA, 336 bp, Artificial Sequence
  derived and/or modified sequence
atgctgagtcggttgttcaggatgcatggactgtttgtcgcatctcacccgtgggaggttatcgtcgggacagttactctcacgatctgcatgatgagcatgaacatgttcaccgggaacaacaagatctgcggatggaactatgaatgcccaaaatttgaggaagatgtgctgagctccgacattatcatacttactataacgagatgcatcgcgattctttacatttattttcagttccagaatctccgtcaattgggctctaaatacatcctaggcattgcgggactgttcacgatcttttctagcttcgtatttagcacagtggtgatctag

SEQ ID NO: 49105 - DNA, 2508 bp, Artificial Sequence
  derived and/or modified sequence
atgctgagcagactgttcagaatgcacggcctgttcgtggccagccacccctgggaggtgatcgtgggcaccgtgaccctgaccatctgcatgatgagcatgaacatgttcaccggcaacaacaagatctgcggctggaactacgagtgccccaagttcgaggaggacgtgctgagcagcgacatcatcatcctgaccatcaccagatgcatcgccatcctgtacatctacttccagttccagaacctgagacagctgggcagcaagtacatcctgggcatcgccggcctgttcaccatcttcagcagcttcgtgttcagcaccgtggtgatccacttcctggacaaggagctgaccggcctgaacgaggccctgcccttcttcctgctgctgatcgacctgagcagagccagcaccctggccaagttcgccctgagcagcaacagccaggacgaggtgagagagaacatcgccagaggcatggccatcctgggccccaccttcaccctggacgccctggtggagtgcctggtgatcggcgtgggcaccatgagcggcgtgagacagctggagatcatgtgctgcttcggctgcatgagcgtgctggccaactacttcgtgttcatgaccttcttccccgcctgcgtgagcctggtgctggagctgagcagagagagcagagagggcagacccatctggcagctgagccacttcgccagagtgctggaggaggaggagaacaagcccaaccccgtgacccagagagtgaagatgatcatgagcctgggcctggtgctggtgcacgcccacagcagatggatcgccgaccccagcccccagaacagcaccgccgacaccagcaaggtgagcctgggcctggacgagaacgtgagcaagagaatcgagcccagcgtgagcctgtggcagttctacctgagcaagatgatcagcatggacatcgagcaggtgatcaccctgagcctggccctgctgctggccgtgaagtacatcttcttcgagcagaccgagaccgagagcaccctgagcctgaagaaccccatcaccagccccgtggtgacccagaagaaggtgcccgacaactgctgcagaagagagcccatgctggtgagaaacaaccagaagtgcgacagcgtggaggaggagaccggcatcaacagagagagaaaggtggaggtgatcaagcccctggtggccgagaccgacacccccaacagagccaccttcgtggtgggcaacagcagcctgctggacaccagcagcgtgctggtgacccaggagcccgagatcgagctgcccagagagcccagacccaacgaggagtgcctgcagatcctgggcaacgccgagaagggcgccaagttcctgagcgacgccgagatcatccagctggtgaacgccaagcacatccccgcctacaagctggagaccctgatggagacccacgagagaggcgtgagcatcagaagacagctgctgagcaagaagctgagcgagcccagcagcctgcagtacctgccctacagagactacaactacagcctgctgggcggcggcgccagcagcagagtgctggccgacggcatgaccagaggccccgtggtgagactgcccagagcctgcgacagcgccgaggtgaaggcctggctggagaccagcgagggcttcgccgtgatcaaggaggccttcgacagcaccagcagattcgccagactgcagaagctgcacaccagcatcgccggcagaaacctgtacatcagattccagagcagaagcggcgacgccatgggcatgaacatgatcagcaagggcaccgagaaggccctgagcaagctgcacgagtacttccccgagatgcagatcctggccgtgagcggcaactactgcaccgacaagaagcccgccgccatcaactggatcgagggcagaggcaagagcgtggtgtgcgaggccgtgatccccgccaaggtggtgagagaggtgctgaagaccaccaccgaggccatgatcgaggtgaacatcaacaagaacctggtgggcagcgccatggccggcagcatcggcggctacaacgcccacgccgccaacatcgtgaccgccatctacatcgcctgcggccaggacgccgcccagaacgtgggcagcagcaactgcatcaccctgatggaggccagcggccccaccaacgaggacctgtacatcagctgcaccatgcccagcatcgagatcggcaccgtgggcggcggcaccaacctgctgccccagcaggcctgcctgcagatgctgggcgtgcagggcgcctgcaaggacaaccccggcgagaacgccagacagctggccagaatcgtgtgcggcaccgtgatggccggcgagctgagcctgatggccgccctggccgccggccacctggtgaagagccacatgatccacaacagaagcaagatcaacctgcaggacctgcagggcgcctgcaccaagaagaccgcctag

SEQ ID NO: 49106 - DNA, 798 bp, Artificial Sequence
  derived and/or modified sequence
atgctgagcagactgttcagaatgcacggcctgttcgtggccagccacccctgggaggtgatcgtgggcaccgtgaccctgaccatctgcatgatgagcatgaacatgttcaccgagggcaccgagaaggccctgagcaagctgcacgagtacttccccgagatgcagatcctggccgtgagcggcaactactgcaccgacaagaagcccgccgccatcaactggatcgagggcagaggcaagagcgtggtgtgcgaggccgtgatccccgccaaggtggtgagagaggtgctgaagaccaccaccgaggccatgatcgaggtgaacatcaacaagaacctggtgggcagcgccatggccggcagcatcggcggctacaacgcccacgccgccaacatcgtgaccgccatctacatcgcctgcggccaggacgccgcccagaacgtgggcagcagcaactgcatcaccctgatggaggccagcggccccaccaacgaggacctgtacatcagctgcaccatgcccagcatcgagatcggcaccgtgggcggcggcaccaacctgctgccccagcaggcctgcctgcagatgctgggcgtgcagggcgcctgcaaggacaaccccggcgagaacgccagacagctggccagaatcgtgtgcggcaccgtgatggccggcgagctgagcctgatggccgccctggccgccggccacctggtgaagagccacatgatccacaacagaagcaagatcaacctgcaggacctgcagggcgcctgcaccaagaagaccgcctag

SEQ ID NO: 49107 - DNA, 336 bp, Artificial Sequence
  derived and/or modified sequence
atgctgagcagactgttcagaatgcacggcctgttcgtggccagccacccctgggaggtgatcgtgggcaccgtgaccctgaccatctgcatgatgagcatgaacatgttcaccggcaacaacaagatctgcggctggaactacgagtgccccaagttcgaggaggacgtgctgagcagcgacatcatcatcctgaccatcaccagatgcatcgccatcctgtacatctacttccagttccagaacctgagacagctgggcagcaagtacatcctgggcatcgccggcctgttcaccatcttcagcagcttcgtgttcagcaccgtggtgatctag

SEQ ID NO: 49108 - protein, 194 aa, Artificial Sequence
  derived and/or modified sequence
MEAGVKLGMRSIPIATACTIYHKFFCETNLDAYDPYLIAMSSIYLAGKVEEQHLRTRDIINVSNRYFNPSGEPLELDSRFWELRDSIVQCELLMLRVLRFQVSFQHPHKYLLHYLVSLQNWLNRHSWQRTPVAVTAWALLRDSYHGALCLRFQAQHIAVAVLYLALQVYGVEVPAEVEAEKPWWQIYTMDTEIP

SEQ ID NO: 49109 - protein, 226 aa, Artificial Sequence
  derived and/or modified sequence
MEAPEAAEGGLQRGARRAAGARSQGALPSGEVHHGGVKLGMRSIPIATACTIYHKFFCETNLDAYDPYLIAMSSIYLAGKVEEQHLRTRDIINVSNRYFNPSGEPLELDSRFWELRDSIVQCELLMLRVLRFQVSFQHPHKYLLHYLVSLQNWLNRHSWQRTPVAVTAWALLRDSYHGALCLRFQAQHIAVAVLYLALQVYGVEVPAEVEAEKPWWQIYTMDTEIP

SEQ ID NO: 49110 - DNA, 1162 bp, Artificial Sequence
  derived and/or modified sequence
gcgcgccggggccgcctctccttccgccggtgccgcggcgcctcatggaagccccggaggcggcggaggggggcctgcagcgcggggcccggagggcagccggcgcccgaagccagggtgcacttccgagtggcgaggttcatcatggaggcaggtgtcaagctagggatgcggtccattcccattgccactgcttgcaccatttaccataagttcttttgcgagaccaacctggacgcctatgacccttacctgattgccatgtcttcaatttacttggccggcaaagtggaagagcagcacctgcggactcgtgacatcatcaatgtgtccaacaggtactttaacccaagcggtgagcccctggaattggactcccgcttctgggaactccgggacagcatcgtgcagtgtgagcttctcatgctgagagttctgcgcttccaggtctccttccagcatccacacaagtacctgctccactacctggtttccctccagaactggctgaaccgccacagctggcagcggacccctgttgccgtcaccgcctgggccctgctgcgggacagctaccatggggcgctgtgcctccgcttccaggcccagcacatcgccgtggcggtgctctacctggccctgcaggtctacggagttgaggtgcccgccgaggtcgaggctgagaagccgtggtggcagatttataccatggacacagagatcccctaaggtcctggcccaggcctgcccaaagagaagcccaggatggtcggctgcctggggacattgtcaccacgtcgccatgacggctggtccccacaggaccagctgggaggactggttgtgctgctggagaagggctggagaaggcaatggcatgctgccgctttgccagtccctagaagtcgcggtgcaggtgatggtgggagccgcgcctccagcgggcaggccgggagtgtactgtgtgcagctgacccaaggcagccacatctgcgtttgtcctttgagaggactttgactacaatacaggcatgacatcaatgaaaggaaagtcatgaaatcgatgagactgaatccctacggatttcttaaaagccagatttgtagggagaatgaatgtgcaacgtggctgaaatctattttgtgtaataaaaggtgatac

SEQ ID NO: 49111 - DNA, 1158 bp, Artificial Sequence
  derived and/or modified sequence
gcgcgccggggccgcctctccttccgccggtgccgcggcgcctcatggaagccccggaggcggcggaggggggcctgcagcgcggggcccggagggcagccggcgcccgaagccagggtgcacttccgagtggcgaggttcatcatggaggtgtcaagctagggatgcggtccattcccattgccactgcttgcaccatttaccataagttcttttgcgagaccaacctggacgcctatgacccttacctgattgccatgtcttcaatttacttggccggcaaagtggaagagcagcacctgcggactcgtgacatcatcaatgtgtccaacaggtactttaacccaagcggtgagcccctggaattggactcccgcttctgggaactccgggacagcatcgtgcagtgtgagcttctcatgctgagagttctgcgcttccaggtctccttccagcatccacacaagtacctgctccactacctggtttccctccagaactggctgaaccgccacagctggcagcggacccctgttgccgtcaccgcctgggccctgctgcgggacagctaccatggggcgctgtgcctccgcttccaggcccagcacatcgccgtggcggtgctctacctggccctgcaggtctacggagttgaggtgcccgccgaggtcgaggctgagaagccgtggtggcagatttataccatggacacagagatcccctaaggtcctggcccaggcctgcccaaagagaagcccaggatggtcggctgcctggggacattgtcaccacgtcgccatgacggctggtccccacaggaccagctgggaggactggttgtgctgctggagaagggctggagaaggcaatggcatgctgccgctttgccagtccctagaagtcgcggtgcaggtgatggtgggagccgcgcctccagcgggcaggccgggagtgtactgtgtgcagctgacccaaggcagccacatctgcgtttgtcctttgagaggactttgactacaatacaggcatgacatcaatgaaaggaaagtcatgaaatcgatgagactgaatccctacggatttcttaaaagccagatttgtagggagaatgaatgtgcaacgtggctgaaatctattttgtgtaataaaaggtgatac

SEQ ID NO: 49112 - DNA, 585 bp, Artificial Sequence
  derived and/or modified sequence
atggaggcgggggtcaaactgggaatgaggagtatccccatcgcgactgcttgtactatttaccacaagtttttttgcgaaaccaatctcgacgcctatgacccctatctgattgccatgagcagcatctatctagctggaaaagtggaggagcagcacctgcggactcgtgacatcatcaacgtttctaatcgctatttcaacccaagcggggaacccttggaactggatagtagattctgggaactccgcgactcaattgtacagtgcgagctgctgatgctgagggtcctgcgtttccaggtgtcctttcagcatccacacaagtacctgctgcactacctggtatcattgcaaaattggctgaataggcacagctggcagagaactcccgtggctgttaccgcttgggcactgttgcgggatagctatcacggggctctctgcctccgatttcaggcacaacatatcgctgttgcagttttgtatttggctttacaggtgtatggggtggaggttccagcagaggtcgaagccgagaaaccttggtggcaaatctacacaatggacactgaaatcccctag

SEQ ID NO: 49113 - DNA, 681 bp, Artificial Sequence
  derived and/or modified sequence
atggaagcccctgaagcagcagagggaggcttacagaggggcgccagaagagccgccggtgcccggtcacagggcgcactgccaagtggcgaggtgcatcatgggggtgtcaagctggggatgcggtccatccccatcgccactgcatgtacgatataccacaaatttttctgcgagacgaacttggatgcgtacgacccatacttgatcgctatgtctagcatctaccttgctggtaaagtagaggagcagcacctccgaacccgtgacattataaatgtgtcaaacaggtatttcaatccatctggagagcctctcgaactcgattcccgcttttgggaacttcgggactccatcgtgcagtgcgaattgctgatgcttcgggtgcttagatttcaggtgtccttccagcaccctcacaagtacctgctgcattatttagtctcgctgcagaattggcttaacaggcattcgtggcagcggacccccgtggccgtgactgcgtgggctctcttacgagacagctatcacggcgctctctgcctgagattccaagcccagcatatcgcagtcgcagtcctgtatctggctttacaggtgtacggtgtcgaggtgcctgctgaggtggaagccgaaaagccctggtggcagatttataccatggatacagagatcccttag

SEQ ID NO: 49114 - DNA, 585 bp, Artificial Sequence
  derived and/or modified sequence
atggaggccggcgtgaagctgggcatgaggagcatccccatcgccacagcctgcaccatctaccacaagttcttctgtgagaccaacctggatgcctatgacccctacctgattgccatgagcagcatctacctggccggcaaggtggaggagcagcacctgcggacccgggacatcatcaacgtgagcaaccgctacttcaaccccagcggggagcccctggagctggacagccgcttctgggagctgcgggacagcatcgtgcagtgtgagctgctgatgctgcgggtgctgcgcttccaggtgtccttccagcacccccacaagtacctgctgcactacctggtgtccctgcagaactggctgaacagacacagctggcagaggacccctgtggccgtgacagcctgggccctgctgcgggacagctaccatggagccctgtgcctgcgcttccaggcccagcacatcgctgtggccgtgctgtacctggccctgcaggtgtatggagtggaggtgcctgctgaggtggaggccgagaagccctggtggcagatctacaccatggacacagagatcccctag

SEQ ID NO: 49115 - DNA, 681 bp, Artificial Sequence
  derived and/or modified sequence
atggaggcccctgaggccgctgagggcggcctgcagagaggagcccggcgggctgctggggcccggagccagggcgccctgcccagcggggaggtgcaccacggcggcgtgaagctgggcatgaggagcatccccatcgccacagcctgcaccatctaccacaagttcttctgtgagaccaacctggatgcctatgacccctacctgattgccatgagcagcatctacctggccggcaaggtggaggagcagcacctgcggacccgggacatcatcaacgtgagcaaccgctacttcaaccccagcggggagcccctggagctggacagccgcttctgggagctgcgggacagcatcgtgcagtgtgagctgctgatgctgcgggtgctgcgcttccaggtgtccttccagcacccccacaagtacctgctgcactacctggtgtccctgcagaactggctgaacagacacagctggcagaggacccctgtggccgtgacagcctgggccctgctgcgggacagctaccatggagccctgtgcctgcgcttccaggcccagcacatcgctgtggccgtgctgtacctggccctgcaggtgtatggagtggaggtgcctgctgaggtggaggccgagaagccctggtggcagatctacaccatggacacagagatcccctag

SEQ ID NO: 49116 - DNA, 585 bp, Artificial Sequence
  derived and/or modified sequence
atggaggccggcgtgaagctgggcatgcggagcatccccatcgccaccgcctgtacaatctatcataaattcttttgcgagacaaacctggatgcatatgacccatatctgattgccatgtccagtatttacctggcaggcaaggttgaagagcagcaccttcgtacacgcgacatcattaacgtgtctaatagatacttcaatccttcgggcgaacctctggaattggatagccgcttttgggagctgcgcgactccattgtgcagtgtgaactgctgatgctgagggtccttcggtttcaggtgtctttccagcacccacacaaatacctgctgcactatctcgtttcactgcaaaattggttaaataggcatagctggcagagaactcctgtggcggtgacagcttgggcgttgctcagggactcttatcacggtgcgctgtgcttaaggtttcaagctcagcacatcgccgtggcagtgctctacctggccttgcaggtgtatggcgtcgaagttcccgcagaagtcgaagccgaaaagccctggtggcagatctacacaatggataccgaaattccctag

SEQ ID NO: 49117 - DNA, 681 bp, Artificial Sequence
  derived and/or modified sequence
atggaggcccccgaggccgccgagggcggcctgcagcggggcgccagaagggccgctggcgcgagaagtcagggggcattacctagcggcgaggtccaccatggaggcgtcaagctgggaatgcggagcattccaatagctactgcatgtaccatctatcacaagttcttttgtgaaaccaatctggacgcatacgacccctacttgattgctatgagttccatctatttagcaggaaaagtggaggagcagcatcttcggactagagacattatcaacgtctccaatcgatattttaatccctcaggtgagcccctggagctcgactcacgtttttgggagctccgcgacagcattgtgcagtgtgaactgcttatgctgagggttttgcgatttcaggtaagtttccagcatcctcataagtatcttctgcactatctagtttcgctgcagaattggctgaatcgtcattcatggcagcgaacccctgtggccgtcaccgcttgggccttgctgcgagactcctaccatggtgccctgtgcctgcgcttccaagcccagcacatcgctgtcgctgtcttgtatttagcattgcaggtctacggggtcgaggttcctgctgaagtggaggccgagaagccctggtggcaaatctacaccatggataccgagataccatag

SEQ ID NO: 49118 - DNA, 585 bp, Artificial Sequence
  derived and/or modified sequence
atggaagccggtgtgaaactcgggatgaggtctatacctatcgccactgcttgtactatctaccacaagttcttctgcgagacaaatctggacgcctatgatccatacctgatcgcaatgtctagcatatacctggcaggtaaggtagaagaacagcacttaagaaccagggatattatcaatgtttcgaacaggtactttaatccaagcggtgaacccctagaactagacagccgcttctgggaacttagggacagcatagttcaatgcgagcttctcatgctgagagtgctgaggtttcaggtttcgttccagcaccctcacaagtacctgctgcattacctggtttcactgcagaactggctgaaccgccactcgtggcaacggactccagtggctgtcaccgcctgggccctgctccgcgattcttaccatggagccttatgcctcagattccaagcccaacatatcgctgtcgctgtgctgtatctggcactgcaggtatatggagttgaggtgcctgccgaggtggaggcagaaaagccttggtggcagatttatacaatggatacagaaatcccctag

SEQ ID NO: 49119 - DNA, 681 bp, Artificial Sequence
  derived and/or modified sequence
atggaagctccggaggctgcggagggtggactgcagcgcggagctagacgcgctgccggagcccgatcccaaggcgcacttccatcaggtgaggtgcatcatggaggggtaaagcttggtatgagatctataccaattgctactgcctgcacaatctaccataagttcttctgtgagacaaacctcgacgcttatgacccttacctcattgccatgagctccatttatctggccggtaaggtcgaggaacagcacctccggacccgtgacatcattaacgtgagcaacagatactttaatccaagtggggagccactggagctggactctagattttgggaactccgggattctatagtgcagtgcgagctcttgatgctcagagtgctcaggtttcaagttagttttcagcatcctcataagtatctgcttcactatctggtctctttgcagaactggctgaataggcactcttggcagcgtacacctgtggccgtgacagcctgggctcttctccgcgactcctatcacggggctctgtgtctgcgttttcaggcccaacacatcgccgtggcagttctgtacttggctctgcaggtctatggcgtcgaagtcccagctgaagttgaagccgagaagccctggtggcagatatacaccatggatacagaaataccttag

SEQ ID NO: 49120 - DNA, 585 bp, Artificial Sequence
  derived and/or modified sequence
atggaggccggcgtgaagctgggcatgagaagcatccccatcgccaccgcctgcaccatctaccacaagttcttctgcgagaccaacctggacgcctacgacccctacctgatcgccatgagcagcatctacctggccggcaaggtggaggagcagcacctgagaaccagagacatcatcaacgtgagcaacagatacttcaaccccagcggcgagcccctggagctggacagcagattctgggagctgagagacagcatcgtgcagtgcgagctgctgatgctgagagtgctgagattccaggtgagcttccagcacccccacaagtacctgctgcactacctggtgagcctgcagaactggctgaacagacacagctggcagagaacccccgtggccgtgaccgcctgggccctgctgagagacagctaccacggcgccctgtgcctgagattccaggcccagcacatcgccgtggccgtgctgtacctggccctgcaggtgtacggcgtggaggtgcccgccgaggtggaggccgagaagccctggtggcagatctacaccatggacaccgagatcccctag

SEQ ID NO: 49121 - DNA, 681 bp, Artificial Sequence
  derived and/or modified sequence
atggaggcccccgaggccgccgagggcggcctgcagagaggcgccagaagagccgccggcgccagaagccagggcgccctgcccagcggcgaggtgcaccacggcggcgtgaagctgggcatgagaagcatccccatcgccaccgcctgcaccatctaccacaagttcttctgcgagaccaacctggacgcctacgacccctacctgatcgccatgagcagcatctacctggccggcaaggtggaggagcagcacctgagaaccagagacatcatcaacgtgagcaacagatacttcaaccccagcggcgagcccctggagctggacagcagattctgggagctgagagacagcatcgtgcagtgcgagctgctgatgctgagagtgctgagattccaggtgagcttccagcacccccacaagtacctgctgcactacctggtgagcctgcagaactggctgaacagacacagctggcagagaacccccgtggccgtgaccgcctgggccctgctgagagacagctaccacggcgccctgtgcctgagattccaggcccagcacatcgccgtggccgtgctgtacctggccctgcaggtgtacggcgtggaggtgcccgccgaggtggaggccgagaagccctggtggcagatctacaccatggacaccgagatcccctag

SEQ ID NO: 49122 - protein, 38 aa, Artificial Sequence
  derived and/or modified sequence
MGRKKIQITRIMDERNRQVTFTKRKFGLMKKAYELSVL

SEQ ID NO: 49123 - protein, 463 aa, Artificial Sequence
  derived and/or modified sequence
MGRKKIQITRIMDERNRQVTFTKRKFGLMKKAYELSVLCDCEIALIIFNSTNKLFQYASTDMDKVLLKYTEYNEPHESRTNSDIVEALNKKENKGCESPDPDSSYALTPRTEEKYKKINEEFDNMIKSHKIPAVPPPNFEMPVSIPVSSHNSLVYSNPVSSLGNPNLLPLAHPSLQRNSMSPGVTHRPPSAGNTGGLMGGDLTSGAGTSAGNGYGNPRNSPGLLVSPGNLNKNMQAKSPPPMNLGMNNRKPDLRVLIPPGSKNTMPSVNQRINNSQSAQSLATPVVSVATPTLPGQGMGGYPSAISTTYGTEYSLSSADLSSLSGFNTASALHLGSVTGWQQQHLHNMPPSALSQLGACTSTHLSQSSNLSLPSTQSLNIKSEPVSPPRDRTTTPSRYPQHTRHEAGRSPVDSLSSCSSSYDGSDREDHRNEFHSPIGLTRPSPDERESPSVKRMRLSEGWAT

SEQ ID NO: 49124 - protein, 28 aa, Artificial Sequence
  derived and/or modified sequence
MGRKKIQITRIMDERNRQVTFTKRKFGL

SEQ ID NO: 49125 - DNA, 6194 bp, Artificial Sequence
  derived and/or modified sequence
aagggggcaaagcctcggtcttcatagaaaaggagaggaggcaaacgcagcccaaactggggggtttctcttcaaagccagctggtctggctttattctgcaggaatttttttacctgtcagggtttggacaacaaagccctcagcaggtgctgacgggtacaacttcctggagaagcagaaaggcactggtgccaaagaagagttgcaaactgtgaagtaacttctatgaagagatgaagtaaagaacggaaggcaaatgattgtggcagtaaagaagtgtatgtgcaggaacgaatgcaggaatttgggaactgagctgtgcaagtgctgaagaaggagatttgtttggaggaaacaggaaagagaaagaaaaggaaggaaaaaatacataatttcagggacgagagagagaagaaaaacggggactatggggagaaaaaagattcagattacgaggattatggatgaacgtaacagacaggtgacatttacaaagaggaaatttgggttgatgaagaaggcttatgagctgagcgtgctgtgtgactgtgagattgcgctgatcatcttcaacagcaccaacaagctgttccagtatgccagcaccgacatggacaaagtgcttctcaagtacacggagtacaacgagccgcatgagagccggacaaactcagacatcgtggaggcattgaacaagaaagaaaacaaaggctgtgaaagccccgatcccgactcctcttatgcactcaccccacgcactgaagaaaaatacaaaaaaattaatgaagaatttgataatatgatcaagagtcataaaattcctgctgttccacctcccaacttcgagatgccagtctccatcccagtgtccagccacaacagtttggtgtacagcaaccctgtcagctcactgggaaaccccaacctattgccactggctcacccttctctgcagaggaatagtatgtctcctggtgtaacacatcgacctccaagtgcaggtaacacaggtggtctgatgggtggagacctcacgtctggtgcaggcaccagtgcagggaacgggtatggcaatccccgaaactcaccaggtctgctggtctcacctggtaacttgaacaagaatatgcaagcaaaatctcctcccccaatgaatttaggaatgaataaccgtaaaccagatctccgagttcttattccaccaggcagcaagaatacgatgccatcagtgaatcaaaggataaataactcccagtcggctcagtcattggctaccccagtggtttccgtagcaactcctactttaccaggacaaggaatgggaggatatccatcagccatttcaacaacatatggtaccgagtactctctgagtagtgcagacctgtcatctctgtctgggtttaacaccgccagcgctcttcaccttggttcagtaactggctggcaacagcaacacctacataacatgccaccatctgccctcagtcagttgggagcttgcactagcactcatttatctcagagttcaaatctctccctgccttctactcaaagcctcaacatcaagtcagaacctgtttctcctcctagagaccgtaccaccaccccttcgagatacccacaacacacgcgccacgaggcggggagatctcctgttgacagcttgagcagctgtagcagttcgtacgacgggagcgaccgagaggatcaccggaacgaattccactcccccattggactcaccagaccttcgccggacgaaagggaaagtccctcagtcaagcgcatgcgactttctgaaggatgggcaacatgatcagattattacttactagtttttttttttttcttgcagtgtgtgtgtgtgctataccttaatggggaaggggggtcgatatgcattatatgtgccgtgtgtggaaaaaaaaaaagtcaggtactctgttttgtaaaagtacttttaaattgcctcagtgatacagtataaagataaacagaaatgctgagataagcttagcacttgagttgtacaacagaacacttgtacaaaatagattttaaggctaacttcttttcactgttgtgctcctttgcaaaatgtatgttacaatagatagtgtcatgttgcaggttcaacgttatttacatgtaaatagacaaaaggaaacatttgccaaaagcggcagatctttactgaaagagagagcagctgttatgcaacatatagaaaaatgtatagatgcttggacagacccggtaatgggtggccattggtaaatgttaggaacacaccaggtcacctgacatcccaagaatgctcacaaacctgcaggcatatcattggcgtatggcactcattaaaaaggatcagagaccattaaaagaggaccatacctattaaaaaaaaatgtggagttggagggctaacatatttaattaaataaataaataaatctgggtctgcatctcttattaaataaaaatataaaaatatgtacattacattttgcttattttcatataaaaggtaagacagagtttgcaaagcatttgtggctttttgtagtttacttaagccaaaatgtgtttttttccccttgatagcttcgctaatattttaaacagtcctgtaaaaaaccaaaaaggactttttgtatagaaagcactaccctaagccatgaagaactccatgctttgctaaccaagataactgttttctctttgtagaagttttgtttttgaaatgtgtatttctaattatataaaatattaagaatcttttaaaaaaatctgtgaaattaacatgcttgtgtatagctttctaatatatataatattatggtaatagcagaagttttgttatcttaatagcgggaggggggtatatttgtgcagttgcacatttgagtaactattttctttctgttttcttttactctgcttacattttataagtttaaggtcagctgtcaaaaggataacctgtggggttagaacatatcacattgcaacaccctaaattgtttttaatacattagcaatctattgggtcaactgacatccattgtatatactagtttctttcatgctatttttattttgttttttgcatttttatcaaatgcagggcccctttctgatctcaccatttcaccatgcatcttggaattcagtaagtgcatatcctaacttgcccatattctaaatcatctggttggttttcagcctagaatttgatacgctttttagaaatatgcccagaatagaaaagctatgttggggcacatgtcctgcaaatatggccctagaaacaagtgatatggaatttacttggtgaataagttataaattcccacagaagaaaaatgtgaaagactgggtgctagacaagaaggaagcaggtaaagggatagttgctttgtcatccgtttttaattattttaactgacccttgacaatcttgtcagcaatataggactgttgaacaatcccggtgtgtcaggacccccaaatgtcacttctgcataaagcatgtatgtcatctattttttcttcaataaagagatttaatagccatttcaagaaatcccataaagaacctctctatgtccctttttttaatttaaaaaaaatgactcttgtctaatattcgtctataagggattaattttcagaccctttaataagtgagtgccataagaaagtcaatatatattgtttaaaagatatttcagtctaggaaagattttccttctcttggaatgtgaagatctgtcgattcatctccaatcatatgcattgacatacacagcaaagaagatataggcagtaatatcaacactgctatatcatgtgtaggacatttcttatccattttttctcttttacttgcatagttgctatgtgtttctcattgtaaaaggctgccgctgggtggcagaagccaagagaccttattaactaggctatatttttcttaacttgatctgaaatccacaattagaccacaatgcacctttggttgtatccataaaggatgctagcctgccttgtactaatgttttatatattaaaaaaaaaaaatctatcaaccatttcatatatatcccactactcaaggtatccatggaacatgaaagaataacatttatgcagaggaaaaacaaaaacatccctgaaaatatacacactcatacacacacacgcacaggggaataaaataagaaaatcattttcctcaccatagacttgatcccatccttacaacccatccttctaacttgatgtgtataaaatatgcaaacatttcacaaatgttctttgtcatttcaaaatactttagtatatcaatatcagtagataccagtgggtgggaaagggtcattacatgaaaatatgaagaaatagccatattagttttttaacctgcaatttgcctcagcaacaaagaaaaagtgaatttttaatgctgaagataaagtaagctaaagtaccagcagaagccttggctatttatagcagttctgacaatagttttataagaacatgaagagaacagaatcacttgaaaatggatgccagtcatctcttgttcccactactgaattcttataaagtggtggcaagatagggaagggataatctgagaatttttaaaagatgatttaatgagaagaagcacaattttgattttgatgagtcactttctgtaaacaatcttggtctatctttacccttataccttatctgtaatttaccatttattgtatttgcaaagctagtatggtttttaatcacagtaaatcctttgtattccagactttagggcagagccctgagggagtattattttacataacccgtcctagagtaacattttaggcaacattcttcattgcaagtaaaagatccataagtggcattttacacggctgcgagtattgttatatctaatcctattttaaaagatttttggtaatatgaagcttgaatactggtaacagtgatgcaatatacgcaagctgcacaacctgtatattgtatgcattgctgcgtggaggctgtttatttcaacctttttaaaaattgtgttttttagtaaaatggcttattttttcccaaaggtggaatttagcattttgtaatgatgaatataaaaatacctgtcatccccagatcatttaaaagttaactaaagtgagaatgaaaaaacaaaattccaagacactttttaaaagaatgtctgccctcacacacttttatggatttgtttttcttacatacccatcttttaacttagagatagcattttttgccctctttattttgttgtttgtttctccagagagtaaacgctttgtagttctttctttaaaaaacattttttttaaagaagaagaagccacttgaaccctcaataaaggctgttgcctaagcatggcatacttcatctgttctcatttgtgccatctgccgtgatgtcgtcacttttatggcgttaatttcctgccactacagatcttttgaagattgctggaatactggtgtctgttagaatgcttcagactacagatgtaattaaaggcttttcttaatatgttttaaccaaagatgtggagcaatccaagccacatatcttctacatcaaatttttccattttggttattttcataatctggtattgcattttgccttccctgttcatacctcaaattgattcatacctcagtttaattcagagaggtcagttaagtgacggattctgttgtggtttgaatgcagtaccagtgttctcttcgagcaaagtagacctgggtcactgtaggcataggacttggattgcttcagatggtttgctgtatcatttttcttctttttcttttcctggggacttgtttccattaaatgagagtaattaaaatcgcttgtaaatgagggcatacaagcatttgcaacaaatattcaaatagaggctcacagcggcataagctggactttgtcgccactagatgacaagatgttataactaagttaaaccacatctgtgtatctcaagggacttaattcagctgtctgtagtgaataaaagtgggaaattttcaaaagtttctcctgctggaaataaggtataatttgtattttgcagacaattcagtaaagttactggctttcttagtgaaaaaaaaaaa

SEQ ID NO: 49126 - DNA, 1392 bp, Artificial Sequence
  derived and/or modified sequence
atggggcggaagaaaattcagattacccgcatcatggatgaaagaaacaggcaggtgacgttcactaaacggaaatttggtttaatgaagaaagcctatgagctcagcgtactgtgcgactgcgaaatagccctgataattttcaatagtacgaacaagctgttccagtacgcctccaccgacatggacaaggtacttctcaagtacactgaatataatgagccgcacgagagcagaacaaatagtgacatcgtcgaggccttgaataaaaaagagaacaaaggctgtgagagtcctgatccagacagttcctacgcactgacccccagaacggaagagaaatacaaaaaaattaatgaggagttcgacaatatgatcaaatcccataagattcctgctgttccacccccgaacttcgagatgccagtgtctatccccgttagctctcataactccctcgtctattccaatccggtgagttcattggggaacccaaacctgttgcccttagctcacccatcgctgcagcggaattcaatgagtcccggcgtgactcacaggcctcccagcgccggaaatacaggggggcttatggggggcgatcttaccagcggcgccggaacttcagcgggcaatgggtatgggaacccacggaattctcctggtcttttggtgtcccctggcaacctaaataaaaatatgcaagcaaaatcaccacctccaatgaaccttggtatgaataatagaaagccggacctgcgcgtactcatccccccaggatcgaaaaatacaatgccatctgtgaaccagaggattaataattcccagtcagcccaaagcctggcaaccccagtggtcagcgtggcaaccccaacgctcccggggcagggtatgggcggctacccgagcgcgatatcgactacttacggtaccgaatacagcctgagctccgcagatctgtctagcctcagcgggtttaacactgcctccgcattgcacctggggtccgtcactggatggcaacagcagcacctgcataacatgcctccgtccgctttgagccagctgggagcctgcactagtactcaccttagccaatcatctaatcttagtttaccctctacacagtctctaaacatcaaatccgagccagtcagccctccacgggaccggacaaccacaccatctcggtaccctcagcatactcgtcacgaggcaggtcgctccccggtggatagcctttcgtcttgttcttcctcttacgatgggtctgaccgggaggatcacaggaacgagtttcacagccctataggactgacccgtccgagtcccgatgagcgcgaatcacccagcgtgaagcggatgcggctgagtgagggatgggcaacatag

SEQ ID NO: 49127 - DNA, 1392 bp, Artificial Sequence
  derived and/or modified sequence
atgggcaggaagaagatccagatcacccgcatcatggatgaaagaaaccggcaggtgaccttcaccaagaggaagtttggcctgatgaagaaggcctatgagctgtctgtgctgtgtgactgtgaaattgccctgatcatcttcaacagcaccaacaagctgttccagtatgccagcacagacatggacaaggtgctgctgaagtacacagagtacaatgagccccatgagagcaggaccaacagcgacatcgtggaggccctgaacaagaaggagaacaagggctgtgagagcccagaccctgacagcagctatgccctgacccccaggacagaggagaagtacaagaagatcaatgaggagtttgacaacatgatcaagagccacaagatcccagctgtgcccccacccaactttgagatgcctgtgtccatccctgtgagcagccacaacagcctggtgtacagcaaccctgtgagcagcctgggcaaccccaacctgctgcccctggcccaccccagcctgcagagaaattccatgagccctggggtgacccaccggccccccagcgctggcaacacaggaggcctgatgggcggggacctgaccagcggggccggcaccagcgctggaaatggctacggcaaccccaggaacagccctggcctgctggtgtccccaggcaacctgaacaagaacatgcaggccaagagccccccacccatgaacctgggcatgaacaacaggaagccagacctgcgggtgctgatccccccaggcagcaagaacaccatgcccagcgtgaaccagaggatcaacaacagccagagcgcccagagcctggccacccctgtggtgtctgtggccacccccaccctgcccggccagggcatgggcggctaccccagcgccatcagcaccacctatggaacagagtacagcctgagcagcgctgacctgagcagcctgagcggcttcaacacagccagcgccctgcacctgggctctgtgacaggctggcagcagcagcacctgcacaacatgcctccttctgccctgagccagctgggcgcctgcaccagcacccacctgagccagagcagcaacctgagcctgcccagcacccagagcctgaacatcaagtctgagcctgtgtccccaccccgggacaggaccaccacccccagccgctacccccagcacaccaggcatgaggccggccgcagccctgtggacagcctgagcagctgcagcagcagctatgatggcagtgaccgggaggaccacagaaatgagttccacagccccatcggcctgacccggcccagcccagatgagcgggagagccccagcgtgaagaggatgaggctgtctgagggctgggccacctag

SEQ ID NO: 49128 - DNA, 6203 bp, Artificial Sequence
  derived and/or modified sequence
aagggggcaaagcctcggtcttcatagaaaaggagaggaggcaaacgcagcccaaactggggggtttctcttcaaagccagctggtctggctttattctgcaggaatttttttacctgtcagggtttggacaacaaagccctcagcaggtgctgacgggtacaacttcctggagaagcagaaaggcactggtgccaaagaagagttgcaaactgtgaagtaacttctatgaagagatgaagtaaagaacggaaggcaaatgattgtggcagtaaagaagtgtatgtgcaggaacgaatgcaggaatttgggaactgagctgtgcaagtgctgaagaaggagatttgtttggaggaaacaggaaagagaaagaaaaggaaggaaaaaatacataatttcagggacgagagagagaagaaaaacggggactatggggagaaaaaagattcagattacgaggattatggatgaacgtaacagacaggtgacatttacaaagaggaaatttgggttgatgaagaaggcttatgagctgagcgtgctgtgtgactgtgagattgcgctgatcatcttcaacagcaccaacaagctgttccagtatgccagcaccgacatggacaaagtgcttctcaagtacacggagtacaacgagccgcatgagagccggacaaactcagacatcgtggaggcattgaacaagaaagaaaacaaaggctgtgaaagccccgatcccgactcctcttatgcactcaccccacgcactgaagaaaaatacaaaaaaattaatgaagaatttgataatatgatcaagagtcataaaattcctgctgttccacctcccaacttcgagatgccagtctccatcccagtgtccagccacaacagtttggtgtacagcaaccctgtcagctcactgggaaaccccaacctattgccactggctcacccttctctgcagaggaatagtatgtctcctggtgtaacacatcgacctccaagtgcaggtaacacaggtggtctgatgggtggagacctcacgtctggtgcaggcaccagtgcagggaacgggtatggcaatccccgaaactcaccaggtctgctggtctcacctggtaacttgaacaagaatatgcaagcaaaatctcctcccccaatgaatttaggaatgaataaccgtaaaccagatctccgagttcttattccaccaggcagcaagaatacgatgccatcagtgaatcaaaggataaataactcccagtcggctcagtcattggctaccccagtggtttccgtagcaactcctactttaccaggacaaggaatgggaggatatccatcagccatttcaacaacatatggtaccgagtactctctgagtagtgcagacctgtcatctctgtctgggtttaacaccgccagcgctcttcaccttggttcagtaactggctggcaacagcaacacctacataacatgccaccatctgccctcagtcagttgggagcttgcactagcactcatttatctcagagttcaaatctctccctgccttctactcaaagcctcaacatcaagtcagaacctgtttctcctcctagagaccgtaccaccaccccttcgagatacccacaacacacgcgccacgaggcggggagatctcctgttgacagcttgagcagctgtagcagttcgtacgacgggagcgaccgagaggatcaccggaacgaattccactcccccattggactcaccagaccttcgccggacgaaagggaaagtccctcagtcaagcgcatgcgactttctgaaggatgggcaacatgatcagattattacttactagtttttttttttttcttgcagtgtgtgtgtgtgctataccttaatggggaaggggggtcgatatgcattatatgtgccgtgtgtggaaaaaaaaaaagtcaggtactctgttttgtaaaagtacttttaaattgcctcagtgatacagtataaagataaacagaaatgctgagataagcttagcacttgagttgtacaacagaacacttgtacaaaatagattttaaggctaacttcttttcactgttgtgctcctttgcaaaatgtatgttacaatagatagtgtcatgttgcaggttcaacgttatttacatgtaaatagacaaaaggaaacatttgccaaaagcggcagatctttactgaaagagagagcagctgttatgcaacatatagaaaaatgtatagatgcttggacagacccggtaatgggtggccattggtaaatgttaggaacacaccaggtcacctgacatcccaagaatgctcacaaacctgcaggcatatcattggcgtatggcactcattaaaaaggatcagagaccattaaaagaggaccatacctattaaaaaaaaatgtggagttggagggctaacatatttaattaaataaataaataaatctgggtctgcatctcttattaaataaaaatataaaaatatgtacattacattttgcttattttcatataaaaggtaagacagagtttgcaaagcatttgtggctttttgtagtttacttaagccaaaatgtgtttttttccccttgatagcttcgctaatattttaaacagtcctgtaaaaaaccaaaaaggactttttgtatagaaagcactaccctaagccatgaagaactccatgctttgctaaccaagataactgttttctctttgtagaagttttgtttttgaaatgtgtatttctaattatataaaatattaagaatcttttaaaaaaatctgtgaaattaacatgcttgtgtatagctttctaatatatataatattatggtaatagcagaagttttgttatcttaatagcgggaggggggtatatttgtgcagttgcacatttgagtaactattttctttctgttttcttttactctgcttacattttataagtttaaggtcagctgtcaaaaggataacctgtggggttagaacatatcacattgcaacaccctaaattgtttttaatacattagcaatctattgggtcaactgacatccattgtatatactagtttctttcatgctatttttattttgttttttgcatttttatcaaatgcagggcccctttctgatctcaccatttcaccatgcatcttggaattcagtaagtgcatatcctaacttgcccatattctaaatcatctggttggttttcagcctagaatttgatacgctttttagaaatatgcccagaatagaaaagctatgttggggcacatgtcctgcaaatatggccctagaaacaagtgatatggaatttacttggtgaataagttataaattcccacagaagaaaaatgtgaaagactgggtgctagacaagaaggaagcaggtaaagggatagttgctttgtcatccgtttttaattattttaactgacccttgacaatcttgtcagcaatataggactgttgaacaatcccggtgtgtcaggacccccaaatgtcacttctgcataaagcatgtatgtcatctattttttcttcaataaagagatttaatagccatttcaagaaatcccataaagaacctctctatgtccctttttttaatttaaaaaaaatgactcttgtctaatattcgtctataagggattaattttcagaccctttaataagtgagtgccataagaaagtcaatatatattgtttaaaagatatttcagtctaggaaagattttccttctcttggaatgtgaagatctgtcgattcatctccaatcatatgcattgacatacacagcaaagaagatataggcagtaatatcaacactgctatatcatgtgtaggacatttcttatccattttttctcttttacttgcatagttgctatgtgtttctcattgtaaaaggctgccgctgggtggcagaagccaagagaccttattaactaggctatatttttcttaacttgatctgaaatccacaattagaccacaatgcacctttggttgtatccataaaggatgctagcctgccttgtactaatgttttatatattaaaaaaaaaaaatctatcaaccatttcatatatatcccactactcaaggtatccatggaacatgaaagaataacatttatgcagaggaaaaacaaaaacatccctgaaaatatacacactcatacacacacacgcacaggggaataaaataagaaaatcattttcctcaccatagacttgatcccatccttacaacccatccttctaacttgatgtgtataaaatatgcaaacatttcacaaatgttctttgtcatttcaaaatactttagtatatcaatatcagtagataccagtgggtgggaaagggtcattacatgaaaatatgaagaaatagccatattagttttttaacctgcaatttgcctcagcaacaaagaaaaagtgaatttttaatgctgaagataaagtaagctaaagtaccagcagaagccttggctatttatagcagttctgacaatagttttataagaacatgaagagaacagaatcacttgaaaatggatgccagtcatctcttgttcccactactgaattcttataaagtggtggcaagatagggaagggataatctgagaatttttaaaagatgatttaatgagaagaagcacaattttgattttgatgagtcactttctgtaaacaatcttggtctatctttacccttataccttatctgtaatttaccatttattgtatttgcaaagctagtatggtttttaatcacagtaaatcctttgtattccagactttagggcagagccctgagggagtattattttacataacccgtcctagagtaacattttaggcaacattcttcattgcaagtaaaagatccataagtggcattttacacggctgcgagtattgttatatctaatcctattttaaaagatttttggtaatatgaagcttgaatactggtaacagtgatgcaatatacgcaagctgcacaacctgtatattgtatgcattgctgcgtggaggctgtttatttcaacctttttaaaaattgtgttttttagtaaaatggcttattttttcccaaaggtggaatttagcattttgtaatgatgaatataaaaatacctgtcatccccagatcatttaaaagttaactaaagtgagaatgaaaaaacaaaattccaagacactttttaaaagaatgtctgccctcacacacttttatggatttgtttttcttacatacccatcttttaacttagagatagcattttttgccctctttattttgttgtttgtttctccagagagtaaacgctttgtagttctttctttaaaaaacattttttttaaagaagaagaagccacttgaaccctcaataaaggctgttgcctaagcatggcatacttcatctgttctcatttgtgccatctgccgtgatgtcgtcacttttatggcgttaatttcctgccactacagatcttttgaagattgctggaatactggtgtctgttagaatgcttcagactacagatgtaattaaaggcttttcttaatatgttttaaccaaagatgtggagcaatccaagccacatatcttctacatcaaatttttccattttggttattttcataatctggtattgcattttgccttccctgttcatacctcaaattgattcatacctcagtttaattcagagaggtcagttaagtgacggattctgttgtggtttgaatgcagtaccagtgttctcttcgagcaaagtagacctgggtcactgtaggcataggacttggattgcttcagatggtttgctgtatcatttttcttctttttcttttcctggggacttgtttccattaaatgagagtaattaaaatcgcttgtaaatgagggcatacaagcatttgcaacaaatattcaaatagaggctcacagcggcataagctggactttgtcgccactagatgacaagatgttataactaagttaaaccacatctgtgtatctcaagggacttaattcagctgtctgtagtgaataaaagtgggaaattttcaaaagtttctcctgctggaaataaggtataatttgtattttgcagacaattcagtaaagttactggctttcttagtgatgcagtgtccgtggtgcat

SEQ ID NO: 49129 - DNA, 1392 bp, Artificial Sequence
  derived and/or modified sequence
atgggccggaagaagatccagatcacccggatcatggacgagcggaatcggcaggtgacattcactaagagaaaatttggcctaatgaagaaagcctacgaactcagtgtgctttgtgactgtgagatcgctttgatcatctttaattcaacaaataagctgtttcagtacgcaagcacggacatggacaaggttctgttaaagtatactgaatataacgagccccatgaatccagaaccaatagtgatatcgtcgaagctctgaataagaaagaaaataagggctgcgagtctccagatccggactcttcgtacgcactgaccccacgaactgaagagaagtataagaaaattaatgaggaatttgataatatgatcaagagccacaaaatcccggccgtgccaccaccaaatttcgaaatgcccgtgagcatcccagtgagcagccataatagccttgtttactccaaccccgttagcagtctgggcaatccaaacctcctgccacttgcccaccctagcctgcagaggaactccatgtcccccggggtgacgcatcgacctccaagcgccggcaatacgggaggccttatgggaggcgacttgacctccggggccggtacttccgccggtaatggatacggcaacccgaggaattcccctggactactcgtgagcccaggtaacctgaacaaaaatatgcaggcgaagtcacccccgcccatgaacttgggcatgaataatcgaaagcctgacctaagagtgctgataccccccgggtcaaaaaacactatgcccagcgtgaaccagagaattaacaacagccagagcgcccagtctcttgcaacacccgtggtgagtgtggctacccccacgctgcccgggcagggcatgggtggatatccaagcgccatctctaccacttatggaaccgaatattctttgtcatcggccgatctgtcatcactgtctggctttaatacagcgtctgcgcttcacttaggatcagtcacaggatggcagcagcagcacctccacaatatgcctccttctgcactgagccagcttggggcatgcacctcaacccacctgtcacagagttcaaatttgtccttgccgtctacacaaagtctgaacatcaagtccgaacctgttagtcccccgcgcgatcggacgacaaccccctcccggtatccccagcatactcgacacgaagccggtcggagtcccgtggactccttgtccagctgcagttccagttacgacggaagcgatagagaagaccacaggaacgaatttcacagtcccatcggcctgacccgacccagtccagatgaaagggagtcccccagcgtgaaaaggatgaggctgtctgaaggctgggccacttag

SEQ ID NO: 49130 - DNA, 1392 bp, Artificial Sequence
  derived and/or modified sequence
atgggcagaaagaagattcagatcactaggattatggacgaacgaaatcggcaggtaacctttaccaaacggaaattcggccttatgaagaaggcctacgagctgagcgtattgtgtgactgcgagatcgcgctcattatatttaactcaaccaacaagctgttccagtatgctagtacggacatggacaaggtgctcctcaagtacacggagtacaacgagccccatgaaagtaggacgaactccgacatagtggaggccttgaataaaaaggagaataagggctgcgagagccccgatccagacagctcctatgccttaacccccaggactgaggaaaagtataagaagatcaacgaagaattcgacaatatgattaagtctcataaaatccccgctgtcccacccccaaactttgaaatgcccgtgtccatcccagtctcctcccataatagtctggtgtactccaatccggtctctagtctcggcaatcccaatttgctgccccttgcacatccctcgctgcagagaaactctatgtcgccgggtgtcacccatcgccctcctagcgccggaaataccggcggtttgatggggggtgacctcacctctggtgctggaaccagcgctggtaatgggtatggcaatcctcggaattcacctggactactcgtgtccccagggaacttgaacaagaatatgcaggcaaaaagccccccacctatgaacctcgggatgaacaataggaagcctgatcttcgagtccttattccacccggaagtaaaaataccatgcctagcgtgaatcaacgtatcaacaactctcaatctgcgcaaagcttggctacacccgtggtttccgtcgccactcccactcttccgggacaggggatgggaggatatccttccgcgataagcaccacctatggcaccgaatattctctgtcctccgctgacctcagcagtctgtcaggctttaatacagcctctgccttgcacctgggctctgtgacaggttggcaacaacagcatctgcacaatatgcccccatccgccctctctcaattgggtgcctgcactagcacccatctgtcccagagctcaaacctgagcctgccttctacccaatctctgaacataaaatcagaaccggtgtcacctccaagggaccgcacaacaaccccctctagatacccccagcatacccgccacgaagcaggaagatctcccgtggattctctttccagttgctcatcatcttacgatggtagcgatcgcgaggaccaccggaacgaatttcattctccaattggcctcaccaggccaagcccagatgaacgggaaagcccttctgttaaacgaatgcgactgagcgaggggtgggccacctag

SEQ ID NO: 49131 - DNA, 1392 bp, Artificial Sequence
  derived and/or modified sequence
atgggcagaaagaagatccagatcaccagaatcatggacgagagaaacagacaggtgaccttcaccaagagaaagttcggcctgatgaagaaggcctacgagctgagcgtgctgtgcgactgcgagatcgccctgatcatcttcaacagcaccaacaagctgttccagtacgccagcaccgacatggacaaggtgctgctgaagtacaccgagtacaacgagccccacgagagcagaaccaacagcgacatcgtggaggccctgaacaagaaggagaacaagggctgcgagagccccgaccccgacagcagctacgccctgacccccagaaccgaggagaagtacaagaagatcaacgaggagttcgacaacatgatcaagagccacaagatccccgccgtgcccccccccaacttcgagatgcccgtgagcatccccgtgagcagccacaacagcctggtgtacagcaaccccgtgagcagcctgggcaaccccaacctgctgcccctggcccaccccagcctgcagagaaacagcatgagccccggcgtgacccacagaccccccagcgccggcaacaccggcggcctgatgggcggcgacctgaccagcggcgccggcaccagcgccggcaacggctacggcaaccccagaaacagccccggcctgctggtgagccccggcaacctgaacaagaacatgcaggccaagagccccccccccatgaacctgggcatgaacaacagaaagcccgacctgagagtgctgatcccccccggcagcaagaacaccatgcccagcgtgaaccagagaatcaacaacagccagagcgcccagagcctggccacccccgtggtgagcgtggccacccccaccctgcccggccagggcatgggcggctaccccagcgccatcagcaccacctacggcaccgagtacagcctgagcagcgccgacctgagcagcctgagcggcttcaacaccgccagcgccctgcacctgggcagcgtgaccggctggcagcagcagcacctgcacaacatgccccccagcgccctgagccagctgggcgcctgcaccagcacccacctgagccagagcagcaacctgagcctgcccagcacccagagcctgaacatcaagagcgagcccgtgagcccccccagagacagaaccaccacccccagcagatacccccagcacaccagacacgaggccggcagaagccccgtggacagcctgagcagctgcagcagcagctacgacggcagcgacagagaggaccacagaaacgagttccacagccccatcggcctgaccagacccagccccgacgagagagagagccccagcgtgaagagaatgagactgagcgagggctgggccacctag

SEQ ID NO: 49132 - protein, 1610 aa, Artificial Sequence
  derived and/or modified sequence
MAGLRRPQPGCYCRTAAAVNLLLGVFQVLLPCCRPGGAQGQAIEPLPNVVELWQAEEGELLLPTQGDSEEGLEEPSQEQSFSDKLFSGKGLHFQPSVLDFGIQFLGHPVAKILHAYNPSRDSEVVVNSVFAAAGHFHVPPVPCRVIPAMGKTSFRIIFLPTEEGSIESSLFINTSSYGVLSYHVSGIGTRRISTEGSAKQLPNAYFLLPKVQSIQLSQMQAETTNTSLLQVQLECSLHNKVCQQLKGCYLESDDVLRLQMSIMVTMENFSKEFEENTQHLLDHLSIVYVATDESETSDDSAVNMYILHSGNSLIWIQDIRHFSQRDALSLQFEPVLLPTSTTNFTKIASFTCKAATSCDSGIIEDVKKTTHTPTLKACLFSSVAQGYFRMDSSATQFHIETHENTSGLWSIWYRNHFDRSVVLNDVFLSKETKHMLKILNFTGPLFLPPGCWNIFSLKLAVKDIAINLFTNVFLTTNIGAIFAIPLQIYSAPTKEGSLGFEVIAHCGMHYFMGKSKAGNPNWNGSLSLDQSTWNVDSELANKLYERWKKYKNGDVCKRNVLGTTRFAHLKKSKESESFVFFLPRLIAEPGLMLNFSATALRSRMIKYFVVQNPSSWPVSLQLLPLSLYPKPEALVHLLHRWFGTDMQMINFTTGEFQLTEACPYLGTHSEESRFGILHLHLQPLEMKRVGVVFTPADYGKVTSLILIRNNLTVIDMIGVEGFGARELLKVGGRLPGAGGSLRFKVPESTLMDCRRQLKDSKQILSITKNFKVENIGPLPITVSSLKINGYNCQGYGFEVLDCHQFSLDPNTSRDISIVFTPDFTSSWVIRDLSLVTAADLEFRFTLNVTLPHHLLPLCADVVPGPSWEESFWRLTVFFVSLSLLGVILIAFQQAQYILMEFMKTRQRQNASSSSQQNNGPMDVISPHSYKSNCKNFLDTYGPSDKGRGKNCLPVNTPQSRIQNAAKRSPATYGHSQKKHKCSVYYSKHKTSTAAASSTSTTTEEKQTSPLGSSLPAAKEDICTDAMRENWISLRYASGINVNLQKNLTLPKNLLNKEENTLKNTIVFSNPSSECSMKEGIQTCMFPKETDIKTSENTAEFKERELCPLKTSKKLPENHLPRNSPQYHQPDLPEISRKNNGNNQQVPVKNEVDHCENLKKVDTKPSSEKKIHKTSREDMFSEKQDIPFVEQEDPYRKKKLQEKREGNLQNLNWSKSRTCRKNKKRGVAPVSRPPEQSDLKLVCSDFERSELSSDINVRSWCIQESTREVCKADAEIASSLPAAQREAEGYYQKPEKKCVDKFCSDSSSDCGSSSGSVRASRGSWGSWSSTSSSDGDKKPMVDAQHFLPAGDSVSQNDFPSEAPISLNLSHNICNPMTVNSLPQYAEPSCPSLPAGPTGVEEDKGLYSPGDLWPTPPVCVTSSLNCTLENGVPCVIQESAPVHNSFIDWSATCEGQFSSAYCPLELNDYNAFPEENMNYANGFPCPADVQTDFIDHNSQSTWNTPPNMPAAWGHASFISSPPYLTSTRSLSPMSGLFGSIWAPQSDVYENCCPINPTTEHSTHMENQAVVCKEYYPGFNPFRAYMNLDIWTTTANRNANFPLSRDSSYCGNV

SEQ ID NO: 49133 - DNA, 4833 bp, Artificial Sequence
  derived and/or modified sequence
atggccggcctgagaagaccccagcccggctgctactgcagaaccgccgccgccgtgaacctgctgctgggcgtgttccaggtgctgctgccctgctgcagacccggcggcgcccagggccaggccatcgagcccctgcccaacgtggtggagctgtggcaggccgaggagggcgagctgctgctgcccacccagggcgacagcgaggagggcctggaggagcccagccaggagcagagcttcagcgacaagctgttcagcggcaagggcctgcacttccagcccagcgtgctggacttcggcatccagttcctgggccaccccgtggccaagatcctgcacgcctacaaccccagcagagacagcgaggtggtggtgaacagcgtgttcgccgccgccggccacttccacgtgccccccgtgccctgcagagtgatccccgccatgggcaagaccagcttcagaatcatcttcctgcccaccgaggagggcagcatcgagagcagcctgttcatcaacaccagcagctacggcgtgctgagctaccacgtgagcggcatcggcaccagaagaatcagcaccgagggcagcgccaagcagctgcccaacgcctacttcctgctgcccaaggtgcagagcatccagctgagccagatgcaggccgagaccaccaacaccagcctgctgcaggtgcagctggagtgcagcctgcacaacaaggtgtgccagcagctgaagggctgctacctggagagcgacgacgtgctgagactgcagatgagcatcatggtgaccatggagaacttcagcaaggagttcgaggagaacacccagcacctgctggaccacctgagcatcgtgtacgtggccaccgacgagagcgagaccagcgacgacagcgccgtgaacatgtacatcctgcacagcggcaacagcctgatctggatccaggacatcagacacttcagccagagagacgccctgagcctgcagttcgagcccgtgctgctgcccaccagcaccaccaacttcaccaagatcgccagcttcacctgcaaggccgccaccagctgcgacagcggcatcatcgaggacgtgaagaagaccacccacacccccaccctgaaggcctgcctgttcagcagcgtggcccagggctacttcagaatggacagcagcgccacccagttccacatcgagacccacgagaacaccagcggcctgtggagcatctggtacagaaaccacttcgacagaagcgtggtgctgaacgacgtgttcctgagcaaggagaccaagcacatgctgaagatcctgaacttcaccggccccctgttcctgccccccggctgctggaacatcttcagcctgaagctggccgtgaaggacatcgccatcaacctgttcaccaacgtgttcctgaccaccaacatcggcgccatcttcgccatccccctgcagatctacagcgcccccaccaaggagggcagcctgggcttcgaggtgatcgcccactgcggcatgcactacttcatgggcaagagcaaggccggcaaccccaactggaacggcagcctgagcctggaccagagcacctggaacgtggacagcgagctggccaacaagctgtacgagagatggaagaagtacaagaacggcgacgtgtgcaagagaaacgtgctgggcaccaccagattcgcccacctgaagaagagcaaggagagcgagagcttcgtgttcttcctgcccagactgatcgccgagcccggcctgatgctgaacttcagcgccaccgccctgagaagcagaatgatcaagtacttcgtggtgcagaaccccagcagctggcccgtgagcctgcagctgctgcccctgagcctgtaccccaagcccgaggccctggtgcacctgctgcacagatggttcggcaccgacatgcagatgatcaacttcaccaccggcgagttccagctgaccgaggcctgcccctacctgggcacccacagcgaggagagcagattcggcatcctgcacctgcacctgcagcccctggagatgaagagagtgggcgtggtgttcacccccgccgactacggcaaggtgaccagcctgatcctgatcagaaacaacctgaccgtgatcgacatgatcggcgtggagggcttcggcgccagagagctgctgaaggtgggcggcagactgcccggcgccggcggcagcctgagattcaaggtgcccgagagcaccctgatggactgcagaagacagctgaaggacagcaagcagatcctgagcatcaccaagaacttcaaggtggagaacatcggccccctgcccatcaccgtgagcagcctgaagatcaacggctacaactgccagggctacggcttcgaggtgctggactgccaccagttcagcctggaccccaacaccagcagagacatcagcatcgtgttcacccccgacttcaccagcagctgggtgatcagagacctgagcctggtgaccgccgccgacctggagttcagattcaccctgaacgtgaccctgccccaccacctgctgcccctgtgcgccgacgtggtgcccggccccagctgggaggagagcttctggagactgaccgtgttcttcgtgagcctgagcctgctgggcgtgatcctgatcgccttccagcaggcccagtacatcctgatggagttcatgaagaccagacagagacagaacgccagcagcagcagccagcagaacaacggccccatggacgtgatcagcccccacagctacaagagcaactgcaagaacttcctggacacctacggccccagcgacaagggcagaggcaagaactgcctgcccgtgaacaccccccagagcagaatccagaacgccgccaagagaagccccgccacctacggccacagccagaagaagcacaagtgcagcgtgtactacagcaagcacaagaccagcaccgccgccgccagcagcaccagcaccaccaccgaggagaagcagaccagccccctgggcagcagcctgcccgccgccaaggaggacatctgcaccgacgccatgagagagaactggatcagcctgagatacgccagcggcatcaacgtgaacctgcagaagaacctgaccctgcccaagaacctgctgaacaaggaggagaacaccctgaagaacaccatcgtgttcagcaaccccagcagcgagtgcagcatgaaggagggcatccagacctgcatgttccccaaggagaccgacatcaagaccagcgagaacaccgccgagttcaaggagagagagctgtgccccctgaagaccagcaagaagctgcccgagaaccacctgcccagaaacagcccccagtaccaccagcccgacctgcccgagatcagcagaaagaacaacggcaacaaccagcaggtgcccgtgaagaacgaggtggaccactgcgagaacctgaagaaggtggacaccaagcccagcagcgagaagaagatccacaagaccagcagagaggacatgttcagcgagaagcaggacatccccttcgtggagcaggaggacccctacagaaagaagaagctgcaggagaagagagagggcaacctgcagaacctgaactggagcaagagcagaacctgcagaaagaacaagaagagaggcgtggcccccgtgagcagaccccccgagcagagcgacctgaagctggtgtgcagcgacttcgagagaagcgagctgagcagcgacatcaacgtgagaagctggtgcatccaggagagcaccagagaggtgtgcaaggccgacgccgagatcgccagcagcctgcccgccgcccagagagaggccgagggctactaccagaagcccgagaagaagtgcgtggacaagttctgcagcgacagcagcagcgactgcggcagcagcagcggcagcgtgagagccagcagaggcagctggggcagctggagcagcaccagcagcagcgacggcgacaagaagcccatggtggacgcccagcacttcctgcccgccggcgacagcgtgagccagaacgacttccccagcgaggcccccatcagcctgaacctgagccacaacatctgcaaccccatgaccgtgaacagcctgccccagtacgccgagcccagctgccccagcctgcccgccggccccaccggcgtggaggaggacaagggcctgtacagccccggcgacctgtggcccaccccccccgtgtgcgtgaccagcagcctgaactgcaccctggagaacggcgtgccctgcgtgatccaggagagcgcccccgtgcacaacagcttcatcgactggagcgccacctgcgagggccagttcagcagcgcctactgccccctggagctgaacgactacaacgccttccccgaggagaacatgaactacgccaacggcttcccctgccccgccgacgtgcagaccgacttcatcgaccacaacagccagagcacctggaacaccccccccaacatgcccgccgcctggggccacgccagcttcatcagcagccccccctacctgaccagcaccagaagcctgagccccatgagcggcctgttcggcagcatctgggccccccagagcgacgtgtacgagaactgctgccccatcaaccccaccaccgagcacagcacccacatggagaaccaggccgtggtgtgcaaggagtactaccccggcttcaaccccttcagagcctacatgaacctggacatctggaccaccaccgccaacagaaacgccaacttccccctgagcagagacagcagctactgcggcaacgtgtag

SEQ ID NO: 49134 - DNA, 4833 bp, Artificial Sequence
  derived and/or modified sequence
atggcggggctccggcggcctcagcctggctgctactgccgcaccgccgcagccgtaaacctgcttttaggagtcttccaggttctgttaccatgctgtcgacctggaggagcacaaggccaggctatagagccactgccaaacgtcgtggagttgtggcaggcagaagaaggggaactcttgttacctacacaaggggatagcgaggaaggactcgaggagccatcccaggaacagagcttttcagataaactgtttagtggcaagggcttgcactttcagccatccgtgctggactttggcatccagttcttggggcaccccgtggccaagatactgcatgcatacaatcctagcagagatagcgaagtcgtcgtgaattcagtgtttgctgctgctggacattttcacgttcctccggtcccgtgtcgagtaatccctgcaatgggtaagacctcctttcggatcatcttcttacctaccgaggaaggaagtatcgaaagttccctgttcatcaatacatcatcctacggggtgcttagctaccacgtgtcaggtatagggactaggaggatctcgaccgaagggagcgcaaagcaactccccaatgcatacttcctgctacctaaggtccagagcatacagctgtcccaaatgcaagccgaaaccactaatacgagcctcctgcaagtgcaactagagtgttcgctgcataataaagtgtgtcaacaactgaaagggtgttaccttgagtcagacgacgtattaaggctccagatgagcatcatggtgacaatggaaaacttcagcaaggagttcgaggagaatacacaacacctgttggaccacctctcgatagtttacgtcgccactgacgaaagcgagacctccgacgatagcgccgtcaatatgtatatcctgcacagtgggaattctcttatctggatccaggatattcgtcacttttcccaacgcgacgctttgtcactgcaattcgagccggtcctcctacctaccagcactacaaattttaccaaaatcgccagctttacttgcaaggctgcaactagttgcgactctgggatcattgaagacgtgaagaagacaacccacaccccgacattaaaggcttgccttttttccagcgttgcccagggatatttcaggatggacagtagcgctacgcagttccacatagagacacacgaaaatacctcgggcttatggtcaatttggtaccgcaatcatttcgatagaagcgttgtgctgaacgacgtattcctgtctaaggagaccaagcacatgctgaagatcctaaactttacagggccactctttctccctcccggctgttggaatatcttctcgctaaaactagcagtgaaggacatcgcaatcaatctattcacaaatgtgttcctgactactaacatcggtgcgatctttgccatcccccttcagatttacagtgctccaaccaaagaagggtctctgggttttgaggtgattgcacattgcggaatgcactactttatgggtaagtccaaggccggaaatcctaactggaacggctccttgtctctggaccagtcgacatggaatgtggactccgaactagccaataaactgtatgagaggtggaagaaatacaagaacggtgatgtctgcaagagaaatgttctcggaacaactcgctttgcccacctgaaaaagagtaaggagtcagagagttttgtgttttttctcccccgattaatcgccgagcccgggctgatgttgaacttttctgccaccgcactgcggtccagaatgattaagtacttcgtcgtccaaaacccctcgagctggcctgtgtctctgcagctccttcccctctctctttatcctaagccagaagcgctagtgcacctcctgcataggtggttcgggaccgatatgcagatgattaattttactaccggcgaatttcagctgaccgaagcctgcccttacctgggcactcacagtgaagaaagtagatttggaattctccatttgcatctgcagcctctcgagatgaagagagtcggagtagtgtttacaccggcagattatggtaaggtgactagcctcattctgatccgcaacaacctgaccgttatcgatatgattggtgtggagggatttggggcaagagagctcctcaaggtggggggccgcctccccggagctggcggatcgctgcggtttaaagtcccagagtcgaccctgatggactgccgtcgccagcttaaggattcgaaacaaatactatccattaccaagaacttcaaagtggagaatattgggcctcttcctatcactgtgtctagcctgaagataaacggctacaattgtcaggggtatggctttgaggtgctcgattgtcaccagttttcgctggatcccaacacgtcccgggacatcagcatcgtattcactccggatttcacaagcagctgggtgatcagggatttgagcctagtgactgcggccgatctagagttccgctttactctcaacgtgaccctacctcaccacctgctaccattgtgtgcggatgtagtgccaggtccatcctgggaagaatcattctggaggttgactgtcttcttcgtaagcctttctctcctgggtgtgatcctcatcgcatttcagcaagcccagtacatactgatggaattcatgaaaactcgtcagcggcagaacgcttcatcctcctcccagcagaataacggccctatggatgttatctccccacacagctataaatcaaactgcaaaaatttcctggacacctacggtcctagcgacaagggccgcggaaagaactgtctgcctgtgaataccccacagagtaggatacagaacgccgctaaaagaagccctgccacatacgggcattcccagaaaaagcacaagtgctctgtttattattccaaacacaagacttccactgccgctgcctctagcacaagcacaacaacagaggaaaaacagactagcccgctagggagctcactccctgcagccaaagaggacatttgtaccgacgcgatgagagagaattggatctctctccgctatgcctctgggataaacgttaacctacaaaaaaaccttaccctcccgaaaaatctgcttaataaggaggagaacactctgaaaaacaccatcgtattcagtaacccgagctcagaatgtagtatgaaagagggaatacaaacttgcatgttccctaaggagacagacataaagacctctgagaataccgcagaattcaaagagagagagttgtgccccctcaagacttccaaaaagctgcccgaaaaccaccttcctagaaattccccgcaatatcatcagccggatctgcctgagatcagccgtaagaacaatggcaacaaccagcaggtcccagttaagaacgaggtggatcattgtgagaatctgaagaaagtggacacgaagcccagttccgagaagaagatccataagacttcacgggaggatatgttttccgaaaaacaggatatcccttttgtcgagcaggaggacccttacagaaagaaaaagctgcaggagaagcgagaaggaaacctccaaaatctaaactggtcaaaatcgcgtacctgtagaaagaacaagaaaaggggagtggcccctgtttcgcgaccccctgagcaatcagatctaaagctggtgtgttccgacttcgagcgaagcgagctcagttccgatattaatgtgcggtcatggtgcattcaggagtccacaagggaggtgtgcaaggctgacgccgaaattgcttcgagtctgccggccgcccagcgtgaggctgagggctattaccagaaacccgaaaagaagtgcgtagacaaattttgctcagactcctcctcagactgcggaagcagctccgggtctgtcagagcgagccggggttcatggggttcttggtctagcacgagtagcagtgacggggataagaaacccatggtcgacgcacaacacttcctgccagctggggactcagtgtcacagaatgactttccttcggaggctccaatcagcctgaatctgagtcacaatatctgcaaccctatgaccgtgaactctttacctcagtatgccgagccttcgtgtcccagtctgccggctgggcccacgggtgtggaagaggacaaggggctctactcccctggcgacctgtggcctaccccaccagtctgtgtcacaagctctctcaattgcactctggagaatggtgtaccgtgtgtcatccaggaaagcgcacctgttcacaatagtttcattgattggtccgcgacctgtgaggggcagtttagctccgcttactgccctctagagctgaacgattataatgcatttccggaggagaatatgaattatgccaacggcttcccttgccccgcagatgtccagaccgactttatagatcataacagccagtcaacctggaataccccaccgaatatgcctgccgcctggggccacgctagctttatttcttctcccccctatcttacctctactcggtcattgtcccccatgagtgggctatttggatccatttgggcaccccagagtgacgtttacgagaattgctgccccatcaatcctacaaccgaacactcaacacatatggagaaccaggccgtggtctgtaaggaatattaccccggtttcaatccatttcgagcttacatgaaccttgatatatggactacaaccgccaacaggaacgccaactttcccctgagcagggattcatcttattgcggtaatgtgtag

SEQ ID NO: 49135 - DNA, 4833 bp, Artificial Sequence
  derived and/or modified sequence
atggccggcctgcggcggccccagcccggctgctactgcaggacagctgctgctgtgaacctgctgctgggcgtcttccaggtgctgctgccctgctgcaggcctggaggagcccagggccaggccatcgagcccctgcccaacgtggtggagctgtggcaggccgaggagggggagctgctgctgcccacccagggcgacagcgaggagggcctggaggagcccagccaggagcagagcttcagtgacaagctgttcagcggcaagggcctgcacttccagcccagcgtgctggactttggcatccagttcctgggccaccctgtggccaagatcctgcacgcctacaaccccagccgggacagcgaggtggtggtgaacagcgtgtttgctgctgctggccacttccacgtgccccctgtgccctgcagggtcatcccagccatgggcaagaccagcttccgcatcatcttcctgcccacagaggagggcagcattgagagcagcctcttcatcaacaccagcagctatggagtgctgagctaccacgtgtctggaattggcacccggcgcatcagcacagagggcagcgccaagcagctgcccaatgcctacttcctgctgcccaaggtgcagagcatccagctgagccagatgcaggccgagaccaccaacaccagcctgctgcaggtgcagctggagtgcagcctgcacaacaaggtgtgccagcagctgaagggctgctacctggagagtgatgatgtgctgcggctgcagatgagcatcatggtgaccatggagaacttcagcaaggagtttgaggagaacacccagcacctgctggaccacctgagcatcgtgtatgtggccacagatgagagcgagaccagtgatgacagcgctgtgaacatgtacatcctgcacagcggcaacagcctcatctggatccaggacatccgccacttcagccagagagatgccctgagcctgcagtttgagcctgtgctgctgcccaccagcaccaccaacttcaccaagatcgccagcttcacctgcaaggccgccaccagctgtgacagcggcatcattgaagatgtgaagaagaccacccacacccccaccctgaaggcctgcctcttcagctctgtggcccagggctacttcaggatggacagcagcgccacccagttccacatcgagacccatgagaacaccagcggcctgtggagcatctggtacagaaaccactttgacagatctgtggtgctgaatgatgtgttcctgagcaaggagaccaagcacatgctgaagatcctgaacttcaccggccccctcttcctgcccccaggctgctggaacatcttcagcctgaagctggccgtgaaggacatcgccatcaacctcttcaccaacgtgttcctgaccaccaacatcggggccatctttgccatccccctgcagatctacagcgcccccaccaaggagggcagcctgggctttgaggtgattgcccactgcggcatgcactacttcatgggcaagagcaaggccggcaaccccaactggaatggcagcctgagcctggaccagagcacctggaatgtggacagcgagctggccaacaagctgtatgagcgctggaagaagtacaagaatggagatgtgtgcaagagaaatgtgctgggcaccaccaggtttgcccacctgaagaagagcaaggagagcgagagctttgtgttcttcctgccccggctgattgctgagcccggcctgatgctgaacttcagcgccacagccctgcggagcaggatgatcaagtactttgtggtgcagaaccccagctcctggcctgtgtccctgcagctgctgcccctgagcctgtaccccaagccagaggccctggtgcacctgctgcaccgctggtttggaacagacatgcagatgatcaacttcaccactggagagttccagctgacagaggcctgcccctacctgggcacccacagcgaggagagccgcttcggcatcctgcacctgcacctgcagcccctggagatgaagagggtgggcgtggtgttcaccccagctgactatggcaaggtgaccagcctcatcctgatccggaacaacctgaccgtcatcgacatgattggagtggagggctttggagcccgggagctgctgaaggtgggcggccgcctgcctggagctgggggcagcctgcgcttcaaggtgcctgagagcaccctgatggactgccggcggcagctgaaggacagcaagcagatcctgagcatcaccaagaacttcaaggtggagaacatcggccccctgcccatcaccgtgagcagcctgaagatcaatggctacaactgccagggctacggctttgaggtgctggactgccaccagttcagcctggaccccaacaccagccgggacatcagcatcgtgttcaccccagacttcaccagctcctgggtgatccgggacctgagcctggtgacagctgctgacctggagttccgcttcaccctgaatgtgaccctgccccaccacctgctgcccctgtgtgctgatgtggtgcccggccccagctgggaggagagcttctggaggctgactgtgttctttgtgtccctgagcctgctgggcgtcatcctgattgccttccagcaggcccagtacatcctgatggagttcatgaagacccggcagaggcagaatgccagcagcagcagccagcagaacaacggccccatggatgtgatcagcccccacagctacaagagcaactgcaagaacttcctggacacctacggccccagcgacaagggccggggcaagaactgcctgcctgtgaacaccccccagagccgcatccagaatgctgccaagaggagccctgccacctacggccacagccagaagaagcacaagtgcagcgtgtactacagcaagcacaagaccagcacagctgctgccagcagcaccagcaccaccacagaggagaagcagaccagccccctgggcagcagcctgcctgctgccaaggaggacatctgcacagatgccatgagggagaactggatcagcctgcgctatgccagcggcatcaacgtgaacctgcagaagaacctgaccctgcccaagaacctgctgaacaaggaggagaacaccctgaagaacaccatcgtgttcagcaaccccagcagtgaatgttccatgaaggagggcatccagacctgcatgttccccaaggagacagacatcaagaccagtgaaaatacagctgagttcaaggagcgggagctgtgccccctgaagaccagcaagaagctgcctgagaaccacctgcccaggaacagcccccagtaccaccagcctgacctgcctgagatcagcaggaagaacaatggaaacaaccagcaggtgcctgtgaagaatgaggtggaccactgtgagaacctgaagaaggtggacaccaagcccagcagcgagaagaagatccacaagaccagccgggaggacatgttcagcgagaagcaggacatcccctttgtggagcaggaggacccctacaggaagaagaagctgcaggagaagcgggagggcaacctgcagaacctgaactggagcaagagcaggacctgcaggaagaacaagaagaggggcgtggcccctgtgtcccggcccccagagcagagcgacctgaagctggtgtgcagcgactttgagaggtctgagctgagcagtgacatcaacgtgcgctcctggtgcatccaggagagcacccgggaggtgtgcaaggcagatgctgagatcgccagcagcctgcctgctgcccagcgggaggccgagggctactaccagaagccagagaagaagtgtgtggacaagttctgcagcgacagcagcagtgactgtggcagcagcagcggctctgtgcgggccagccggggctcctggggctcctggagcagcaccagcagcagtgatggagacaagaagcccatggtggatgcccagcacttcctgcctgctggggacagcgtgtcccagaatgacttccccagcgaggcccccatcagcctgaacctgagccacaacatctgcaaccccatgacagtgaacagcctgccccagtatgcagagcccagctgccccagcctgcctgctggccccaccggggtggaggaggacaagggcctgtacagccctggggacctgtggcccaccccacctgtgtgtgtgaccagcagcctgaactgcaccctggagaatggagtgccctgcgtcatccaggagagcgcccctgtgcacaacagcttcatcgactggagcgccacctgtgagggccagttcagcagcgcctactgccccctggagctgaatgactacaatgccttccctgaggagaacatgaactatgccaacggcttcccctgcccagcagatgtgcagacagacttcatcgaccacaacagccagagcacctggaacaccccacccaacatgcctgctgcctggggccacgccagcttcatcagcagccccccctacctgaccagcaccaggagcctgagccccatgagcggcctgtttggcagcatctgggccccccagagtgatgtgtatgagaactgctgccccatcaaccccaccacagagcacagcacccacatggagaaccaggccgtggtgtgcaaggagtactacccaggcttcaaccccttccgggcctacatgaacctggacatctggaccaccacagccaacagaaatgccaacttccccctgagccgggacagcagctactgtggaaatgtgtag

SEQ ID NO: 49136 - DNA, 4833 bp, Artificial Sequence
  derived and/or modified sequence
atggccggcctgcggcggccccagcccggctgctactgccggaccgctgccgccgtgaacctcttgttgggcgtgtttcaagtgctcctgccctgttgtcggccaggtggggcgcaggggcaggccattgaacctctgcctaatgtggtggaactgtggcaagctgaggaaggggagttgctgctacctacccagggcgatagtgaggagggattggaagaaccatcacaagaacagtccttctctgataagctcttctcggggaagggcttacactttcagcctagcgtgctggatttcggcatacagtttctggggcacccggtggccaagatacttcatgcctacaaccccagtagggatagcgaagtggtcgtgaatagtgtcttcgcagcggcggggcattttcacgtgccacctgtcccatgtagagtcatccctgcaatgggtaaaacatcattccggatcatcttcctgcccacggaggaggggtctattgaatcatccctcttcataaatacgtcatcttacggagttctcagctaccacgtgtcagggattggcacccggaggatttccaccgaggggtctgctaagcagttgccgaatgcctacttcctgttacccaaagtccagtctatacagctgtcacagatgcaagcagaaactacaaacacgtccttactacaggtacagctggagtgctctcttcataataaagtctgccagcaactaaaaggatgctacctggaatccgatgacgttcttcggttacagatgtcaatcatggttaccatggagaatttcagcaaagagttcgaggagaacacacagcatctcctggaccacctgagcatcgtgtatgtggctactgacgagtccgagacaagcgacgactcagccgtcaacatgtatatccttcattcgggaaacagccttatctggatccaggacatccgacacttcagtcagcgcgacgctctctctttgcaattcgaacccgttctattacctacatccacaaccaacttcacaaaaattgcctccttcacatgtaaggccgcaaccagctgtgattcaggaatcatcgaggatgtgaagaaaaccacccacacgccaaccttaaaagcttgtctgtttagttcagtggcgcaaggatacttcaggatggattcatccgcaacccaattccacatcgagactcatgagaacacatctgggctctggtccatctggtacagaaatcatttcgaccggtccgtggtcctcaacgacgtgtttctcagcaaagagactaaacatatgctaaagattcttaattttacaggacccctatttctccccccgggatgctggaacatcttttctctgaagctggcggtgaaggacattgcaatcaatctatttaccaacgtgtttctcaccaccaatataggcgctattttcgcaattcctctgcaaatctattcagcacccaccaaggaaggttctcttggattcgaagtaatcgcccactgcgggatgcactacttcatgggcaaaagcaaagccggtaaccctaattggaatggatcactcagccttgaccagtcaacctggaacgtggactcagaattggcaaataaactgtatgagaggtggaaaaagtacaagaatggggatgtctgcaaacgcaacgtgcttggcactacaagatttgcccacctcaagaaaagcaaagagagcgagtccttcgtgttcttccttcccagactgattgctgagccaggccttatgttgaattttagcgcgaccgccctcagatcccgcatgatcaagtattttgtggttcagaaccctagctcctggcccgttagtctgcagctgctgccactgtctttatatccgaagccagaggctctggtccacttgctccatagatggttcggcaccgacatgcagatgattaattttacgactggggaattccagttgactgaagcctgtccttatctgggcactcactccgaggagagtagattcggcatactgcacttgcaccttcagcctcttgagatgaagcgggtgggcgtggtgttcactccagcagactatggaaaagtgacgagcctgatcctgataaggaacaatcttactgtaatcgatatgatcggagtcgaaggattcggtgctagggaactcctgaaggttggtggccgcctgcccggggctggaggaagcctcaggtttaaagtgcccgaatcaaccctgatggactgcagacggcagctaaaggacagtaagcaaatcctgtccataactaaaaactttaaagttgaaaacatcggccccttgcccattactgtgtcatctctgaagataaacggttataattgtcagggatatgggtttgaggtgcttgactgccaccagttctctctcgatcctaatacgagtcgcgacattagcatcgtgttcacaccagacttcacgtccagctgggtcattcgggacttaagtttggtcaccgcggccgacctagagtttaggtttacactcaatgtgactttacctcaccacctcctgccactttgcgccgacgtggtgcccgggcccagttgggaggagagcttttggagactgactgtgttttttgtctccttaagcctcctcggtgtaattctcatagcttttcagcaggctcaatacattctgatggaatttatgaagacacgacagaggcaaaatgcaagcagctcctcccagcagaataacggccccatggatgtcatatccccgcactcctataagagcaactgtaaaaacttcttagatacatacgggccttccgataaggggcgggggaagaattgcctgccagtgaataccccccagagtcgtattcagaacgccgcgaagcgttcgcctgccacatacgggcactcacagaagaagcacaaatgcagcgtgtattattctaagcataaaacctcgacagctgccgctagttctacttcaactacaaccgaggaaaagcagacctccccacttggaagtagtttgccagcagcaaaagaggacatctgtaccgatgctatgagggaaaactggattagcctgcgctatgcttcaggcataaacgttaatttgcagaagaaccttactctccccaagaacctgcttaacaaggaggagaataccctgaagaacaccatagttttttctaacccaagctcagaatgttccatgaaagaagggattcagacgtgtatgttccccaaagaaactgatatcaagacctccgaaaatactgcagagttcaaggagagggaactgtgcccactgaaaacatcgaagaagctgcctgagaatcacttgcctcggaacagtccccagtatcaccagcctgatcttccagaaattagcagaaagaacaacgggaacaaccagcaggtgcccgtcaagaacgaagtcgatcactgcgagaatctgaagaaggtcgacactaagcccagcagtgaaaaaaagattcataaaacgtctagggaggatatgttcagcgagaaacaagatatccccttcgtagagcaggaggatccttatcggaaaaaaaaactgcaggaaaaaagagagggtaacctgcagaaccttaattggagtaagtccagaacctgcagaaagaacaagaagcgcggcgtggcgccggtgagccgaccacccgagcagagcgatctgaagcttgtttgttccgactttgaaaggagcgagctgtcgagcgacattaatgttcggagctggtgcatccaggaatccacaagagaagtgtgtaaagcagatgcagagatagcgtcaagtctacctgccgctcagagagaagcagagggatactatcagaaacccgaaaaaaagtgcgtggataaattttgctcagacagctcttctgattgcggtagtagctctggcagcgtccgagctagcagaggctcctggggtagctggtcatcgacgtcctccagtgacggcgataagaagccaatggtggatgcacaacatttcctgccagctggtgactctgtgtcccagaatgatttccccagtgaagcacccatttccctgaacctcagccataatatttgtaacccaatgactgtcaacagtctgcctcagtacgccgaacccagttgcccgagcctgcctgcaggaccgacaggcgttgaagaggacaagggtctgtattcaccaggagatctgtggcctacccctccagtctgtgtaacctcttctttgaattgcacgctcgaaaacggagttccctgtgtgatccaagagtcagctccagtgcataatagttttattgattggtccgccacctgtgaaggccagtttagctccgcctactgcccccttgaactgaacgactacaatgcgttccctgaggagaatatgaattatgccaatggctttccttgtcccgctgatgtgcagacagattttatagaccacaatagtcagagtacgtggaacacgccaccaaacatgcccgccgcctggggtcacgcgagctttattagctcccccccgtatttaacttccacccgctcacttagcccgatgagtgggctcttcggctctatttgggccccccagtccgacgtgtacgaaaattgttgccccattaatccaaccaccgagcacagcacccacatggagaatcaggcagttgtctgcaaggaatactatcctggcttcaacccctttagggcatacatgaatttggacatttggactactactgccaataggaacgctaacttcccgttgagcagggactcctcttactgcggaaatgtgtag

SEQ ID NO: 49137 - DNA, 5017 bp, Artificial Sequence
  derived and/or modified sequence
gagctagcggcgagcgcggcgagcaacggagaggagcgcgagcagcagcatggcggggctccgacgcccgcagcccggctgctactgccgcaccgcggcggccgtgaacctcctgctgggcgtcttccaggtcctgctgccctgctgtcgcccgggaggggctcagggacaagcgattgagccgttgccgaacgtggtggagctgtggcaggcagaagaaggggaactcctgctgcccactcagggtgattctgaagagggtctggaggagccttctcaagaacagagcttctcggacaaactatttagtggaaaaggcttacattttcagccatcagttttagattttggaatacagttcctgggacatcctgtagcaaagattctccatgcttacaaccctagtagggacagcgaggttgtggtgaattcagtgtttgcagctgctggacatttccatgtaccgccagttccctgcagggtaattccagcaatggggaaaacttccttcagaattattttcttacctactgaagaaggaagcattgaaagttccttatttattaatacctcttcgtatggagtcctttcctatcatgtatctggaattggcactcgtagaatctctacagaagggtctgcaaagcagctaccaaatgcttattttctgcttccaaaggtccagagcattcagctgtctcaaatgcaggcagaaaccactaatactagcctcttgcaggtgcaactggaatgcagtttacataataaagtgtgtcagcaattaaagggttgttatctggaatctgatgatgttttgcgtctacaaatgagcataatggtaacaatggaaaacttttcaaaagaatttgaagaaaacacacaacatttgttagatcatctctctattgtttacgtagctacagatgaatctgagacctcagatgattcagcagtaaatatgtatatattacattcaggaaacagccttatatggatacaggatatacgccatttctcacagagagatgctctgtctctgcagtttgaaccagtactactacctacttctacaacaaactttacaaaaattgcttcttttacctgcaaagcagctacatcatgtgacagtggaattatagaagatgtgaagaaaacaacacacactccaacactaaaagcatgcctcttctcttctgtggctcaggggtattttagaatggactcttctgcaacccagtttcacatagagactcatgagaacacatcaggactttggtcaatatggtaccgcaaccattttgaccgtagtgttgtattaaatgatgtgtttctttccaaggagaccaagcacatgttaaagattctgaatttcactggccctttatttctacctccaggctgttggaatatattttctttgaaacttgctgttaaagacattgccataaatctattcaccaatgtatttttgactacaaacataggtgccatttttgcaatacctctacagatttattcagcaccaaccaaggaagggagtctgggttttgaagtgatagcacattgtggcatgcattatttcatgggaaaatcaaaagcaggaaatcctaattggaatgggagcctttctctggatcaatctacctggaatgtggattctgaacttgcaaataaattgtatgaaagatggaagaaatataaaaatggtgacgtctgcaagaggaatgttttgggaacaactcgatttgctcacttgaagaaatccaaggagtcagagtcctttgttttctttttgcctcgtttgatcgcagagcctggcctcatgttaaacttcagcgcaactgcccttaggagcaggatgatcaagtactttgtggtgcagaacccgtcctcttggccggtctccttgcagctcctgcctctctccttgtaccctaaacccgaagccctagtgcacctgctccacagatggtttggcactgatatgcagatgattaatttcacaactggtgaattccagctcaccgaagcttgcccttacctgggtacgcattctgaggaatccaggtttggcatcctccacttacatctgcagcctttggaaatgaaaagggttggcgtagttttcacacctgctgactatggaaaagttacctcactcatactaatccggaataacttgactgttattgacatgattggcgtggaaggatttggagcaagagagttattaaaagtgggtggaagacttcctggtgcaggaggctcactccgatttaaggtgcccgagtccacgctgatggactgccgtagacaactgaaagacagtaagcaaattttatctattacaaagaactttaaagttgagaatattggacctcttcctataactgtttcgtctctgaaaattaatgggtataactgccaaggttatggattcgaggtgctggattgtcatcagttttccctggacccaaacacatcccgcgatatcagcattgtgttcactccagactttacctcctcctgggtaattcgggacctaagtcttgtaaccgcagcggacctagaatttcgcttcactctcaatgtgactctccctcatcacctgttgcccttgtgtgcagacgtggttccaggacccagctgggaggagtcattttggaggctcacggtcttctttgtcagtttgtccctgttgggtgtgattttaatagccttccaacaagcacagtacattctcatggaattcatgaaaacaagacagaggcaaaatgctagctcctcttcacagcaaaacaatggtcctatggatgtaatcagcccccattcttacaaaagcaattgcaagaactttctcgatacatatggcccctctgataaaggcagggggaagaactgccttccagtgaacactccccaaagcaggatccagaatgctgcaaagaggagcccagccacctatggtcattctcagaagaagcacaaatgctcagtgtattacagtaaacacaaaaccagcacagctgcggccagcagcaccagcacgactactgaggaaaaacagacttcacccctgggcagctcactgcctgctgctaaagaggacatttgcactgatgccatgcgtgagaactggatcagcctcagatatgcaagtggcataaatgtcaacctgcagaagaatttaacccttcccaaaaacttactgaataaagaagaaaacacactgaaaaacacaattgttttcagtaatccttcttcagaatgtagtatgaaggagggaatacagacatgtatgtttcctaaggaaactgacattaaaacttcagagaacacagccgagttcaaggaacgggagctctgtccactgaagacctccaagaaactacctgaaaaccatttaccaagaaactcacctcagtaccaccagccagacttgccagaaatttccaggaaaaataatgggaataaccagcaagtacctgtcaagaatgaagtagatcattgtgaaaatttgaagaaggtggacacaaagccttcttcagaaaagaagattcacaaaacatctagagaagacatgttttctgagaaacaggacatacctttcgtagagcaagaagatccttataggaagaaaaagcttcaggagaaaagagaaggaaatttacaaaatttaaattggagtaaaagtcgaacatgtagaaagaacaagaaaaggggtgttgctccagtctcaaggcctcctgaacagagtgatctaaagcttgtgtgcagtgactttgagaggtctgagctgagcagtgacatcaatgtaagaagctggtgtatacaggaaagcactagggaggtttgtaaagcagatgccgaaattgcaagcagtttacctgctgcccagagagaggcagaaggttactaccagaagcctgagaagaaatgtgtggacaagttctgctccgattccagctctgactgtgggagctcctctggcagcgtgcgtgccagccggggcagctgggggagctggagcagcaccagcagctccgacggggataagaagcccatggtggacgcccagcacttcctgccggccggagacagtgtttcacaaaatgattttccttctgaagctcccatctccttgaatctttctcataacatctgcaatcccatgaccgtgaatagtctcccacaatacgcagagccttcctgtcccagccttcctgccgggcccacaggtgttgaagaagataaaggtctttactcacctggagacctgtggcccactccgccagtgtgtgtgacaagcagcttaaactgcaccctggagaacggcgtgccttgtgtgattcaggagtcggccccggttcataatagtttcattgattggagtgcaacatgcgaaggccagttttccagcgcatactgtccattggaattgaacgattacaatgcctttccagaagaaaacatgaactatgccaatggcttcccctgtcctgcagatgttcagacagactttattgatcacaactctcagtctacctggaacaccccacccaacatgcctgctgcctggggacatgccagtttcatcagctctccgccctacctcacaagcacccgaagcttgtctccaatgtctggactttttggttccatctgggccccgcaaagcgatgtgtatgaaaattgctgccccatcaaccccaccacggaacattcgacccacatggaaaaccaagcggtcgtgtgcaaggaatactacccggggttcaacccgtttcgcgcctatatgaacctggacatatggactaccacagcgaataggaatgcaaatttcccactgtctagagactcgagttactgtgggaatgtgtgaaaataattggatttttaaacaatgtgaataaagaggcttgtgttttgattactagtgtaaactggttattgagatagattatgacattggtggatattttggcacttttatatgaaaataaattttttaatgaaa

SEQ ID NO: 49138 - DNA, 4833 bp, Artificial Sequence
  derived and/or modified sequence
atggcaggtttgagaaggccccagccaggttgttactgccgtacggccgcagcagttaaccttctgttgggggtgtttcaagtgctgctgccatgttgtagaccaggcggagcccaggggcaggctattgagcccttaccaaatgtggtcgaattgtggcaggcagaggagggcgaactgctgctgcctacccagggcgatagcgaggagggcctggaggagccaagccaagagcagagcttctctgacaaattgttctcgggcaagggccttcactttcagccatcggtgctggacttcggcatccagttcctgggccatcccgtcgctaaaattctgcacgcttacaatcccagtagggacagcgaggtagttgtgaattctgtgttcgcagctgccggtcatttccacgtgccgccagtgccttgtcgcgtgattccagccatgggaaagacaagtttccggatcatcttcctgccaactgaagaggggtccatcgagagctccctgttcatcaatacctcatcgtatggggttctgtcctaccacgtgtcaggaatcggaacaagacgcatctccacagagggatcagcaaagcagttgcctaacgcctatttcttgttgccgaaagtgcagagcatacagctttctcagatgcaagccgagactactaacaccagcctccttcaagtgcaattggaatgttcactgcataacaaagtgtgtcaacagcttaaaggatgctatctcgagtctgatgacgttcttcgcctgcagatgagcatcatggtgaccatggagaacttttctaaagagtttgaagagaacactcagcatctgctggaccacctctcaatcgtgtacgtggccaccgatgagtctgagacttctgacgacagcgccgttaatatgtatatccttcactcaggaaacagcctgatctggatccaagacattcggcacttttcccagcgcgatgcccttagtctacagttcgaacccgtacttttacccacctctaccaccaactttacgaaaatagccagttttacttgtaaagcagcaacatcctgcgatagcggtatcatagaggacgttaagaaaaccacacatacacctaccctcaaggcctgtcttttttcatctgttgcccagggctactttcgcatggacagcagtgcgacccaattccacattgaaactcacgaaaacacctccgggttgtggtctatctggtacagaaatcactttgaccgaagtgtcgtgcttaacgatgtgtttcttagcaaagagactaagcatatgttgaaaatactaaatttcaccgggccattatttctcccgcctgggtgctggaatatcttttccctgaagctggccgtgaaggatatcgctattaatctctttactaatgtgtttttgactacgaatattggtgccatctttgccatacctctccagatctactctgcccctactaaagagggttcattaggatttgaggttattgcacactgtggtatgcactatttcatggggaagagcaaagcgggaaacccgaactggaatggcagcctgtcccttgatcaatccacatggaatgtggatagcgagttggctaacaaactatacgaaagatggaaaaaatacaagaacggggacgtgtgcaagagaaacgtcctgggtacaactcggtttgcacacctcaagaaatctaaagagagcgagtcgtttgttttcttcctgcccaggctcattgccgaaccaggcctcatgctcaatttctccgcgacggccttgagaagccgaatgattaaatatttcgtggtacagaacccttcctcttggcctgtttccttgcagttgctgccgctgtctctgtatccgaagcctgaggccctggtccatttactgcacagatggttcggcacagatatgcaaatgatcaacttcactacaggggaatttcagctcactgaggcctgtccgtacctgggaacccacagtgaagagagtagattcggaattctccatcttcacctccagcccctagaaatgaaacgggtgggcgttgtgtttacacccgcagactatggcaaggtcacttctctcatcctaataaggaacaacctgacagtaatcgacatgataggcgtggaggggttcggcgctagggaactcctcaaggtgggcggaaggctgccaggtgccggaggatcactacggtttaaagtgcccgagtctaccctgatggactgcagacgacagctgaaagactccaagcagatcctcagcatcacaaagaattttaaggtggaaaacattggcccactgcccattacggtaagcagtcttaagattaatggctacaactgtcaaggctatggctttgaggtgctcgactgccaccaattttccctcgacccaaatacatccagggatatcagtatcgtctttacaccagacttcaccagctcctgggtgattcgcgacctgtcgctagtgaccgcagctgatctggaattcagatttactctcaatgtcacccttccacatcacttgctgccactgtgcgcggacgtggtgccaggcccttcctgggaagagagtttctggcgcctgactgttttttttgtgtctctttcattactgggagtcattctcatcgccttccagcaagcccagtatatactgatggaattcatgaaaacccgccagcgtcagaatgccagctcaagctcccagcaaaataacgggccaatggacgtcatctcaccccactcgtacaagtcaaattgtaaaaacttcctcgacacatatggaccctccgataagggacgcggtaaaaattgcctcccggttaatactcctcagtcacggatccagaacgctgctaaacgcagcccggctacctacggccatagtcagaagaaacacaagtgctcagtgtattactctaaacataagaccagcacagccgcagcctcttccacatccaccacaactgaggagaaacagacgagccctctcggatctagcctgcccgctgctaaagaggacatctgtactgacgcgatgcgtgagaattggatcagcctccggtacgccagtgggataaatgttaacctgcagaagaacctgactcttcctaagaatctcctaaataaggaggagaacaccttgaagaacaccattgtgttctcaaacccgagctcagaatgttccatgaaggaaggcatacaaacatgtatgtttccgaaggagaccgacatcaagaccagcgagaataccgcagagtttaaggaacgggagttatgccctttaaagactagtaaaaagctaccagaaaaccatctccctagaaacagtccacagtaccatcaacctgacctgccagagatcagccgcaagaataatggcaataatcagcaggttcctgtaaaaaatgaagtggatcactgcgaaaatttgaagaaggttgacactaagccctcgtctgagaaaaaaatccataagacttcgcgcgaggacatgttctccgagaaacaggacatccccttcgtcgaacaggaagacccttataggaagaagaaactgcaggagaaacgggaaggaaacctccagaaccttaattggtctaaatcacggacgtgtcggaaaaataaaaaaaggggcgtggccccagtgagtcgacccccagagcagagtgatctgaaattggtgtgctctgatttcgagcgaagtgaattatcctccgatatcaatgtgcgcagctggtgcatacaggaatccacacgcgaggtctgtaaagctgatgccgagattgcctcctctttgccagccgcacagcgcgaggcggaagggtactatcagaaaccagagaaaaagtgtgtcgacaagttttgttccgattcctcaagcgattgtggatctagctctggatccgtaagagcaagcaggggaagctggggaagctggtcatccacttcttcctctgacggggataagaaaccaatggtcgacgcccagcatttcttgcccgcaggcgactctgtctctcaaaacgatttcccttccgaggcccctatctcactgaacctgtctcataacatctgcaatcccatgacagtgaattctctgccacagtatgccgagccttcatgtccgtccctccctgcaggccctacaggagttgaagaggacaaaggcctgtattctcccggagatctgtggccaactcctccagtctgcgtgacgagcagtctgaattgcacgctggagaacggcgtgccttgtgttatccaggagtcagcccctgtgcacaattccttcatagattggtccgctacctgcgaagggcaattttcaagcgcatactgtccactcgagcttaacgactacaacgcattccccgaggaaaatatgaattacgccaacgggttcccttgcccagcagacgtgcagaccgatttcatagatcacaattcacagtccacttggaacactcctcctaacatgccagccgcatggggccacgcatccttcatcagctctcccccttacctgacttccacaaggtcactttcccccatgtcaggcctgttcggcagcatatgggcccctcaatctgatgtgtacgaaaactgctgtccgatcaatcccacaacagagcattctacacatatggagaaccaagccgtggtttgcaaggaatactaccccggatttaatccgttccgcgcatacatgaatttggatatctggaccacgacggccaataggaatgctaatttcccactgagccgcgactcctcttattgtgggaacgtgtag

SEQ ID NO: 49139 - DNA, 1986 bp, Artificial Sequence
  derived and/or modified sequence
atgatctgggagtataacgtggtcattatcgtaatggcgtgtagagagtttgagatgggcagaaaaaaatgcgagcgatactggcccctgtatggtgaggatccaatcactttcgctcctttcaaaatttcctgtgaggacgagcaggccaggaccgattacttcatccgcacccttttgcttgagtttcagaacgagagccgcaggttgtatcaattccattatgtgaactggccagatcacgatgttcctagtagctttgactcgatcctcgacatgattagcctcatgagaaaataccaggagcacgaggatgttcccatctgcatacactgctctgcgggctgtggccgcacgggagcaatctgtgccatcgattacacatggaatttgctgaaagctggcaaaatccccgaggaattcaatgtttttaatctgattcaggagatgagaacgcagaggcattccgctgtccagacaaaagagcagtacgagctagtgcatcgggccattgctcagttgttcgagaagcagctccagctgtatgagatccacggcgctcagaagattgccgatggcgtgaatgagataaataccgaaaatatggtgtccagcattgagcctgaaaagcaggactctcctccaccaaagcccccacgcacccgcagttgcctagtggaaggtgacgccaaggaggaaatcctccagcctccagaaccacacccggtccctccaatcttgactccgtcccctccttccgcctttccgactgtgaccactgtttggcaggacaatgacagataccaccccaagcccgtcctgcacatggtttcatccgagcagcacagcgctgacctgaaccgaaattactcaaagtcgaccgaactccctggtaaaaatgagtcaacaattgaacaaatcgataaaaagctggaaagaaacctgtctttcgaaatcaagaaggtcccgttacaggaaggccccaaatccttcgacggcaacaccctcctcaaccgcggtcatgcgattaagatcaaatcagccagcccatgtatcgctgacaagataagtaagccgcaggagctgtcctctgatttgaacgtgggggacacgtcacagaattcttgcgttgattgctcagtgacgcagagcaacaaagtcagcgtcacaccaccagaggaatcccagaacagtgacacccccccacggcccgatagacttcctcttgatgaaaaaggacacgtgacatggtcatttcacggccccgaaaacgcaattcccatacccgacctcagcgaggggaactcctcagacatcaattaccagacgagaaagacagtctctctgacaccatccccaaccactcaagtggaaacgccggaccttgttgaccacgacaatacatctccattgttccgcaccccactgagctttactaacccactccattccgatgattcagactcagatgaacgaaactcggacggcgccgtgacccaaaataagacaaatatttcaaccgccagtgccacggtgtctgcggcaacttcaaccgagtcaatcagcacccgcaaagttttaccaatgtccatagcccgccacaacattgccggcaccactcactcgggagccgagaaagatgtagatgtgagcgaggattccccccccccactgcctgagagaacacctgagagtttcgttctcgcgtcagaacataatacacccgtgaggtcagaatggagcgaactgcagtcccaagaacgttcggaacagaaaaagtctgagggactcatcacgtctgagaatgaaaagtgtgatcatcccgccgggggaatacattatgagatgtgcattgagtgcccacctaccttctcagacaaaagagaacagatctcggaaaacccgactgaggctactgatatcggatttggaaatcgttgcgggaagcctaagggcccacgcgaccccccgtctgaatggacatag

SEQ ID NO: 49140 - DNA, 1632 bp, Artificial Sequence
  derived and/or modified sequence
atgatctgggagtataacgtcgttatcatcgtcatggcgtgccgagagttcgaaatgggacggaagaagtgcgagcgatactggcccctttatggcgaagatccaataacttttgctccctttaaaatctcttgtgaagatgaacaggcacggaccgattatttcatacggactctcctgttagaattccagaatgaaagtagacgcctgtaccagttccactatgttaattggccagatcatgacgtaccctcctcttttgactctatcctggacatgatctctctcatgcggaaataccaggagcatgaggatgtcccaatctgtattcattgttccgccggctgtgggcgtaccggggcaatctgcgcaatcgactatacatggaacctgctgaaggccggtaaaataccagaagaattcaacgtgtttaatctgatccaggagatgcgaacccagagacactccgctgtccaaaccaaagaacaatacgaactggtccaccgagccattgcacagctcttcgaaaaacagttgcaattgtatgagatccatggagcgcagaagatcgccgatggcgtaaatgaaatcaatacagaaaatatggtgagctccatagaaccggagaagcaggattctcctccgccaaaaccaccacgtacacgctcttgtttagtggaaggggatgctaaggaagaaatactgcagcctccggagcctcaccccgtgccgcccattctgaccccaagccctccttccgcctttcctacggtaaccactgtgtggcaggataacgacagatatcacccgaagcccgtgctacatatggtcagctccgagcagcattcagctgatcttaatcgaaattattcaaaaagcaccgaactgccaggaaaaaacgaatccaccattgagcagatcgataaaaagctcgaaaggaatctctcttttgagattaagaaggtacccctgcaagaaggcccaaagtcctttgatgggaacacgttgctgaatcggggccatgcgataaagataaaaagtgcaagcccatgcatcgctgataaaatatccaagcctcaggagctcagcagtgacctgaatgtcggggacacaagccaaaattcctgcgtagattgtagcgtgacacagagtaacaaagtgagcgttacaccgcctgaggagtctcagaactcggatacaccaccccgtcccgaccgtctgcccttggacgaaaagggccacgtgacatggtcatttcacggtccggagaacgccatcccaatcccagacctctccgaaggcaattcgagtgatatcaattatcaaacacggaaaacagtgagcctgactcctagccctactacccaggtagagacaccagacctagtggatcacgataacacgtctcctctgttccggacaccattgtctttcacgaacccgctgcactcagatgatagtgacagcgatgaacgcaattccgatggcgcagttactcagaataaaaccaacatctctaccgcctcggctactgtgagcgccgcaaccagtacagagtccatttcaacgagaaaggtgctgccaatgagtattgcccgccacaacagcagaaataacacttttcgatgttag

SEQ ID NO: 49141 - DNA, 1986 bp, Artificial Sequence
  derived and/or modified sequence
atgatctgggagtacaacgtggtgatcatcgtgatggcctgccgggagtttgagatgggcaggaagaagtgtgagcgctactggcccctgtatggagaggaccccatcacctttgcccccttcaagatcagctgtgaagatgagcaggccaggacagactacttcatccgcaccctgctgctggagttccagaatgaaagccggcggctgtaccagttccactacgtgaactggccagaccatgatgtgcccagcagctttgacagcatcctggacatgatcagcctgatgaggaagtaccaggagcatgaagatgtgcccatctgcatccactgcagcgctggctgcggccgcactggagccatctgtgccatcgactacacctggaacctgctgaaggccggcaagatccctgaggagttcaacgtgttcaacctgatccaggagatgaggacccagaggcacagcgctgtgcagaccaaggagcagtatgagctggtgcaccgggccatcgcccagctgtttgagaagcagctgcagctgtatgagatccatggagcccagaagattgctgatggagtgaatgagatcaacacagagaacatggtgagcagcattgagcctgagaagcaggacagccccccacccaagccacccaggaccaggagctgcctggtggagggagatgccaaggaggagatcctgcagcccccagagccccaccctgtgccccccatcctgacccccagccccccatctgccttccccaccgtgaccaccgtgtggcaggacaatgaccgctaccaccccaagcctgtgctgcacatggtgtcctctgagcagcacagcgctgacctgaacagaaactacagcaagagcacagagctgcccgggaagaatgaaagcaccatcgagcagattgacaagaagctggagaggaacctgagctttgagatcaagaaggtgcccctgcaggagggccccaagagctttgatggcaacaccctgctgaacagaggacatgccatcaagatcaagagcgccagcccctgcatcgctgacaagatcagcaagccccaggagctgagcagtgacctgaatgtgggggacaccagccagaacagctgtgtggactgcagcgtgacccagagcaacaaggtgtctgtgaccccacctgaggagagccagaacagcgacaccccacccaggccagaccggctgcccctggatgagaagggccacgtgacctggagcttccacggcccagaaaatgccatccccatcccagacctgtctgagggcaacagcagtgacatcaactaccagaccaggaagacagtgtccctgacccccagccccaccacccaggtggagaccccagacctggtggaccatgacaacaccagccccctcttccgcacccccctgtccttcaccaaccccctgcacagtgatgacagcgacagtgatgagaggaacagtgatggagctgtgacccagaacaagaccaacatcagcacagccagcgccaccgtgtctgctgccaccagcacagagagcatcagcaccaggaaggtgctgcccatgagcatcgcccggcacaacattgctggcaccacccacagcggggctgagaaggatgtggatgtgtctgaggacagccccccacccctgcctgagaggaccccagagagctttgtgctggccagcgagcacaacacccctgtgcgctctgagtggagcgagctgcagagccaggagaggtctgagcagaagaagtctgagggcctcatcaccagtgaaaatgagaagtgtgaccaccctgctgggggcatccactatgagatgtgcattgaatgtcctcccaccttcagtgacaagcgggagcagatcagcgagaaccccacagaggccacagacattggatttggaaacagatgtgggaagcccaagggcccccgggacccccccagcgagtggacctag

SEQ ID NO: 49142 - DNA, 1632 bp, Artificial Sequence
  derived and/or modified sequence
atgatctgggagtacaacgtggtgatcatcgtgatggcctgccgggagtttgagatgggcaggaagaagtgtgagcgctactggcccctgtatggagaggaccccatcacctttgcccccttcaagatcagctgtgaagatgagcaggccaggacagactacttcatccgcaccctgctgctggagttccagaatgaaagccggcggctgtaccagttccactacgtgaactggccagaccatgatgtgcccagcagctttgacagcatcctggacatgatcagcctgatgaggaagtaccaggagcatgaagatgtgcccatctgcatccactgcagcgctggctgcggccgcactggagccatctgtgccatcgactacacctggaacctgctgaaggccggcaagatccctgaggagttcaacgtgttcaacctgatccaggagatgaggacccagaggcacagcgctgtgcagaccaaggagcagtatgagctggtgcaccgggccatcgcccagctgtttgagaagcagctgcagctgtatgagatccatggagcccagaagattgctgatggagtgaatgagatcaacacagagaacatggtgagcagcattgagcctgagaagcaggacagccccccacccaagccacccaggaccaggagctgcctggtggagggagatgccaaggaggagatcctgcagcccccagagccccaccctgtgccccccatcctgacccccagccccccatctgccttccccaccgtgaccaccgtgtggcaggacaatgaccgctaccaccccaagcctgtgctgcacatggtgtcctctgagcagcacagcgctgacctgaacagaaactacagcaagagcacagagctgcccgggaagaatgaaagcaccatcgagcagattgacaagaagctggagaggaacctgagctttgagatcaagaaggtgcccctgcaggagggccccaagagctttgatggcaacaccctgctgaacagaggacatgccatcaagatcaagagcgccagcccctgcatcgctgacaagatcagcaagccccaggagctgagcagtgacctgaatgtgggggacaccagccagaacagctgtgtggactgcagcgtgacccagagcaacaaggtgtctgtgaccccacctgaggagagccagaacagcgacaccccacccaggccagaccggctgcccctggatgagaagggccacgtgacctggagcttccacggcccagaaaatgccatccccatcccagacctgtctgagggcaacagcagtgacatcaactaccagaccaggaagacagtgtccctgacccccagccccaccacccaggtggagaccccagacctggtggaccatgacaacaccagccccctcttccgcacccccctgtccttcaccaaccccctgcacagtgatgacagcgacagtgatgagaggaacagtgatggagctgtgacccagaacaagaccaacatcagcacagccagcgccaccgtgtctgctgccaccagcacagagagcatcagcaccaggaaggtgctgcccatgagcatcgcccggcacaacagcaggaacaacaccttccgctgctag

SEQ ID NO: 49143 - DNA, 1986 bp, Artificial Sequence
  derived and/or modified sequence
atgatctgggagtacaacgtggtgatcatcgtgatggcctgccgggaattcgagatgggacggaaaaagtgcgagcgatactggcccctttacggagaggatccaatcacatttgcccctttcaaaatttcatgtgaggacgaacaagcccggacggactattttattagaacgttactcttggagtttcaaaatgagagccgtaggctgtaccaattccactacgtaaactggccggaccacgatgtgccttcttcttttgactccattctggatatgattagccttatgcggaagtaccaggagcatgaggatgtgcctatatgcatacattgttcggctgggtgtggcaggaccggcgccatctgcgccatcgattacacatggaacctcctgaaggccggcaagattcccgaagaatttaacgtgttcaacctgattcaggaaatgcggacccagaggcactctgcagtccagacaaaggaacaatatgagctggtgcaccgggccatcgcgcagctgtttgagaaacagctgcaactttatgaaatacatggggctcagaaaatcgccgatggagtgaatgaaatcaacacggagaacatggtcagcagcattgaaccagaaaagcaggactctcccccgcctaagcctccaaggacgaggtcatgcctagttgagggagacgctaaagaggagatacttcagccccccgaaccgcaccccgtgccgccgatcctcactccatccccccccagcgccttccctactgtcaccacagtgtggcaggacaatgaccgttaccatccgaagccagtccttcatatggtgtccagcgagcagcatagcgcagatctcaatcgaaattattctaagagtaccgagttgcctggcaaaaatgagtctacgattgaacaaattgacaaaaagcttgagaggaatttatcattcgaaattaaaaaggtgcccctccaggaaggcccgaagtctttcgatggaaataccctgctgaatcgcggccatgcgataaagatcaagagtgcctccccatgcattgccgacaagatatctaaaccacaagagctttcctccgaccttaatgtgggggacaccagtcagaattcctgtgtcgattgctctgtcactcaatcaaacaaagtatccgtgacgcctcccgaggagagccaaaattccgatacccctccacggccggatagactgcccttggacgagaaagggcacgtgacttggtcttttcacggtcccgaaaacgctattccaatcccagacctgtctgagggtaattcatctgacataaactatcagacgagaaagaccgtgagtctgaccccatcacccacaacacaagtggaaacgccggatctggttgaccacgataatacaagtcccctctttcgcactccccttagtttcacaaaccccctacactcggacgattctgattccgatgaaaggaactctgatggcgcagtcacccagaataagactaatatttcaaccgcgtctgccacggtttcagcagcaacgtccactgaaagcatatccaccaggaaagttttgcctatgagcatcgctagacataatattgccggaacaacccacagtggtgctgagaaggacgtagatgtgagcgaagactccccaccaccgctgcccgagaggacacccgagtcctttgtcttggcaagtgagcacaatactcctgtacgcagcgagtggtctgagcttcaaagccaggagaggagcgagcaaaagaagtccgagggcctgattacaagtgaaaatgagaaatgcgatcatccagctgggggcatccactatgaaatgtgcattgagtgccctcccacgttttccgacaagcgggagcagatctccgaaaaccccactgaagcgacagacatcgggtttgggaatcggtgcggcaagcccaagggccccagggatccaccatcggagtggacatag

SEQ ID NO: 49144 - DNA, 1632 bp, Artificial Sequence
  derived and/or modified sequence
atgatctgggagtacaacgtggtgatcatcgtgatggcctgccgggaatttgaaatgggtagaaaaaaatgtgagagatactggcctctgtatggagaggacccaataactttcgctcccttcaaaattagttgcgaagatgagcaagcaagaactgactattttattagaacactgttgctggagttccagaatgaatcccgtcggctttaccagttccactacgtcaactggcccgaccatgatgtgccaagttcattcgacagtatcctcgatatgatttctctgatgagaaagtaccaagaacacgaggacgtccctatctgtattcattgctctgccggttgtggcaggaccggagcgatatgcgccatcgattacacatggaatcttctgaaagccggaaagataccggaggaatttaacgtattcaacctgatccaagaaatgcggacccagcggcacagcgccgttcaaactaaggagcagtatgaactggttcaccgcgccatcgctcaactctttgagaagcagcttcagctctatgaaatacatggcgcacaaaaaatcgctgatggtgtcaatgagattaacactgagaacatggtctcatctattgaacctgaaaagcaggattccccaccaccaaagccgccccggacacgttcatgtttggtagaaggggacgctaaagaggagatcctccaacccccagagccccaccccgttcccccaattttgacacccagcccaccttcagcatttcccacagttacaacagtctggcaagacaatgatagatatcaccccaaacccgtgctgcacatggtgtcctcagagcagcactctgctgacttgaatagaaattactccaagtcaaccgagcttccgggcaagaacgaatcaaccattgaacagatagacaaaaagctggagagaaacctgagttttgaaatcaagaaagttccgttgcaggaaggaccgaagagtttcgatggcaataccctgttaaataggggacacgcaatcaagatcaaatctgcatccccatgtattgcagataaaatcagtaaacctcaagaactttcttcagacctcaacgttggagacacatcccaaaattcttgtgtggactgctcagtgactcagagcaataaggtgtccgtaactcctcccgaggagtcacagaacagtgacaccccacccagacccgataggctaccattagatgagaaaggacatgtgacctggagttttcacggacctgaaaacgctattcccatcccagacttaagtgaaggcaattcgtccgacatcaactatcagaccaggaaaactgtgagtctcactccctcacctactacgcaggttgagactcctgacctggttgatcatgataacacatcgccccttttccggacccccctttcattcacaaaccccctgcattctgacgattcggatagcgatgagcgaaattcagatggtgccgtcacacaaaacaaaacaaatatttccacagcgagtgctacagtatccgccgcaacatcaactgaatctatttccacaagaaaagttttaccaatgagcattgcccgtcataactcgcgcaacaatacttttaggtgctag

SEQ ID NO: 49145 - DNA, 1986 bp, Artificial Sequence
  derived and/or modified sequence
atgatttgggagtacaacgtcgtgatcattgtcatggcttgcagagaattcgagatgggcagaaaaaaatgcgagagatattggccgctctatggagaggaccctatcacattcgcccctttcaagatcagctgtgaagatgagcaggctcgtaccgactactttatccggaccctcctgctcgagttccagaatgaatctcgtcggctgtatcagttccactatgtcaactggccggaccatgatgtgcccagctcctttgattccatcctcgacatgatctcactgatgaggaaatatcaggagcatgaagacgtgcctatatgcatccattgctcagccggatgtgggaggacaggggcaatttgcgctatcgactatacttggaacctccttaaggccggtaagatccctgaagagttcaacgtgtttaacctgatccaggagatgagaacacaaaggcattctgcggtgcagaccaaggaacagtacgagcttgtgcaccgagcaatcgcacaactcttcgagaaacagctccagctgtatgaaatccacggtgcgcagaaaatcgcagacggcgtgaatgagattaacacagaaaacatggtgtcgtctatcgaacctgagaaacaggactctccccctccaaagccccctcgcacacggtcctgccttgtggagggagatgccaaagaggagattttgcaacctcctgagcctcatccggtgccccctatcctgacaccctccccgccaagtgcctttcccactgtcacaacagtctggcaagataacgacagataccatcctaagcccgtgctgcatatggtttcctctgagcagcatagtgctgatctgaatcggaactactccaagagtaccgagctccccggaaaaaacgagagcactattgagcaaatagacaaaaagctcgagagaaatctcagtttcgagatcaaaaaggtacccctgcaggaaggccctaagtccttcgacgggaacacgcttctgaatcgcggacacgcaatcaagatcaagagcgccagcccctgcatagccgataagatctccaagccccaggagctctcgtctgatttgaatgtcggcgacaccagccagaactcctgcgttgattgttctgttactcagtctaataaagttagtgtcactcccccagaggaatctcagaattcggatactccacctaggcccgatcgactaccgctggacgagaaaggacacgtgacctggagcttccatggtcccgaaaacgcaattcctattccagacttgagtgaggggaattcaagcgatataaactatcaaacccgcaagactgtgagcctgactccttcccccactactcaagtagagaccccagatttggtggaccacgataacacaagccctctgtttcgcactcctctgagctttacaaaccctctgcactccgacgatagcgatagcgatgaaaggaatagtgacggagcagtgacacagaacaagactaacatctctactgcatcagcaaccgttagtgccgcaacctctacagagtcaatttcaacacgcaaggtgttgccaatgagtattgctcgtcacaacatcgctggcacaactcacagcggggcagagaaagacgtggacgtctcggaggactctccccctccactgcctgagaggacacctgagtctttcgtcctggcaagcgagcataatacgccagtccggtccgagtggtctgagctgcagagccaggagagaagcgagcagaaaaagagcgaggggcttataacttcagaaaatgagaaatgcgatcacccagcgggagggatccattatgaaatgtgtatcgaatgcccccctactttctctgacaagagagagcagatttcagagaacccaaccgaggccacagatatcggatttgggaaccgctgtgggaagcctaaggggccaagggacccccctagcgagtggacctag

SEQ ID NO: 49146 - DNA, 1632 bp, Artificial Sequence
  derived and/or modified sequence
atgatttgggaatacaatgtggtgatcatagtgatggcatgccgcgaattcgagatgggcagaaaaaagtgcgagagatattggccattgtacggcgaggacccgattacttttgcacctttcaaaatctcctgcgaggacgaacaagcccgaactgattacttcatcagaactttgctgctcgagttccagaacgaatccagacggctgtaccaattccactacgtgaattggcctgaccacgacgtaccgtcatcatttgacagcatactggacatgattagcctgatgcgcaaatatcaagagcatgaagatgtgcccatctgtatccactgcagtgctggttgcgggcgtacgggggcaatatgcgctatcgactacacatggaatctcctgaaggctgggaagatcccagaagagttcaacgtattcaacctgatacaggagatgcgaacacagcgccacagtgcggttcagacaaaagaacaatacgagctggtccaccgcgcaatcgcacaactcttcgaaaaacagctccagctgtatgaaatacatggagcccagaaaattgcagacggggttaacgagatcaatacagaaaacatggtctcctcaattgagccagaaaaacaggattcccccccacccaagccacccaggaccagaagctgtctggtggagggcgacgcaaaggaagaaattctccagcctcctgaacctcaccctgtccctccaattcttacaccatctccaccaagtgcctttccaactgtcactaccgtgtggcaggacaatgaccggtaccaccctaagccagtccttcacatggtgtcatctgagcagcacagtgcagatctgaatcgcaattactccaaaagcacggaactcccgggtaagaacgagagcactatcgagcagatcgataaaaagttagagagaaacctgtcatttgaaatcaaaaaagtgcccttacaggaaggacccaagagtttcgatggcaataccttactgaataggggacacgctattaagataaaatctgcctcaccgtgtatcgctgataagattagcaagccgcaggagttaagctctgatctgaacgtcggggatacatcccaaaactcgtgcgtagattgcagcgtgactcaaagtaataaagtctcagtaacacctcccgaggagagccagaactcagatactcccccacgccctgaccgcctgcctctggatgagaaaggacacgtgacctggtcctttcacggccctgaaaacgctattccaattccagatctctctgaggggaattccagcgacataaattatcaaacccgtaagactgttagtctcacaccaagccctacaacacaggttgagacgcccgacctggttgatcatgacaacacttcccctctttttagaacccccctgagttttacgaaccccctgcacagcgatgacagcgacagtgacgagcggaatagcgacggggcagtgacgcagaacaagaccaatatatcaaccgcgagcgctaccgtgagcgcagctacatcgactgaatctataagcactcgcaaagttcttcctatgagcatcgcgagacataacagccgcaataacacttttaggtgttag

SEQ ID NO: 49147 - DNA, 1986 bp, Artificial Sequence
  derived and/or modified sequence
atgatctgggagtacaacgtggtgatcatcgtgatggcctgcagagagttcgagatgggcagaaagaagtgcgagagatactggcccctgtacggcgaggaccccatcaccttcgcccccttcaagatcagctgcgaggacgagcaggccagaaccgactacttcatcagaaccctgctgctggagttccagaacgagagcagaagactgtaccagttccactacgtgaactggcccgaccacgacgtgcccagcagcttcgacagcatcctggacatgatcagcctgatgagaaagtaccaggagcacgaggacgtgcccatctgcatccactgcagcgccggctgcggcagaaccggcgccatctgcgccatcgactacacctggaacctgctgaaggccggcaagatccccgaggagttcaacgtgttcaacctgatccaggagatgagaacccagagacacagcgccgtgcagaccaaggagcagtacgagctggtgcacagagccatcgcccagctgttcgagaagcagctgcagctgtacgagatccacggcgcccagaagatcgccgacggcgtgaacgagatcaacaccgagaacatggtgagcagcatcgagcccgagaagcaggacagccccccccccaagccccccagaaccagaagctgcctggtggagggcgacgccaaggaggagatcctgcagccccccgagccccaccccgtgccccccatcctgacccccagcccccccagcgccttccccaccgtgaccaccgtgtggcaggacaacgacagataccaccccaagcccgtgctgcacatggtgagcagcgagcagcacagcgccgacctgaacagaaactacagcaagagcaccgagctgcccggcaagaacgagagcaccatcgagcagatcgacaagaagctggagagaaacctgagcttcgagatcaagaaggtgcccctgcaggagggccccaagagcttcgacggcaacaccctgctgaacagaggccacgccatcaagatcaagagcgccagcccctgcatcgccgacaagatcagcaagccccaggagctgagcagcgacctgaacgtgggcgacaccagccagaacagctgcgtggactgcagcgtgacccagagcaacaaggtgagcgtgaccccccccgaggagagccagaacagcgacaccccccccagacccgacagactgcccctggacgagaagggccacgtgacctggagcttccacggccccgagaacgccatccccatccccgacctgagcgagggcaacagcagcgacatcaactaccagaccagaaagaccgtgagcctgacccccagccccaccacccaggtggagacccccgacctggtggaccacgacaacaccagccccctgttcagaacccccctgagcttcaccaaccccctgcacagcgacgacagcgacagcgacgagagaaacagcgacggcgccgtgacccagaacaagaccaacatcagcaccgccagcgccaccgtgagcgccgccaccagcaccgagagcatcagcaccagaaaggtgctgcccatgagcatcgccagacacaacatcgccggcaccacccacagcggcgccgagaaggacgtggacgtgagcgaggacagccccccccccctgcccgagagaacccccgagagcttcgtgctggccagcgagcacaacacccccgtgagaagcgagtggagcgagctgcagagccaggagagaagcgagcagaagaagagcgagggcctgatcaccagcgagaacgagaagtgcgaccaccccgccggcggcatccactacgagatgtgcatcgagtgcccccccaccttcagcgacaagagagagcagatcagcgagaaccccaccgaggccaccgacatcggcttcggcaacagatgcggcaagcccaagggccccagagacccccccagcgagtggacctag

SEQ ID NO: 49148 - DNA, 1632 bp, Artificial Sequence
  derived and/or modified sequence
atgatctgggagtacaacgtggtgatcatcgtgatggcctgcagagagttcgagatgggcagaaagaagtgcgagagatactggcccctgtacggcgaggaccccatcaccttcgcccccttcaagatcagctgcgaggacgagcaggccagaaccgactacttcatcagaaccctgctgctggagttccagaacgagagcagaagactgtaccagttccactacgtgaactggcccgaccacgacgtgcccagcagcttcgacagcatcctggacatgatcagcctgatgagaaagtaccaggagcacgaggacgtgcccatctgcatccactgcagcgccggctgcggcagaaccggcgccatctgcgccatcgactacacctggaacctgctgaaggccggcaagatccccgaggagttcaacgtgttcaacctgatccaggagatgagaacccagagacacagcgccgtgcagaccaaggagcagtacgagctggtgcacagagccatcgcccagctgttcgagaagcagctgcagctgtacgagatccacggcgcccagaagatcgccgacggcgtgaacgagatcaacaccgagaacatggtgagcagcatcgagcccgagaagcaggacagccccccccccaagccccccagaaccagaagctgcctggtggagggcgacgccaaggaggagatcctgcagccccccgagccccaccccgtgccccccatcctgacccccagcccccccagcgccttccccaccgtgaccaccgtgtggcaggacaacgacagataccaccccaagcccgtgctgcacatggtgagcagcgagcagcacagcgccgacctgaacagaaactacagcaagagcaccgagctgcccggcaagaacgagagcaccatcgagcagatcgacaagaagctggagagaaacctgagcttcgagatcaagaaggtgcccctgcaggagggccccaagagcttcgacggcaacaccctgctgaacagaggccacgccatcaagatcaagagcgccagcccctgcatcgccgacaagatcagcaagccccaggagctgagcagcgacctgaacgtgggcgacaccagccagaacagctgcgtggactgcagcgtgacccagagcaacaaggtgagcgtgaccccccccgaggagagccagaacagcgacaccccccccagacccgacagactgcccctggacgagaagggccacgtgacctggagcttccacggccccgagaacgccatccccatccccgacctgagcgagggcaacagcagcgacatcaactaccagaccagaaagaccgtgagcctgacccccagccccaccacccaggtggagacccccgacctggtggaccacgacaacaccagccccctgttcagaacccccctgagcttcaccaaccccctgcacagcgacgacagcgacagcgacgagagaaacagcgacggcgccgtgacccagaacaagaccaacatcagcaccgccagcgccaccgtgagcgccgccaccagcaccgagagcatcagcaccagaaaggtgctgcccatgagcatcgccagacacaacagcagaaacaacaccttcagatgctag

SEQ ID NO: 49149 - protein, 818 aa, Artificial Sequence
  derived and/or modified sequence
MFSQQQQQQLQQQQQQLQQLQQQQLQQQQLQQQQLLQLQQLLQQSPPQAPLPMAVSRGLPPQQPQQPLLNLQGTNSASLLNGSMLQRALLLQQLQGNLRGYGMASPGLAAPSLTPPQLATPNLQQFFPQATRQSLLGPPPVGVPMNPSQFNLSGRNPQKQARTSSSTTPNRKDSSSQTMPVEDKSDPPEGSEEAAEPRMDTPEDQDLPPCPEDIAKEKRTPAPEPEPCEASELPAKRLRSSEEPTEKEPPGQLQVKAQPQARMTVPKQTQTPDLLPEALEAQVLPRFQPRVLQVQAQVQSQTQPRIPSTDTQVQPKLQKQAQTQTSPEHLVLQQKQVQPQLQQEAEPQKQVQPQVHTQAQPSVQPQEHPPAQVSVQPPEQTHEQPHTQPQVSLLAPEQTPVVVHVCGLEMPPDAVEAGGGMEKTLPEPVGTQVSMEEIQNESACGLDVGECENRAREMPGVWGAGGSLKVTILQSSDSRAFSTVPLTPVPRPSDSVSSTPAATSTPSKQALQFFCYICKASCSSQQEFQDHMSEPQHQQRLGEIQHMSQACLLSLLPVPRDVLETEDEEPPPRRWCNTCQLYYMGDLIQHRRTQDHKIAKQSLRPFCTVCNRYFKTPRKFVEHVKSQGHKDKAKELKSLEKEIAGQDEDHFITVDAVGCFEGDEEEEEDDEDEEEIEVEEELCKQVRSRDISREEWKGSETYSPNTAYGVDFLVPVMGYICRICHKFYHSNSGAQLSHCKSLGHFENLQKYKAAKNPSPTTRPVSRRCAINARNALTALFTSSGRPPSQPNTQDKTPSKVTARPSQPPLPRRSTRLKT

SEQ ID NO: 49150 - DNA, 522 bp, Artificial Sequence
  derived and/or modified sequence
atgggagacctgccatgggcacctccagaggcacaggccccatccaccgctggagctggagatgtagctgagcaccaggttgctcccgctcgttttctccaaggcgcttggaggcaggcagccggatggctttgtcgagagacaggagccgctcctggatcagctcaagcaggtcccccagagactgcccatgccgcagatccacaaccaagaggaccccaggcccctcccagattgccaccatcactgtccccagagagggtccatccgggacaacccgcagcgcctgctgaacccgctccaggagcaccggctcttcggagtgggccaagtcagcctcgcggtcttcggctgcctgtgcccgtgcccgcatgcgctggctcgagcgcacctggctcgcctgcagcgctgccggactcctacccctggcctccccctgcaagaaaccggccagcaaccctgccccctacttctcgcgtgtcccccttagctgcctttctggcctcggcaccccagcgctag

SEQ ID NO: 49151 - protein, 431 aa, Artificial Sequence
  derived and/or modified sequence
MERRRITSAARRSYVSSGEMMVGGLAPGRRLGPGTRLSLARMPPPLPTRVDFSLAGALNAGFKETRASERAEMMELNDRFASYIEKVRFLEQQNKALAAELNQLRAKEPTKLADVYQAELRELRLRLDQLTANSARLEVERDNLAQDLATVRQKLQDETNLRLEAENNLAAYRQEADEATLARLDLERKIESLEEEIRFLRKIHEEEVRELQEQLARQQVHVELDVAKPDLTAALKEIRTQYEAMASSNMHEAEEWYRSKFADLTDAAARNAELLRQAKHEANDYRRQLQSLTCDLESLRGTNESLERQMREQEERHVREAASYQEALARLEEEGQSLKDEMARHLQEYQDLLNVKLALDIEIATYRKLLEGEENRITIPVQTFSNLQIRGGKSTKDGENHKVTRYLKSLTIRVIPIQAHQIVNGTPPARG

SEQ ID NO: 49152 - DNA, 540 bp, Artificial Sequence
  derived and/or modified sequence
atggaacggaggcgaattacttcagctgcccgtagatcctacgtgagctcaggagaaatgatggtggggggtctagcccccggaaggcggttggggcccggtactcgcttaagcttagccagaatgccgcctccactcccaacgcgtgtggatttcagcctggccggggccctgaatgccggatttaaggaaacccgagcctccgaacgcgccgagatgatggagctgaatgatcgcttcgccagttacatcgaaaaggtgcggttcctagagcaacagaacaaggcattggcagcggaactgaaccagttgagggcgaaagaacccacgaagctcgctgatgtttaccaggccgagttgcgagaactccgactgcggctggatcagctgaccgcaaatagcgcacggctggaagtcgagagggataacttggcccaagatctggcgacagtgagacaaaagaagcaaatgaaacccccttggccagtttggatctggcggggccgcctgagccgttggcggcggagaagcggctcctag

SEQ ID NO: 49153 - DNA, 1296 bp, Artificial Sequence
  derived and/or modified sequence
atggagcgtaggcggatcacctccgcagctcgacggtcttacgtgtcttcaggcgagatgatggtcggcggcctcgctcccgggcggagattggggccaggaacccgcttatctctcgcccgtatgccaccgcccctgcccactagggtggatttcagcctggcaggagcactcaacgcgggttttaaggaaacacgcgcaagcgaacgcgcagagatgatggagctgaacgacaggttcgcatcctacattgaaaaggttagattcctggagcaacagaataaggcccttgctgcggagctgaaccagctccgcgccaaggagcctactaaacttgctgatgtctatcaagccgagttgcgtgagctgagactgagactggatcagctgactgccaatagcgcacgactagaagtagaaagggataatctggctcaggatctggctacggttcggcagaagttgcaggacgaaacaaacctccgactcgaagcagaaaacaaccttgcagcttaccgacaagaggccgatgaggccactttggctaggttagatctggaaaggaagattgaatctttagaagaagagatcaggttcctacggaagatccacgaggaggaggtgcgcgagctccaggagcaattggcccgccagcaggtccatgtggaactcgatgtcgcaaaacccgacctgacagccgccctcaaggagatcagaacgcagtatgaggcaatggctagcagcaatatgcacgaggcagaggagtggtaccgatctaaatttgccgacctgacagacgcagccgcacggaatgctgaacttctgcggcaggcaaagcatgaggctaatgactacagacggcagctccaaagtttaacttgcgacctcgaatcactgaggggtacaaatgagtcattggaacgacaaatgagagagcaggaggagcgccacgtccgggaggccgcatcctaccaggaggccctggcccggttggaggaagagggacagagcctgaaggacgaaatggcccggcatttgcaggagtatcaggatctcttgaatgtaaaactcgctctggacatcgagatcgccacttatcgcaagctcctggagggcgaagagaataggataactatcccggttcagacattttctaacctgcagattcgggggggcaagagcacaaaagatggtgagaaccataaggtcactcggtacctgaagtcactcaccatacgcgtgatccccatccaagcccaccagattgttaacggcacgcccccagcccgaggctag

SEQ ID NO: 49154 - DNA, 1817 bp, Artificial Sequence
  derived and/or modified sequence
agtctagcccactccttcataaagccctcgcatcccaggagcgagcagagccagagcaggatggagaggagacgcatcacctccgctgctcgccgctcctacgtctcctcaggggagatgatggtggggggcctggctcctggccgccgtctgggtcctggcacccgcctctccctggctcgaatgccccctccactcccgacccgggtggatttctccctggctggggcactcaatgctggcttcaaggagacccgggccagtgagcgggcagagatgatggagctcaatgaccgctttgccagctacatcgagaaggttcgcttcctggaacagcaaaacaaggcgctggctgctgagctgaaccagctgcgggccaaggagcccaccaagctggcagacgtctaccaggctgagctgcgagagctgcggctgcggctcgatcaactcaccgccaacagcgcccggctggaggttgagagggacaatctggcacaggacctggccactgtgaggcagaagctccaggatgaaaccaacctgaggctggaagccgagaacaacctggctgcctatagacaggaagcagatgaagccaccctggcccgtctggatctggagaggaagattgagtcgctggaggaggagatccggttcttgaggaagatccacgaggaggaggttcgggaactccaggagcagctggcccgacagcaggtccatgtggagcttgacgtggccaagccagacctcaccgcagccctgaaagagatccgcacgcagtatgaggcaatggcgtccagcaacatgcatgaagccgaagagtggtaccgctccaagtttgcagacctgacagacgctgctgcccgcaacgcggagctgctccgccaggccaagcacgaagccaacgactaccggcgccagttgcagtccttgacctgcgacctggagtctctgcgcggcacgaacgagtccctggagaggcagatgcgcgagcaggaggagcggcacgtgcgggaggcggccagttatcaggaggcgctggcgcggctggaggaagaggggcagagcctcaaggacgagatggcccgccacttgcaggagtaccaggacctgctcaatgtcaagctggccctggacatcgagatcgccacctacaggaagctgctagagggcgaggagaaccggatcaccattcccgtgcagaccttctccaacctgcagattcgagggggcaaaagcaccaaagacggggaaaatcacaaggtcacaagatatctcaaaagcctcacaatacgagttataccaatacaggctcaccagattgtaaatggaacgccgccggctcgcggttagctgcctgcctctcagacacggcgctttgcccagcttgacagggagtgagcctcacccaccccatcctcccaatccccctgagttccctcttcccaggcttcccctaaagggcctggactgcgtcattttcccaggaactgcagtgcccagcccaggacgtggtacagagtaactgtacattaaactggcagagcttgttagtggtaaaggtggtgagtccttgggtgcgcagtggagctgctctggggcctctgagcaagcagcagcctctgtctcacctcttcctgtcactgggagggccccttgggtctcgctgtgcctggacgccaggctctctgctttattctttcatccctgaggctccatcgctcagctcagtgctgactcagttcagaggattcttccctcaggaccgcagctcttgcagtgaataaagttttatgttccctgctcttaatgtt

SEQ ID NO: 49155 - DNA, 540 bp, Artificial Sequence
  derived and/or modified sequence
atggagcggcggcgcatcaccagcgctgcccggcgctcctatgtgtcctctggagagatgatggtgggcggcctggcccctggaagaaggctgggccctggcacccggctgagcctggccaggatgcccccacccctgcccaccagggtggacttcagcctggccggggccctgaatgccggcttcaaggagacccgggccagcgagagagctgagatgatggagctgaatgacagatttgccagctacatcgagaaggtgcgcttcctggagcagcagaacaaggccctggccgctgagctgaaccagctgcgggccaaggagcccaccaagctggctgatgtgtaccaggccgagctgcgggagctgcggctgcggctggaccagctgacagccaacagcgcccggctggaggtggagcgggacaacctggcccaggacctggccaccgtgcggcagaagaagcagatgaagccaccctggcctgtgtggatctggaggggccgcctgagccgctggaggagaagaagtggcagctag

SEQ ID NO: 49156 - DNA, 1296 bp, Artificial Sequence
  derived and/or modified sequence
atggagcggcggcgcatcaccagcgctgcccggcgctcctatgtgtcctctggagagatgatggtgggcggcctggcccctggaagaaggctgggccctggcacccggctgagcctggccaggatgcccccacccctgcccaccagggtggacttcagcctggccggggccctgaatgccggcttcaaggagacccgggccagcgagagagctgagatgatggagctgaatgacagatttgccagctacatcgagaaggtgcgcttcctggagcagcagaacaaggccctggccgctgagctgaaccagctgcgggccaaggagcccaccaagctggctgatgtgtaccaggccgagctgcgggagctgcggctgcggctggaccagctgacagccaacagcgcccggctggaggtggagcgggacaacctggcccaggacctggccaccgtgcggcagaagctgcaggatgagaccaacctgcggctggaggccgagaacaacctggccgcctaccggcaggaggctgatgaggccaccctggcccggctggacctggagaggaagattgagagcctggaggaggagatccgcttcctgaggaagatccacgaggaggaggtgcgggagctgcaggagcagctggcccggcagcaggtgcacgtggagctggatgtggccaagccagacctgacagctgccctgaaggagatccgcacccagtatgaggccatggccagcagcaacatgcatgaagctgaggagtggtaccgcagcaagtttgctgacctgacagatgctgctgccagaaatgctgagctgctgcggcaggccaagcatgaggccaatgactaccgccggcagctgcagagcctgacctgtgacctggagagcctgcggggcaccaatgaaagcctggagcggcagatgagggagcaggaggagagacatgtgcgggaggccgccagctaccaggaggccctggcccggctggaggaggagggccagagcctgaaggatgagatggcccggcacctgcaggagtaccaggacctgctgaatgtgaagctggccctggacattgaaattgccacctacaggaagctgctggagggggaggagaaccgcatcaccatccctgtgcagaccttcagcaacctgcagatccggggcggcaagagcaccaaggatggagagaaccacaaggtgacccgctacctgaagagcctgaccatccgggtcatccccatccaggcccaccagatcgtgaatggcaccccaccagcccggggctag

SEQ ID NO: 49157 - DNA, 540 bp, Artificial Sequence
  derived and/or modified sequence
atggagcggcggcggatcaccagcgccgcccggcggagctacgtgtcctcaggtgagatgatggtgggcggcttggccccgggcagaagactagggcccggaacccggttgagtctggctaggatgcctccccccctgccgactagagttgacttcagccttgcaggagcactcaatgctggttttaaagaaacccgggctagcgaacgagctgaaatgatggaacttaatgacagatttgctagctatatcgaaaaggtacgtttcctcgagcagcagaacaaggcactggcagccgagcttaatcaactcagggcaaaagagcccacaaaactggctgacgtctaccaggctgagttacgtgagctgcggctgcggctggaccagcttacagccaatagtgcccggctcgaagtagagagagataatttagctcaggacctggccacagtccgccaaaagaagcagatgaaaccgccctggcctgtatggatatggagaggcagactgagtcgatggcggcgtaggagtggcagctag

SEQ ID NO: 49158 - DNA, 1296 bp, Artificial Sequence
  derived and/or modified sequence
atggagcggcggcggatcaccagcgccgcccggcggagctacgtgtcatctggggaaatgatggtgggcgggctggccccaggccggaggttgggtcctgggacccgcctgagcctcgcccgcatgccgccccccctgccaaccagagtggatttttccttggctggagctctgaatgctgggtttaaagagacacgagcttctgagcgcgcagagatgatggagctgaatgatcgctttgcttcgtatatcgagaaggtgaggtttctggaacagcagaataaagctctggccgcagagcttaaccagctcagggcaaaggagccaactaagctggccgatgtatatcaggctgagctgcgagagttgcgtttaaggctggaccagctaacagccaattctgctcgcctcgaggttgagcgggacaacctagcgcaagatctagctacagtgagacagaagctgcaagatgagacaaatcttcggcttgaagctgagaacaatctggccgcgtacaggcaagaggccgacgaggctaccctcgcgagacttgacctggagaggaagatcgaatcactggaggaagagattaggtttctccggaaaatccacgaggaggaagtgcgtgagctccaagaacagctggctcggcagcaggtgcatgttgagctggacgtcgctaagcccgacctcactgctgctctgaaagagatcagaacacagtatgaagctatggcttcgtcgaacatgcacgaagctgaagagtggtaccgtagcaagttcgctgatcttaccgacgcagctgcccgaaacgccgaactattgagacaggcaaagcacgaggcgaacgattaccggcgtcaattgcagtctcttacctgcgacctggagtccttgaggggaaccaatgagagcttggaaagacaaatgagagaacaggaggagcgccacgttcgagaggccgcatcgtaccaggaggctctggccagactggaagaggagggccagtccttaaaggacgaaatggcccgtcacctccaggaataccaggatctgctgaacgtcaagttagctctggatatcgagatagcgacctaccgcaagctgctggaaggggaggagaatcgcattaccatccctgtgcaaacattctctaacctgcagatccgcggggggaaatccaccaaggatggggagaatcataaagtaacaagatatcttaagtccctgacaattagggtcattcccatccaagctcatcaaatagtcaatggcactccccccgcaagggggtag

SEQ ID NO: 49159 - DNA, 540 bp, Artificial Sequence
  derived and/or modified sequence
atggaacgcagaagaattactagcgccgctagaaggtcttacgtgtccagtggcgagatgatggtggggggtctcgcccctggtagacgattgggccctggtactagactgtcacttgccagaatgccaccccctctgcccacgcgcgtcgacttctccttggccggagcgctgaatgccggattcaaagaaacgagagcatctgagcgggctgaaatgatggaactgaatgataggtttgccagttacattgaaaaggtgcggttcttggagcagcaaaataaagccctcgctgctgagctcaaccagttgcgggcaaaagagcccactaaactggctgacgtgtatcaggcagaactgagagaactgcggttaagactcgatcagctgactgccaactccgctcggcttgaggtggagcgcgacaacctggcgcaggacctcgccacggtcaggcaaaaaaagcagatgaagcctccatggcctgtgtggatatggagaggtagactgagcaggtggcgtcggagaagtggcagctag

SEQ ID NO: 49160 - DNA, 1296 bp, Artificial Sequence
  derived and/or modified sequence
atggaacggagacgcatcaccagtgccgctagacggtcttatgtgtcctctggggagatgatggtcggaggcctcgcaccaggccgtagactgggcccaggcacaagattgtccctcgcacgcatgccccctcctctccccactcgggtggatttttccctagccggagcactaaacgcagggtttaaggagaccagagcctcagaacgcgcagaaatgatggagctgaatgacagattcgcaagctatattgagaaggtgcgtttcttggagcaacagaataaggctttagctgctgagttgaaccaactgcgcgctaaggaaccgacaaagctcgccgatgtttatcaagccgagctcagagaattgcggctccgacttgatcaactgaccgcaaattctgccaggttggaggtagagcgggataaccttgctcaggatctggcaactgtgcgtcaaaaactccaggacgagaccaacctgaggttggaggccgagaacaatctggctgcctatagacaggaagccgacgaagccactctagcccgacttgacttagagaggaagatcgaatccctggaggaggaaatacgattcctacgcaaaattcacgaggaggaggtgcgggaactccaggaacagcttgccagacagcaggtgcatgttgagctcgacgtggctaagcccgatctgaccgccgcactaaaagaaatccgcactcagtatgaagctatggctagcagcaatatgcacgaggccgaagagtggtaccgctccaagttcgccgatctgactgatgccgcagcgaggaacgctgaactgctgagacaggcgaagcacgaagcaaacgattatagaaggcagctgcagtcgctaacatgtgacttggagagcctccgaggcaccaatgaatcgctggaaaggcaaatgcgggaacaggaggaacggcatgttcgagaggccgcttcctaccaggaggcgctggccagactggaggaagagggtcagtccctaaaggacgagatggcccgacatctgcaggagtaccaggatctgctgaacgtcaaattagccttggacatagaaattgccacttatcgcaagttactggaaggggaggagaatcggatcactatcccggtacagactttctcaaacctgcagatccgagggggtaagtctaccaaagatggagaaaaccacaaagtgacgcggtacctcaagtcactgaccatcagagtcattccaattcaagcacaccaaattgtgaatggaacacctcccgcacgcggatag

SEQ ID NO: 49161 - DNA, 540 bp, Artificial Sequence
  derived and/or modified sequence
atggagagaagaagaatcaccagcgccgccagaagaagctacgtgagcagcggcgagatgatggtgggcggcctggcccccggcagaagactgggccccggcaccagactgagcctggccagaatgcccccccccctgcccaccagagtggacttcagcctggccggcgccctgaacgccggcttcaaggagaccagagccagcgagagagccgagatgatggagctgaacgacagattcgccagctacatcgagaaggtgagattcctggagcagcagaacaaggccctggccgccgagctgaaccagctgagagccaaggagcccaccaagctggccgacgtgtaccaggccgagctgagagagctgagactgagactggaccagctgaccgccaacagcgccagactggaggtggagagagacaacctggcccaggacctggccaccgtgagacagaagaagcagatgaagcccccctggcccgtgtggatctggagaggcagactgagcagatggagaagaagaagcggcagctag

SEQ ID NO: 49162 - DNA, 1296 bp, Artificial Sequence
  derived and/or modified sequence
atggagagaagaagaatcaccagcgccgccagaagaagctacgtgagcagcggcgagatgatggtgggcggcctggcccccggcagaagactgggccccggcaccagactgagcctggccagaatgcccccccccctgcccaccagagtggacttcagcctggccggcgccctgaacgccggcttcaaggagaccagagccagcgagagagccgagatgatggagctgaacgacagattcgccagctacatcgagaaggtgagattcctggagcagcagaacaaggccctggccgccgagctgaaccagctgagagccaaggagcccaccaagctggccgacgtgtaccaggccgagctgagagagctgagactgagactggaccagctgaccgccaacagcgccagactggaggtggagagagacaacctggcccaggacctggccaccgtgagacagaagctgcaggacgagaccaacctgagactggaggccgagaacaacctggccgcctacagacaggaggccgacgaggccaccctggccagactggacctggagagaaagatcgagagcctggaggaggagatcagattcctgagaaagatccacgaggaggaggtgagagagctgcaggagcagctggccagacagcaggtgcacgtggagctggacgtggccaagcccgacctgaccgccgccctgaaggagatcagaacccagtacgaggccatggccagcagcaacatgcacgaggccgaggagtggtacagaagcaagttcgccgacctgaccgacgccgccgccagaaacgccgagctgctgagacaggccaagcacgaggccaacgactacagaagacagctgcagagcctgacctgcgacctggagagcctgagaggcaccaacgagagcctggagagacagatgagagagcaggaggagagacacgtgagagaggccgccagctaccaggaggccctggccagactggaggaggagggccagagcctgaaggacgagatggccagacacctgcaggagtaccaggacctgctgaacgtgaagctggccctggacatcgagatcgccacctacagaaagctgctggagggcgaggagaacagaatcaccatccccgtgcagaccttcagcaacctgcagatcagaggcggcaagagcaccaaggacggcgagaaccacaaggtgaccagatacctgaagagcctgaccatcagagtgatccccatccaggcccaccagatcgtgaacggcaccccccccgccagaggctag

SEQ ID NO: 49163 - DNA, 345 bp, Artificial Sequence
  derived and/or modified sequence
atggccatgagagagttagtggaagccgagtgcgggggcgcaaatccccttatgaagttggctggacatttcacacaggataaagcgttacgacaggagggactcaggccaggtccttggcctcctggtgcaccagcatcagaggcagcatctaagccgctgggggtcgcctccgaagacgaactggtggctgaattcctccaggaccagaacgctccgctagtctcgagagctccacagacatttaaaatggatgatctgcttgcagagatgcagcagattgaacagagcaatttcaggcaggccccacagcgggctcctggggtcgccgatctggcgctttag

SEQ ID NO: 49164 - DNA, 309 bp, Artificial Sequence
  derived and/or modified sequence
atggccatgcgagaattggtggaagccgagtgcggcggcgcaaacccactcatgaagctggctggccactttacccaagacaaggccctgagacaggaagggttacggcccgggccctggccccccggggctcctgcatcagaggctgcctccaagccacttggtgtagcctctgaagacgagttggttgccgaattcctacaggaccaaaatgccccccttgtgagtagagctcctcagaccttcaagatggacgatctgctcgctgagatgcagcagatcgaacagagtaattttcggcaggcatag

SEQ ID NO: 49165 - DNA, 315 bp, Artificial Sequence
  derived and/or modified sequence
atggcaatgcgggagcttgtggaagctgaatgcggaggggccaatcctttgatgaaactcgcaggccactttacacaggacaaggcactcaggcaggaagggctgcggcccgggccttggcccccaggggcgcccgctagcgaggccgcttccaagccactaggtgtagcgtcagaggacgaactagtggcggaattcctccaggaccagaatgcgccacttgtcagtcgggctccccaaacctttaagatggatgatcttctggccgagatgcagcagatagagcagtcaaactttagacaagccccccagtag

SEQ ID NO: 49166 - DNA, 345 bp, Artificial Sequence
  derived and/or modified sequence
atggccatgagggagctggtggaggccgagtgtggcggggccaaccccctgatgaagctggccggccacttcacccaggacaaggccctgcggcaggagggcctgcggcccggcccctggcccccaggggccccagccagcgaggccgccagcaagcccctgggcgtggcctctgaagatgagctggtggccgagttcctgcaggaccagaatgcccccctggtgtcccgggccccccagaccttcaagatggatgacctgctggccgagatgcagcagatcgagcagagcaacttccggcaggccccccagagggcccctggggtggccgacctggccctgtag

SEQ ID NO: 49167 - DNA, 309 bp, Artificial Sequence
  derived and/or modified sequence
atggccatgagggagctggtggaggccgagtgtggcggggccaaccccctgatgaagctggccggccacttcacccaggacaaggccctgcggcaggagggcctgcggcccggcccctggcccccaggggccccagccagcgaggccgccagcaagcccctgggcgtggcctctgaagatgagctggtggccgagttcctgcaggaccagaatgcccccctggtgtcccgggccccccagaccttcaagatggatgacctgctggccgagatgcagcagatcgagcagagcaacttccggcaggcctag

SEQ ID NO: 49168 - DNA, 315 bp, Artificial Sequence
  derived and/or modified sequence
atggccatgagggagctggtggaggccgagtgtggcggggccaaccccctgatgaagctggccggccacttcacccaggacaaggccctgcggcaggagggcctgcggcccggcccctggcccccaggggccccagccagcgaggccgccagcaagcccctgggcgtggcctctgaagatgagctggtggccgagttcctgcaggaccagaatgcccccctggtgtcccgggccccccagaccttcaagatggatgacctgctggccgagatgcagcagatcgagcagagcaacttccggcaggccccccagtag

SEQ ID NO: 49169 - DNA, 345 bp, Artificial Sequence
  derived and/or modified sequence
atggccatgcgggagctggtggaggccgagtgcggcggcgccaaccctctcatgaaacttgcgggacatttcacccaggacaaagcgttgcggcaggaagggctaagacctgggccctggccacctggggcgcctgcaagtgaggcagctagtaaacccttaggtgtagctagcgaagatgaacttgtcgccgagttcctgcaggaccagaacgcccccttggtgtctcgtgcccctcaaaccttcaagatggacgacctactggccgagatgcagcagatcgaacagtctaatttccgccaagcacctcagcgagcccccggggtcgccgacctggccttatag

SEQ ID NO: 49170 - DNA, 309 bp, Artificial Sequence
  derived and/or modified sequence
atggccatgcgggagctggtggaggccgagtgcggcggcgccaaccctcttatgaaattggcaggccacttcacacaggacaaagctctacggcaggaaggcttaaggccaggaccatggccacccggggcgccggctagtgaggccgcctctaagcccctgggggtggccagcgaggacgagttggtagcggagttcctgcaagatcagaacgctcccctcgtaagccgcgctccgcaaacgtttaagatggatgatctcctagctgaaatgcagcagatcgaacagtccaactttagacaggcctag

SEQ ID NO: 49171 - DNA, 315 bp, Artificial Sequence
  derived and/or modified sequence
atggccatgcgggagctggtggaggccgagtgcggcggcgccaacccgttaatgaagctggccggccatttcacgcaggacaaagccttacgtcaggagggccttagacctgggccatggccccctggagcccccgccagcgaggcggcttcgaagccactgggggttgccagtgaggacgagctggtggccgagtttctccaggaccagaatgctcccctggtgtcccgtgccccccagacctttaagatggatgaccttctggccgagatgcagcagatagaacaatctaacttccggcaagcaccacagtag

SEQ ID NO: 49172 - DNA, 345 bp, Artificial Sequence
  derived and/or modified sequence
atggctatgagggaattggtcgaggccgagtgcggcggagccaaccctctcatgaagctcgcaggccatttcacacaggacaaggccctgagacaagagggcctcaggcctgggccatggcctcctggcgcacccgcaagtgaggcagctagcaaacccctgggagtcgctagtgaggatgagctggtggccgagtttttgcaggaccaaaatgcgccactggtctcccgggctccccaaacctttaaaatggatgatctgctggctgaaatgcagcagattgaacagtctaatttcaggcaggcgccacaaagagccccaggcgttgcagacttagcgctctag

SEQ ID NO: 49173 - DNA, 309 bp, Artificial Sequence
  derived and/or modified sequence
atggccatgagggagctggtggaagcagagtgcggcggtgctaatccgctgatgaagttggccggacattttacccaggacaaggccctcaggcaagaaggattaagacctggcccatggcctcctggggctcctgccagtgaagccgcttcgaagcccttgggcgtggcatctgaagacgaactcgtagcggaatttcttcaggatcagaacgccccactggtgtctagagcacctcagacctttaaaatggacgacctgctagctgagatgcagcaaatagagcagtcgaactttagacaggcctag

SEQ ID NO: 49174 - DNA, 315 bp, Artificial Sequence
  derived and/or modified sequence
atggcgatgagggaattagtggaagctgaatgcgggggtgccaaccccctgatgaagcttgcgggtcacttcacccaggacaaggccctgagacaggagggactgcgtcctggtccttggccccctggtgccccagctagtgaggcagcttctaagccattgggagtggcttcagaggacgagctggtcgccgagtttctgcaggaccagaatgcacccttagttagccgcgcaccgcaaacctttaaaatggatgacctgctggccgagatgcagcagattgagcagtccaactttagacaggctccccaatag

SEQ ID NO: 49175 - DNA, 345 bp, Artificial Sequence
  derived and/or modified sequence
atggccatgagagagctggtggaggccgagtgcggcggcgccaaccccctgatgaagctggccggccacttcacccaggacaaggccctgagacaggagggcctgagacccggcccctggccccccggcgcccccgccagcgaggccgccagcaagcccctgggcgtggccagcgaggacgagctggtggccgagttcctgcaggaccagaacgcccccctggtgagcagagccccccagaccttcaagatggacgacctgctggccgagatgcagcagatcgagcagagcaacttcagacaggccccccagagagcccccggcgtggccgacctggccctgtag

SEQ ID NO: 49176 - DNA, 309 bp, Artificial Sequence
  derived and/or modified sequence
atggccatgagagagctggtggaggccgagtgcggcggcgccaaccccctgatgaagctggccggccacttcacccaggacaaggccctgagacaggagggcctgagacccggcccctggccccccggcgcccccgccagcgaggccgccagcaagcccctgggcgtggccagcgaggacgagctggtggccgagttcctgcaggaccagaacgcccccctggtgagcagagccccccagaccttcaagatggacgacctgctggccgagatgcagcagatcgagcagagcaacttcagacaggcctag

SEQ ID NO: 49177 - DNA, 315 bp, Artificial Sequence
  derived and/or modified sequence
atggccatgagagagctggtggaggccgagtgcggcggcgccaaccccctgatgaagctggccggccacttcacccaggacaaggccctgagacaggagggcctgagacccggcccctggccccccggcgcccccgccagcgaggccgccagcaagcccctgggcgtggccagcgaggacgagctggtggccgagttcctgcaggaccagaacgcccccctggtgagcagagccccccagaccttcaagatggacgacctgctggccgagatgcagcagatcgagcagagcaacttcagacaggccccccagtag

SEQ ID NO: 49178 - protein, 246 aa, Artificial Sequence
  derived and/or modified sequence
MPHSVTLRGPSPWGFRLVGGRDFSAPLTISRVHAGSKAALAALCPGDLIQAINGESTELMTHLEAQNRIKGCHDHLTLSVSRPEGRSWPSAPDDSKAQAHRIHIDPEIQDGSPTTSRRPSGTGTGPEDGRPSLGSPYGQPPRFPVPHNGSSEATLPAQMSTLHVSPPPSADPARGLPRSRDCRVDLGSEVYRMLREPAEPVAAEPKQSGSFRYLQGMLEAGEGGAPSSRHGTSSTIPSASCAVTAA

SEQ ID NO: 49179 - DNA, 204 bp, Artificial Sequence
  derived and/or modified sequence
atgaggaagccccaggccggcaccggggaggccgcccgggaccccagcctgcggcctgccaggacagtgctggtgggggaccaggatgagtacacagctgctgagaacaagagcccccggggcaccctgtgccccaccggggagcagaggatccacgccagagaagatgcctgcatcttcagccgcctcttcagcgagaagtag

SEQ ID NO: 49180 - DNA, 741 bp, Artificial Sequence
  derived and/or modified sequence
atgccccacagcgtgaccctgagaggccccagcccctggggcttcagactggtgggcggcagagacttcagcgcccccctgaccatcagcagagtgcacgccggcagcaaggccgccctggccgccctgtgccccggcgacctgatccaggccatcaacggcgagagcaccgagctgatgacccacctggaggcccagaacagaatcaagggctgccacgaccacctgaccctgagcgtgagcagacccgagggcagaagctggcccagcgcccccgacgacagcaaggcccaggcccacagaatccacatcgaccccgagatccaggacggcagccccaccaccagcagaagacccagcggcaccggcaccggccccgaggacggcagacccagcctgggcagcccctacggccagccccccagattccccgtgccccacaacggcagcagcgaggccaccctgcccgcccagatgagcaccctgcacgtgagccccccccccagcgccgaccccgccagaggcctgcccagaagcagagactgcagagtggacctgggcagcgaggtgtacagaatgctgagagagcccgccgagcccgtggccgccgagcccaagcagagcggcagcttcagatacctgcagggcatgctggaggccggcgagggcggcgcccccagcagcagacacggcaccagcagcaccatccccagcgccagctgcgccgtgaccgccgcctag

SEQ ID NO: 49181 - DNA, 741 bp, Artificial Sequence
  derived and/or modified sequence
atgccccattctgtgacgctacggggtccgtcaccatgggggtttcgcctcgtgggaggcagagactttagtgcgcctttgactatcagcagagtgcacgctggaagcaaggccgctctggcggcgctgtgtcctggggatctcatccaggcaatcaatggagaatctacagagttaatgactcatcttgaggcccaaaaccgtattaagggctgtcacgaccacctgactctctccgtgtcacgcccggaaggccgatcttggcctagtgccccagacgactctaaggcccaagcccacaggattcatattgaccctgagatccaggatggcagtccaaccacttctagacgacctagcgggaccgggaccggaccggaggatggaagacccagcctgggatcaccgtatgggcagcctcctcggttcccggtcccgcacaatgggagctcagaagcgacactgccggcccagatgagcactctacacgtgtcccctcctcccagcgccgaccctgctcgcggactacctcggagcagagactgtagagtggatttaggatcagaagtgtatcggatgctcagagaaccggccgaacctgtcgccgctgaaccaaaacagtccgggtctttcagatacctgcaagggatgctggaggcgggagagggaggggcaccttcctccaggcacggaacgtcgagcacaattccctctgcttcttgtgcagttaccgcagcttag

SEQ ID NO: 49182 - DNA, 741 bp, Artificial Sequence
  derived and/or modified sequence
atgccccacagcgtgaccctgcggggccccagcccctggggcttccggctggtgggcggccgggacttcagcgcccccctgaccatcagccgggtgcacgccggcagcaaggccgccctggccgccctgtgccctggggacctgatccaggccatcaatggagagagcacagagctgatgacccacctggaggcccagaaccgcatcaagggctgccacgaccacctgaccctgtctgtgtccaggcctgagggccgctcctggcccagcgccccagatgacagcaaggcccaggcccaccgcatccacatcgaccctgagatccaggacggcagccccaccaccagcagaagacccagcggcaccggcaccggcccagaagatggccggcccagcctgggcagcccctacggccagcccccacgcttccctgtgccccacaacggcagcagcgaggccaccctgcctgcccagatgagcaccctgcacgtgagccccccaccttctgctgaccctgcccggggcctgcccaggagccgggactgccgggtggacctgggcagcgaggtgtacaggatgctgcgggagcctgctgagcctgtggccgctgagcccaagcagagcggcagcttccgctacctgcagggcatgctggaggccggggagggcggggcccccagcagccgccacggcaccagcagcaccatccccagcgccagctgtgctgtgacagctgcctag

SEQ ID NO: 49183 - DNA, 741 bp, Artificial Sequence
  derived and/or modified sequence
atgccccacagcgtgaccctgcggggccccagcccctggggcttcaggctcgtcggaggacgcgacttttcagctcctctcactatcagtcgggtgcatgctggatctaaagcagctttagccgcactgtgtcccggagacctcatccaggctataaacggtgaatctacagaactcatgacacatctcgaggcccagaatcggatcaaaggatgccacgatcacttgacactctcagttagccggcccgaaggcaggtcttggccctctgctccagacgatagtaaggcccaggcccacaggattcatatcgatccagagatacaggatggatctcccaccacctcccggagacctagcgggactggaacaggccccgaggacggaagaccttctctaggctctccttatggccagccccctcgatttcccgtcccccacaacgggtcttcggaagccaccctgccagcccagatgagtactctacatgtaagtccccccccttccgctgacccggccagaggccttcctagatcccgagactgcagggtcgatctgggctccgaagtgtatcgcatgttgcgggagcccgccgaaccagttgccgccgaacccaaacagtccgggtctttccggtatcttcagggcatgctcgaagcaggggagggcggcgccccatcatctcgacacggtactagcagcacaatacctagtgccagttgtgccgtcacagccgcctag

SEQ ID NO: 49184 - DNA, 741 bp, Artificial Sequence
  derived and/or modified sequence
atgccccactctgtgacccttcggggacccagcccctggggattccggctggttggaggacgcgacttctctgccccattaaccattagcagagtccatgctggatccaaggccgctctggctgccctgtgtcctggcgatctcattcaggccatcaatggcgagagtacagaactgatgacacacctcgaggcacagaatagaatcaagggctgccatgaccatctaaccctgtccgtcagtcgaccagaaggcaggagctggccgagtgcacccgacgactcgaaagctcaggctcaccgtattcacatcgaccccgagattcaggatgggagtccaacaacaagccggaggccctctggaaccggaaccggccctgaggacggcaggccaagcctcggatctccatacgggcaaccacccagatttccggtaccacataatggatccagcgaggctaccctgcctgcccagatgtctacactgcacgtgtcaccccctccgagtgcagacccggctcgcggattgcctagatcgcgcgactgccgagtggatttgggatctgaagtgtataggatgttaagggaaccagcagagcctgttgcggctgagccaaagcagtccgggtctttcaggtacctacaagggatgttggaggcgggagaaggcggagccccatcttctaggcatgggacaagtagtacgatcccttctgcaagttgcgctgtaacagccgcatag

SEQ ID NO: 49185 - DNA, 1006 bp, Artificial Sequence
  derived and/or modified sequence
caggctccggctgcggctccagcccgcgatgccccattccgtgaccctgcgcgggccttcgccctggggcttccgcctggtgggcggccgggacttcagcgcgcccctcaccatctcacgggtccatgctggcagcaaggctgcattggctgccctgtgcccaggagacctgatccaggccatcaatggtgagagcacagagctcatgacacacctggaggcacagaaccgcatcaagggctgccacgatcacctcacactgtctgtgagcaggcctgagggtaggagctggcccagtgcccctgatgacagcaaggctcaggcacacaggatccacatcgatcctgagatccaggacggcagcccaacaaccagcaggcggccctcaggcaccgggactgggccagaagatggcagaccaagcctgggatctccatatggacaaccccctcgctttccagtccctcacaatggcagcagcgaggccaccctgccagcccagatgagcaccctgcatgtgtctccaccccccagcgctgacccagccagaggcctcccgcggagccgggactgcagagtcgacctgggctccgaggtgtacaggatgctgcgggagccagccgagcccgtggccgcggagcccaagcagtcaggctccttccgctacttgcagggcatgctagaggccggcgagggcggggcaccatcgtcaaggcacgggacaagctctaccatcccgagtgcttcatgtgcagtgactgcggcctgaacctcaagcagcgtggttacttctttctggacgagcggctctactgtgagagccacgccaaggcgcgcgtgaagccgcccgagggctacgacgtggtggcggtgtaccccaatgccaaggtggaactcgtctgagctgggaccctgctcccacgcctgcttcttaaggtccctgctcggccggtgtaaatatgtttcaccctgtccctctaataaagctcctctgctccaccttgaa

SEQ ID NO: 49186 - protein, 397 aa, Artificial Sequence
  derived and/or modified sequence
MAPNGTASSFCLDSTACKITITVVLAVLILITVAGNVVVCLAVGLNRRLRNLTNCFIVSLAITDLLLGLLVLPFSAIYQLSCKWSFGKVFCNIYTSLDVMLCTASILNLFMISLDRYCAVMDPLRYPVLVTPVRVAISLVLIWVISITLSFLSIHLGWNSRNETSKGNHTTSKCKVQVNEVYGLVDGLVTFYLPLLIMCITYYRIFKVARDQAKRINHISSWKAATIREHKATVTLAAVMGAFIICWFPYFTAFVYRGLRGDDAINEVLEAIVLWLGYANSALNPILYAALNRDFRTGYQQLFCCRLANRNSHKTSLRSNASQLSRTQSREPRQQEEKPLKLQVWSGTEVTAPQGATDRPWLCLPECWSVELTHSFIHLFIHSFANIHPIPTTCQEL

SEQ ID NO: 49187 - DNA, 1194 bp, Artificial Sequence
  derived and/or modified sequence
atggctcccaatgggactgcgtcttccttctgcctggatagtacagcctgcaaaattactatcacagttgtcttggccgtgctgatccttatcaccgtggctggaaatgtggtggtttgtcttgctgttggtctaaacagaagactccggaacctcaccaactgcttcatcgtcagtctagcaattacagaccttctgttaggtctgctagtgctgccttttagcgcaatttaccagctgtcttgcaagtggagcttcggaaaggtgttctgtaacatttatacatcactcgatgtcatgctctgcacggcaagtatcctgaacctcttcatgatttccttagaccggtactgcgccgtcatggatccactgagataccccgtgctcgtcacccctgttagagtggctataagtctcgtgcttatatgggtgatcagtataaccctctcgttcctgagtattcacttgggctggaatagccggaacgaaactagcaagggaaatcacacaacatctaagtgcaaagtgcaggttaacgaagtctacggattagtggatggccttgtgaccttctatttaccactgctgatcatgtgcataacatattaccgcatattcaaagtggccagagaccaggcaaaaaggatcaaccatattagcagctggaaggccgctactatccgtgagcataaggccacagttacactggccgcggtgatgggcgcctttattatctgttggtttccttatttcaccgcgtttgtgtacagagggttacgcggcgacgatgccataaatgaggttcttgaagccatcgtactctggcttggctacgcaaattccgccctgaatcctattttgtacgccgctttaaacagagattttcgtactgggtaccaacagctgttttgctgtagattagccaaccggaattctcacaagacttcccttaggtccaatgcatcccagctgagcagaactcagagtagagagcctagacagcaggaagagaagccgttaaaactccaggtctggtctgggactgaggtcacagccccgcagggggcgaccgatcggccttggttatgcctcccagaatgctggagcgtcgaactaacccattcttttattcatttgtttatccacagctttgccaatattcatcccatacccacaacctgccaggagttgtag

SEQ ID NO: 49188 - DNA, 2561 bp, Artificial Sequence
  derived and/or modified sequence
gtgcgaggcgcggggcgcaggccgtgcgcgcgccgcccgctgcatccctgcccggagcgcagccggcgcgggcgcgggaccgaggcgaaccgggtgcggagccaatacccgcggcagcagcaccagctcctgccctccactgactccagagagggagatccccagtacttgactccatcacgcagatgggagcaggcaccagctatggagagggatacagctgcgtctccacatgacccatcctgcatgacaccaaagccaccgccagacagtgcctcggattctatgcaaaacctgggaagcggagacctaccccagccccgggaggaagctagctcttcaggggaccgtctgaggactggagtttgatccatgaacctggcttcgaggccttgcttttctctcttcttcattcatattcattcccaacaccttagaaggtgttgcttaatttatttctagaaaagcagcccagagtcagtcattgaagccttccccaccccctggccaaaaaaaaaaaaaaaaaaaaactggacacattttggatctgttgggagcttggagtccagtggttggcatagttgtcacattgggagcagagaagaagcaaccaggggccctgatcaggggactgagccgtagagtcccaggatggcacccaatggcacagcctcttccttttgcctggactctaccgcatgcaagatcaccatcaccgtggtccttgcggtcctcatcctcatcaccgttgctggcaatgtggtcgtctgtctggccgtgggcttgaaccgccggctccgcaacctgaccaattgtttcatcgtgtccttggctatcactgacctgctcctcggcctcctggtgctgcccttctctgccatctaccagctgtcctgcaagtggagctttggcaaggtcttctgcaatatctacaccagcctggatgtgatgctctgcacagcctccattcttaacctcttcatgatcagcctcgaccggtactgcgctgtcatggacccactgcggtaccctgtgctggtcaccccagttcgggtcgccatctctctggtcttaatttgggtcatctccattaccctgtcctttctgtctatccacctggggtggaacagcaggaacgagaccagcaagggcaatcataccacctctaagtgcaaagtccaggtcaatgaagtgtacgggctggtggatgggctggtcaccttctacctcccgctactgatcatgtgcatcacctactaccgcatcttcaaggtcgcccgggatcaggccaagaggatcaatcacattagctcctggaaggcagccaccatcagggagcacaaagccacagtgacactggccgccgtcatgggggccttcatcatctgctggtttccctacttcaccgcgtttgtgtaccgtgggctgagaggggatgatgccatcaatgaggtgttagaagccatcgttctgtggctgggctatgccaactcagccctgaaccccatcctgtatgctgcgctgaacagagacttccgcaccgggtaccaacagctcttctgctgcaggctggccaaccgcaactcccacaaaacttctctgaggtccaacgcctctcagctgtccaggacccaaagccgagaacccaggcaacaggaagagaaacccctgaagctccaggtgtggagtgggacagaagtcacggccccccagggagccacagacagaccatggctttgccttccagaatgctggtctgtggaactgacccattcattcattcatttgttcattcattcatttgcaaacattcatccaattcccaccacatgccaggaattatgatgaatactggggatgtagaaatgagattttttgggtttatggtgatgaagttacagaaaatcaatggcacagccctggtctcagctctgccgtcactcaacttgtatcttgagcaagttcctccccatctcaggcctcagtttcctcatcgcatagagagttggtcttccctcaccgggcttcctacttgccctccagagttgcctgaagctcacatgagcgaagggacatgaacatgctctgccatctcccaataggacataagtccacgctggagcgctgagcatcagactcaagaaaagcttgcgtggatattgcagacccaccaacaagggctccaggttctggagttgtggaggcaaaactgcctagtgagaaccctacatattccctctggtccttgcagctgccacccccattcccaggggtggagtgtccctccatagacttggatcctgggccctctgctccttcaccactgtccatctgaagcaagcctggttgctccggcactgaactgtggcctcgggccctggaccctgcccctcaaatccaccctccaagtgcacacctggaaacttccgcttccagtcctgatgggtaaaacgcccacctaccatatccttgcgcaatctcttattcaggaggcagctggagtgcaaagctgacttagttcacaaagtataaaaaaatacagggatgtggttcagctagaa

SEQ ID NO: 49189 - DNA, 1194 bp, Artificial Sequence
  derived and/or modified sequence
atggcccccaacggcacagccagcagcttctgcctggacagcacagcctgcaagatcaccatcaccgtggtgctggccgtgctgatcctgatcaccgtggccggaaatgtggtggtgtgcctggccgtgggcctgaacagaaggctgaggaacctgaccaactgcttcatcgtgtccctggccatcacagacctgctgctgggcctgctggtgctgcccttcagcgccatctaccagctgagctgcaagtggagctttgggaaggtgttctgcaacatctacaccagcctggatgtgatgctgtgcacagccagcatcctgaacctcttcatgatcagcctggaccgctactgtgctgtgatggaccccctgcgctaccctgtgctggtgacccctgtgcgggtggccatcagcctggtgctgatctgggtgatcagcatcaccctgtccttcctgagcatccacctgggctggaacagcagaaatgagaccagcaagggcaaccacaccaccagcaagtgcaaggtgcaggtgaatgaggtgtatggcctggtggatggcctggtgaccttctacctgcccctgctgatcatgtgcatcacctactaccgcatcttcaaggtggcccgggaccaggccaagaggatcaaccacatcagctcctggaaggccgccaccatccgggagcacaaggccaccgtgaccctggccgctgtgatgggcgccttcatcatctgctggttcccctacttcaccgcctttgtgtaccggggcctgcggggagatgatgccatcaatgaggtgctggaggccatcgtgctgtggctgggctacgccaacagcgccctgaaccccatcctgtatgctgccctgaacagagacttcagaacaggctaccagcagctgttctgctgccgcctggccaacagaaacagccacaagaccagcctgcggagcaatgccagccagctgagcaggacccagagccgggagccccggcagcaggaggagaagcccctgaagctgcaggtgtggagcggcacagaggtgacagccccccagggcgccacagaccggccctggctgtgcctgcctgagtgctggagcgtggagctgacccacagcttcatccacctgttcatccacagctttgccaacatccaccccatccccaccacctgccaggagctgtag

SEQ ID NO: 49190 - DNA, 1194 bp, Artificial Sequence
  derived and/or modified sequence
atggcccccaacggcaccgccagcagcttctgcctggacagcaccgcttgtaagataaccatcaccgtggtgctggctgtcctgatccttatcacagtggcaggcaacgtggtggtttgtctggcagtgggcctgaatcgcagattgcggaacctaaccaactgcttcatcgtatcactggccatcactgacctcctgctggggctgctggtgcttccttttagcgccatctatcagctcagttgcaaatggtctttcggcaaagtgttctgtaacatttacaccagtttggatgtgatgctttgtaccgcgtccattctcaacctgtttatgatttccctggatagatactgtgctgtcatggatcctttgcgataccccgtactagtgacccctgtgcgcgtggccatatcccttgtgctcatctgggtaattagcatcaccctgtcctttttgtctattcatttgggctggaacagcaggaacgagacaagtaaaggcaatcataccacttccaaatgcaaagtgcaagtgaatgaggtttatggcctggtggatggtctggttactttttatttacccctgttgatcatgtgcatcacatactacaggatcttcaaagtcgctcgtgaccaagccaagcggatcaatcacatctccagctggaaagctgcaacaatcagggaacataaggccacggtcactttagccgctgtgatgggcgccttcatcatctgttggtttccgtatttcaccgcgttcgtgtatcgcgggctccgcggggatgacgccataaatgaggtgctggaagcaattgtgctgtggctggggtatgccaattccgcactgaacccaattctctatgccgccctcaatcgcgactttaggaccggctatcaacaacttttctgttgtcggttagccaacaggaattctcataagacttctctaaggtctaatgcatcacagctctccagaactcagagccgcgagccccgacagcaggaagaaaagccacttaaacttcaggtatggtcaggtacagaggtcacagcaccacagggcgcgactgaccggccatggctgtgtttaccagaatgctggtccgtagagctcacgcactcctttatccacctttttattcattccttcgctaacatacaccccatcccaacaacctgtcaggagctgtag

SEQ ID NO: 49191 - DNA, 1194 bp, Artificial Sequence
  derived and/or modified sequence
atggccccaaacggcactgcatccagcttctgtctggatagcacagcctgtaaaatcacaatcacggtcgttctcgccgtgctgatcctgatcacagttgccggaaatgtggtggtatgtctagcggtcgggctgaataggagattacgcaacttaaccaactgttttatcgtgagcctcgctatcacagaccttctgctcgggctactcgtgttgccgtttagtgcaatttatcaactctcttgcaagtggtccttcgggaaagtgttctgcaacatatacacgtctctcgacgttatgctgtgcaccgcaagtatcctaaacctatttatgatctccctggacaggtactgcgccgtaatggaccccttaagatacccagttctcgtaacccccgtcagagtggcaatctcccttgtgctaatttgggtgataagcataactctgtcttttctgtccattcacctcggttggaactcaagaaacgaaacgagcaagggcaaccacaccacttcaaaatgcaaggtccaggtaaacgaggtgtacggactggtggacggccttgtgactttctacttgccccttctgattatgtgcatcacgtattataggatttttaaggtcgcgcgtgatcaagcaaagcggattaatcatatctcaagttggaaagctgccacaattagagagcacaaagctacagtgactcttgcggcagtaatgggcgcttttatcatctgttggtttccatattttaccgcttttgtctataggggcctgagaggcgatgatgccatcaacgaggtgctggaagcaattgtgttgtggctggggtatgcaaacagtgccctcaacccaatactctacgcagcccttaaccgggatttccgcaccggataccagcagctcttctgctgtcggctggccaaccggaatagtcacaagacttcccttcgatccaacgcgagccagctctctcggacccagtctcgggaaccacgccaacaagaagagaaacctctgaaacttcaagtgtggtccggcaccgaggtgacagcacctcagggagctaccgatagaccctggctgtgcctcccagagtgctggtcagttgagctcacacactcattcattcacttattcatccacagcttcgcgaatatccaccctattccaaccacatgtcaggagctctag

SEQ ID NO: 49192 - DNA, 1194 bp, Artificial Sequence
  derived and/or modified sequence
atggcccccaacggcaccgccagcagcttctgcctggacagcaccgcctgcaagatcaccatcaccgtggtgctggccgtgctgatcctgatcaccgtggccggcaacgtggtggtgtgcctggccgtgggcctgaacagaagactgagaaacctgaccaactgcttcatcgtgagcctggccatcaccgacctgctgctgggcctgctggtgctgcccttcagcgccatctaccagctgagctgcaagtggagcttcggcaaggtgttctgcaacatctacaccagcctggacgtgatgctgtgcaccgccagcatcctgaacctgttcatgatcagcctggacagatactgcgccgtgatggaccccctgagataccccgtgctggtgacccccgtgagagtggccatcagcctggtgctgatctgggtgatcagcatcaccctgagcttcctgagcatccacctgggctggaacagcagaaacgagaccagcaagggcaaccacaccaccagcaagtgcaaggtgcaggtgaacgaggtgtacggcctggtggacggcctggtgaccttctacctgcccctgctgatcatgtgcatcacctactacagaatcttcaaggtggccagagaccaggccaagagaatcaaccacatcagcagctggaaggccgccaccatcagagagcacaaggccaccgtgaccctggccgccgtgatgggcgccttcatcatctgctggttcccctacttcaccgccttcgtgtacagaggcctgagaggcgacgacgccatcaacgaggtgctggaggccatcgtgctgtggctgggctacgccaacagcgccctgaaccccatcctgtacgccgccctgaacagagacttcagaaccggctaccagcagctgttctgctgcagactggccaacagaaacagccacaagaccagcctgagaagcaacgccagccagctgagcagaacccagagcagagagcccagacagcaggaggagaagcccctgaagctgcaggtgtggagcggcaccgaggtgaccgccccccagggcgccaccgacagaccctggctgtgcctgcccgagtgctggagcgtggagctgacccacagcttcatccacctgttcatccacagcttcgccaacatccaccccatccccaccacctgccaggagctgtag

SEQ ID NO: 49193 - protein, 142 aa, Artificial Sequence
  derived and/or modified sequence
MNGFSTEEDSREGPPAAPAAAAPGYGQSCCLIEDGERCVRPAGNASFSKRVQKSISQKKLKLDIDKSVDLFQLQVNTLRRYKRHYKLQTRPGFNKAQLAETVSRHFRNIPVNEKETLAYFIYMVKSNKSRLDQKSEGGKQLE

SEQ ID NO: 49194 - DNA, 429 bp, Artificial Sequence
  derived and/or modified sequence
atgaacggcttcagcactgaagaagatagcagagaagggcccccggcagccccagccgctgcagcgccgggctacggccagtcctgttgcctgatcgaagatggagagaggtgcgtgcgtcccgcaggcaacgcctctttttcaaagcgggttcagaaaagcatatcccagaaaaagttgaagttagatattgataaatccgttgatttgttccagctgcaggtaaacaccctgagacggtataaaagacactacaagttgcagaccagacctggttttaataaggctcagctggcagaaactgtaagtcgacacttccggaacatccctgtgaatgagaaagaaaccctcgcttacttcatctatatggtcaagtccaacaaatctcgcctcgaccagaagtccgaaggcggaaaacagcttgagtag

SEQ ID NO: 49195 - DNA, 429 bp, Artificial Sequence
  derived and/or modified sequence
atgaatggcttcagcacagaggaggacagccgggagggccccccagctgccccagctgctgctgcccctggctacggccagagctgctgcctgattgaagatggagagcgctgtgtgcggcctgctggaaatgccagcttcagcaagagggtgcagaagagcatcagccagaagaagctgaagctggacatcgacaagtctgtggacctcttccagctgcaggtgaacaccctgcggcgctacaagaggcactacaagctgcagaccaggcctggcttcaacaaggcccagctggccgagaccgtgagccgccacttcaggaacatccctgtgaatgagaaggagaccctggcctacttcatctacatggtgaagagcaacaagagccggctggaccagaagtctgagggcggcaagcagctggagtag

SEQ ID NO: 49196 - DNA, 429 bp, Artificial Sequence
  derived and/or modified sequence
atgaacggcttcagcaccgaggaggacagccgggagggcccccccgctgccccagcggcagcagcacccggttatgggcagtcctgttgcttaatagaagacggagagcgctgcgtgcgccctgcaggcaacgcatccttcagcaagagggttcagaaatccatttctcagaaaaagctgaagcttgacatcgataaaagcgtggacctgtttcagctccaggtgaatacccttagacgctacaagcggcactacaagctgcaaacccggcctggatttaataaagcccagcttgctgagaccgtctcacgccatttcaggaatattcccgtgaacgaaaaagagactctcgcatactttatttatatggtgaagagcaataagagccgattagaccagaagtcggaaggagggaaacagttagagtag

SEQ ID NO: 49197 - DNA, 792 bp, Artificial Sequence
  derived and/or modified sequence
gcggccgcggagtggcctaccggggaccctcccccagagggaccggcccggggcggggagatgaacggcttcagcacggaggaggacagccgcgaagggccccccgccgccccagctgccgccgccccgggctacggccagagctgctgcctcatcgaggacggcgagcgctgcgtccggcccgcgggcaacgcctccttcagcaagagggtccagaagagcatctcgcagaagaaactcaagctggacatcgacaagagcgttgatctgttccagctgcaggtgaacaccctacgacgttataaacgacactacaagttgcagaccagaccaggcttcaataaggcccagttagcagaaactgtgagtcgacacttcaggaacatacctgtgaatgaaaaagagacccttgcctacttcatctacatggtgaagagtaacaagagtagactggaccagaaatcggagggtggcaagcagcttgagtgaggatgaagcacatcttaaaggaatgaagtgtaatgcttgatgcacaggtgatatctactacatttaagcccataaagactgttaaatattattgtaaataaaaaagtttgaatgatgaatactgtaaatctttttggtcaggaggattatattctcatgattcagcatgtgtatagaaagactttcttttacgataactctggactaaaaaaatcaggatcattaaaagaattaaaaactatgtatttcagcattcaacaaagcattaaatcaattctactggaaatgtgggataagaaatat

SEQ ID NO: 49198 - DNA, 429 bp, Artificial Sequence
  derived and/or modified sequence
atgaatggattcagcacagaagaggattcccgagagggccctcctgccgctcctgctgcggctgcccctggatacggacagagttgctgcctcatagaagacggagaacggtgcgtgagacccgctggcaacgctagcttttccaaaagggtacaaaaaagcatctctcaaaaaaagctgaaactggatattgacaaaagcgtagacctgtttcagctgcaagtcaatacactgagaagatacaaacgccattataaacttcagactcggccagggttcaacaaagcgcaactggcagaaacagttagccgccatttcaggaacattcctgttaatgagaaagaaaccctggcttactttatatatatggtgaagtctaacaaaagtcggcttgaccagaagagcgaaggagggaaacagctggagtag

SEQ ID NO: 49199 - DNA, 429 bp, Artificial Sequence
  derived and/or modified sequence
atgaacggcttcagcaccgaggaggacagcagagagggcccccccgccgcccccgccgccgccgcccccggctacggccagagctgctgcctgatcgaggacggcgagagatgcgtgagacccgccggcaacgccagcttcagcaagagagtgcagaagagcatcagccagaagaagctgaagctggacatcgacaagagcgtggacctgttccagctgcaggtgaacaccctgagaagatacaagagacactacaagctgcagaccagacccggcttcaacaaggcccagctggccgagaccgtgagcagacacttcagaaacatccccgtgaacgagaaggagaccctggcctacttcatctacatggtgaagagcaacaagagcagactggaccagaagagcgagggcggcaagcagctggagtag

SEQ ID NO: 49200 - protein, 137 aa, Artificial Sequence
  derived and/or modified sequence
MNGFSTEEDSREGPPAAPAAAAPGYGQSCCLIEDGERCVRPAGNASFSKRVQKSISQKKLKLDIDKSLQVNTLRRYKRHYKLQTRPGFNKAQLAETVSRHFRNIPVNEKETLAYFIYMVKSNKSRLDQKSEGGKQLE

SEQ ID NO: 49201 - DNA, 414 bp, Artificial Sequence
  derived and/or modified sequence
atgaatggattttccacagaagaagatagccgagagggtcccccagccgctccagcagccgctgccccgggttatggccagtcatgttgtctcattgaggatggtgaacgttgcgtgcggcctgctgggaacgcttccttcagcaagcgcgtgcaaaagtctatttctcagaagaagctgaagctagacatcgacaagtctctgcaggttaacaccttgcgcaggtataagcggcattacaagctgcagacacgcccggggttcaacaaagcacagcttgccgaaactgtgagccgacacttccgtaacatccccgttaatgagaaggagacgctggcttatttcatttacatggtgaagagcaacaaatcacggttggatcagaaaagcgaaggcgggaaacagcttgagtag

SEQ ID NO: 49202 - DNA, 414 bp, Artificial Sequence
  derived and/or modified sequence
atgaatggcttcagcacagaggaggacagccgggagggccccccagctgccccagctgctgctgcccctggctacggccagagctgctgcctgattgaagatggagagcgctgtgtgcggcctgctggaaatgccagcttcagcaagagggtgcagaagagcatcagccagaagaagctgaagctggacatcgacaagagcctgcaggtgaacaccctgcggcgctacaagaggcactacaagctgcagacccggcccggcttcaacaaggcccagctggccgagaccgtgagccgccacttcaggaacatccctgtgaatgagaaggagaccctggcctacttcatctacatggtgaagagcaacaagagccggctggaccagaagtctgagggcggcaagcagctggagtag

SEQ ID NO: 49203 - DNA, 414 bp, Artificial Sequence
  derived and/or modified sequence
atgaacggcttcagcaccgaggaggacagccgggagggcccccccgcagccccagctgccgccgcccccggctacggacagtcatgttgcctgattgaggacggggaaagatgtgttcgcccagccgggaatgcttcattttccaagagggtgcagaaatctatctcacagaagaagctaaagctcgacatcgacaagtctcttcaggtcaatactctgcggaggtacaaacggcattacaagttacagaccagaccgggcttcaacaaggcccagctggccgagacagtttcccggcactttagaaatatccccgtgaacgaaaaagaaacgctggcatatttcatttacatggtcaagagtaacaaaagccgcctagaccaaaagtccgaaggaggcaaacaactggagtag

SEQ ID NO: 49204 - DNA, 777 bp, Artificial Sequence
  derived and/or modified sequence
gcggccgcggagtggcctaccggggaccctcccccagagggaccggcccggggcggggagatgaacggcttcagcacggaggaggacagccgcgaagggccccccgccgccccagctgccgccgccccgggctacggccagagctgctgcctcatcgaggacggcgagcgctgcgtccggcccgcgggcaacgcctccttcagcaagagggtccagaagagcatctcgcagaagaaactcaagctggacatcgacaagagcctgcaggtgaacaccctacgacgttataaacgacactacaagttgcagaccagaccaggcttcaataaggcccagttagcagaaactgtgagtcgacacttcaggaacatacctgtgaatgaaaaagagacccttgcctacttcatctacatggtgaagagtaacaagagtagactggaccagaaatcggagggtggcaagcagcttgagtgaggatgaagcacatcttaaaggaatgaagtgtaatgcttgatgcacaggtgatatctactacatttaagcccataaagactgttaaatattattgtaaataaaaaagtttgaatgatgaatactgtaaatctttttggtcaggaggattatattctcatgattcagcatgtgtatagaaagactttcttttacgataactctggactaaaaaaatcaggatcattaaaagaattaaaaactatgtatttcagcattcaacaaagcattaaatcaattctactggaaatgtgggataagaaatat

SEQ ID NO: 49205 - DNA, 414 bp, Artificial Sequence
  derived and/or modified sequence
atgaacgggttttcaaccgaagaggatagtcgagagggtcccccagccgcacccgctgctgccgcacccggatacggtcagagctgttgtctcatagaagatggcgaaaggtgtgtgcggcctgctggcaatgcaagcttcagcaaaagggtccagaaatcaatcagtcagaagaaactgaagctggacatcgataaaagcttacaggttaacaccctgcgtcgctataagagacactacaagctgcagaccagaccaggctttaataaagctcaacttgccgaaacagtttcacgacacttccgaaacattcctgtgaatgagaaggagacactagcctactttatctacatggtgaaatccaataagtctaggttggaccagaagtcagaaggcggtaaacagctggaatag

SEQ ID NO: 49206 - DNA, 414 bp, Artificial Sequence
  derived and/or modified sequence
atgaacggcttcagcaccgaggaggacagcagagagggcccccccgccgcccccgccgccgccgcccccggctacggccagagctgctgcctgatcgaggacggcgagagatgcgtgagacccgccggcaacgccagcttcagcaagagagtgcagaagagcatcagccagaagaagctgaagctggacatcgacaagagcctgcaggtgaacaccctgagaagatacaagagacactacaagctgcagaccagacccggcttcaacaaggcccagctggccgagaccgtgagcagacacttcagaaacatccccgtgaacgagaaggagaccctggcctacttcatctacatggtgaagagcaacaagagcagactggaccagaagagcgagggcggcaagcagctggagtag

SEQ ID NO: 49207 - protein, 609 aa, Artificial Sequence
  derived and/or modified sequence
MKWVESIFLIFLLNFTESRTLHRNEYGIASILDSYQCTAEISLADLATIFFAQFVQEATYKEVSKMVKDALTAIEKPTGDEQSSGCLENQLPAFLEELCHEKEILEKYGHSDCCSQSEEGRHNCFLAHKKPTPASIPLFQVPEPVTSCEAYEEDRETFMNKFIYEIARRHPFLYAPTILLWAARYDKIIPSCCKAENAVECFQTKAATVTKELRESSLLNQHACAVMKNFGTRTFQAITVTKLSQKFTKVNFTEIQKLVLDVAHVHEHCCRGDVLDCLQDGEKIMSYICSQQDTLSNKITECCKLTTLERGQCIIHAENDEKPEGLSPNLNRFLGDRDFNQFSSGEKNIFLASFVHEYSRRHPQLAVSVILRVAKGYQELLEKCFQTENPLECQDKGEEELQKYIQESQALAKRSCGLFQKLGEYYLQNAFLVAYTKKAPQLTSSELMAITRKMAATAATCCQLSEDKLLACGEGAADIIIGHLCIRHEMTPVNPGVGQCCTSSYANRRPCFSSLVVDETYVPPAFSDDKFIFHKDLCQAQGVALQTMKQEFLINLVKQKPQITEEQLEAVIADFSGLLEKCCQGQEQEVCFAEEGQKLISKTRAALGV

SEQ ID NO: 49208 - DNA, 1830 bp, Artificial Sequence
  derived and/or modified sequence
atgaagtgggtggagtccatctttctcattttcttgttaaacttcactgagtctcggactctacatagaaacgagtacggtattgctagtatactggattcctatcagtgtacagctgaaatctccttagcagatctcgcaacgatattctttgcccagttcgtgcaggaagccacttataaggaagtttccaagatggtaaaagacgctctcacagccattgagaaaccgacaggagatgaacagtctagtggctgtctagagaatcagctgcccgctttcctagaagaactgtgccacgaaaaggaaattctcgaaaagtatggccattccgactgttgttctcagtcagaggaggggcggcataactgctttctcgctcataagaagccaacacctgccagcataccactcttccaggtgccggaacctgtcacatcatgtgaggcgtatgaggaggacagagaaacatttatgaacaaatttatttatgagatcgcaagacgccacccctttctttacgcccccaccatcctgctgtgggctgcccggtacgataagatcattcccagctgctgcaaagccgaaaacgcagtcgagtgcttccagacaaaggcagccacagtaacaaaggaactccgggaaagctcccttttgaaccagcatgcatgtgccgttatgaagaatttcggaaccaggacttttcaagccattacagtgaccaaactctcccagaagttcaccaaggtcaacttcacagagattcagaaactggtgcttgacgtggcccacgtgcacgagcattgctgtagaggcgacgtccttgactgtctgcaagacggcgagaaaattatgagctacatttgctcacagcaggacacgttatccaacaaaattaccgaatgctgcaaacttaccaccctagagcgtgggcaatgtatcatccatgccgagaacgacgagaaacccgaagggcttagccctaatctcaacagatttctgggggaccgggattttaaccagttcagttcaggcgagaaaaacatcttcttggcctcattcgtgcacgagtattcacggaggcacccacagttagcggtgtccgtgatcctgcgggttgcaaaggggtatcaggaattactagaaaagtgttttcagacggaaaacccccttgagtgccaagataagggagaagaagagctgcagaagtacatccaggaatcacaggcactggccaagagatcctgtggactcttccagaagctgggggaatattacctgcagaatgcttttttggtggcctatacaaaaaaggcaccacagctaacaagtagcgaactcatggccattacgaggaaaatggcagcaactgctgctacatgttgccagcttagcgaagacaagctcctggcctgtggggagggcgcagccgatataatcataggacatttatgcattcgccacgagatgacacccgtcaacccaggcgtgggtcagtgttgtacctcctcctacgcaaacaggcggccctgttttagttctctggttgtggacgaaacctatgtgccacccgcgttctccgacgacaagtttatcttccataaggatctgtgtcaggctcagggggtggcccttcagacgatgaagcaagaattcctgatcaacctagtgaaacaaaagccgcaaatcacggaggagcagctagaagccgtgatagcagatttttccggcctgctcgagaagtgctgtcaaggccaagagcaagaagtatgcttcgccgaagagggtcagaagctgatcagtaagactcgagctgcccttggagtgtag

SEQ ID NO: 49209 - DNA, 1830 bp, Artificial Sequence
  derived and/or modified sequence
atgaagtgggtggagagcatcttcctgatcttcctgctgaacttcacagagagcaggaccctgcacagaaatgaatatggcatcgccagcatcctggacagctaccagtgcacagctgagatcagcctggccgacctggccaccatcttctttgcccagtttgtgcaggaggccacctacaaggaggtgtccaagatggtgaaggatgccctgacagccatcgagaagcccactggagatgagcagagcagcggctgcctggagaaccagctgcctgccttcctggaggagctgtgccacgagaaggagatcctggagaagtatggccacagcgactgctgcagccagagcgaggagggccgccacaactgcttcctggcccacaagaagcccaccccagccagcatccccctcttccaggtgcctgagcctgtgaccagctgtgaggcctatgaagaagatcgggagaccttcatgaacaagttcatctatgagatcgcccggcggcaccccttcctgtatgcccccaccatcctgctgtgggccgcccgctatgacaagatcatccccagctgctgcaaggccgagaatgctgtggagtgcttccagaccaaggccgccaccgtgaccaaggagctgcgggagagcagcctgctgaaccagcacgcctgtgctgtgatgaagaactttggcaccaggaccttccaggccatcaccgtgaccaagctgagccagaagttcaccaaggtgaacttcacagagatccagaagctggtgctggatgtggcccacgtgcatgagcactgctgcagaggagatgtgctggactgcctgcaggatggagagaagatcatgagctacatctgcagccagcaggacaccctgagcaacaagatcacagagtgctgcaagctgaccaccctggagcggggccagtgcatcatccatgctgaaaatgatgagaagccagagggcctgagccccaacctgaaccgcttcctgggggaccgggacttcaaccagttcagcagcggggagaagaacatcttcctggccagctttgtgcatgagtacagccgccgccacccccagctggccgtgtctgtcatcctgcgggtggccaagggctaccaggagctgctggagaagtgcttccagacagagaaccccctggagtgccaggacaagggggaggaggagctgcagaagtacatccaggagagccaggccctggccaagaggagctgtggcctcttccagaagctgggggagtactacctgcagaatgccttcctggtggcctacaccaagaaggccccccagctgaccagcagcgagctgatggccatcaccaggaagatggccgccacagctgccacctgctgccagctgtctgaggacaagctgctggcctgtggggagggcgctgctgacatcatcatcggccacctgtgcatcagacatgagatgacccctgtgaaccctggggtgggccagtgctgcaccagcagctatgccaacagaagaccctgcttcagcagcctggtggtggatgagacctacgtgcccccagccttcagtgatgacaagttcatcttccacaaggacctgtgccaggcccagggcgtggccctgcagaccatgaagcaggagttcctgatcaacctggtgaagcagaagccccagatcacagaggagcagctggaggccgtgattgctgacttcagcggcctgctggagaagtgctgccagggccaggagcaggaggtgtgctttgctgaggagggccagaagctgatcagcaagaccagggctgccctgggcgtgtag

SEQ ID NO: 49210 - DNA, 2484 bp, Artificial Sequence
  derived and/or modified sequence
actagttaacaggcattgcctgaaaagagtataaaagaatttcagcatgattttccatattgtgcttccaccactgccaataacaaaataactagcaaccatgaagtgggtggaatcaatttttttaattttcctactaaattttactgaatccagaacactgcatagaaatgaatatggaatagcttccatattggattcttaccaatgtactgcagagataagtttagctgacctggctaccatattttttgcccagtttgttcaagaagccacttacaaggaagtaagcaaaatggtgaaagatgcattgactgcaattgagaaacccactggagatgaacagtcttcagggtgtttagaaaaccagctacctgcctttctggaagaactttgccatgagaaagaaattttggagaagtacggacattcagactgctgcagccaaagtgaagagggaagacataactgttttcttgcacacaaaaagcccactccagcatcgatcccacttttccaagttccagaacctgtcacaagctgtgaagcatatgaagaagacagggagacattcatgaacaaattcatttatgagatagcaagaaggcatcccttcctgtatgcacctacaattcttctttgggctgctcgctatgacaaaataattccatcttgctgcaaagctgaaaatgcagttgaatgcttccaaacaaaggcagcaacagttacaaaagaattaagagaaagcagcttgttaaatcaacatgcatgtgcagtaatgaaaaattttgggacccgaactttccaagccataactgttactaaactgagtcagaagtttaccaaagttaattttactgaaatccagaaactagtcctggatgtggcccatgtacatgagcactgttgcagaggagatgtgctggattgtctgcaggatggggaaaaaatcatgtcctacatatgttctcaacaagacactctgtcaaacaaaataacagaatgctgcaaactgaccacgctggaacgtggtcaatgtataattcatgcagaaaatgatgaaaaacctgaaggtctatctccaaatctaaacaggtttttaggagatagagattttaaccaattttcttcaggggaaaaaaatatcttcttggcaagttttgttcatgaatattcaagaagacatcctcagcttgctgtctcagtaattctaagagttgctaaaggataccaggagttattggagaagtgtttccagactgaaaaccctcttgaatgccaagataaaggagaagaagaattacagaaatacatccaggagagccaagcattggcaaagcgaagctgcggcctcttccagaaactaggagaatattacttacaaaatgcgtttctcgttgcttacacaaagaaagccccccagctgacctcgtcggagctgatggccatcaccagaaaaatggcagccacagcagccacttgttgccaactcagtgaggacaaactattggcctgtggcgagggagcggctgacattattatcggacacttatgtatcagacatgaaatgactccagtaaaccctggtgttggccagtgctgcacttcttcatatgccaacaggaggccatgcttcagcagcttggtggtggatgaaacatatgtccctcctgcattctctgatgacaagttcattttccataaggatctgtgccaagctcagggtgtagcgctgcaaacaatgaagcaagagtttctcattaaccttgtgaagcaaaagccacaaataacagaggaacaacttgaggctgtcattgcagatttctcaggcctgttggagaaatgctgccaaggccaggaacaggaagtctgctttgctgaagagggacaaaaactgatttcaaaaactcgtgctgctttgggagtttaaattacttcaggggaagagaagacaaaacgagtctttcattcggtgtgaacttttctctttaattttaactgatttaacactttttgtgaattaatgaaatgataaagacttttatgtgagatttccttatcacagaaataaaatatctccaaatgtttccttttccaagtttgcttatttatgaaaagttatcgataatttctttagttttgtataccattgtctgaagcagattctgttaaaatagcattaagtgttggttattataggagattaaagctatccaaggatggatttacagcactagatcacttggtgaactgaaaaatgttcccaagttaaacactatttgatgctaccagggcattttgtttattaaatgaccatcactgaagtattctaacagataatctggagatgagaaaagaaattattattcttctatgggatctaagaaaatttaacatctactttttttctcaatcttgttcagttctctattcacagacattttaaaacataagaatattacagttttgattgaatataattaa

SEQ ID NO: 49211 - DNA, 1830 bp, Artificial Sequence
  derived and/or modified sequence
atgaagtgggtggagagcatcttcctgatcttcctgctgaacttcaccgaatctcgcacgctccatagaaacgaatacggtatcgcatccatcttggactcctaccagtgtaccgccgagatcagtctcgcagatctcgctaccatcttctttgcgcaattcgtgcaagaagcaacatataaggaagtaagcaaaatggtgaaggatgctctgacagccatcgaaaagcctactggcgacgaacagagtagtggttgtctggagaaccagcttcctgccttcttggaagagttgtgtcatgagaaagaaattctggaaaagtacggccattcagactgttgctcccagtctgaggagggccggcacaactgtttcctggcgcataagaagcctacccctgcttccataccactctttcaggtcccagagccagttacttcatgtgaggcctatgaagaagatcgcgagacatttatgaataagtttatctacgaaatcgcacgacggcatccctttctttatgcgccaactattctgctctgggccgcacgatatgataagattatcccgagctgttgtaaggcagagaatgcagtggagtgctttcagaccaaggcagcaaccgtcactaaagaactgagagagtccagcttactgaaccagcacgcctgcgccgtgatgaagaatttcggaacaagaacattccaggccatcaccgttactaaattgagccagaaattcactaaggtcaatttcaccgaaattcagaaactggtgctcgatgtcgctcacgtccacgagcattgctgtaggggcgacgtgctggattgcctgcaagatggagaaaaaatcatgtcctatatttgtagtcagcaggacaccttgtcaaacaagatcacagagtgctgtaagctgacaactctggagcgaggccagtgcatcatccatgccgaaaacgatgagaagccagaaggactgagtccgaatctgaaccgttttttaggtgacagagactttaaccagttttccagcggcgagaagaatatctttctggcctctttcgtgcatgaatatagccggcgccacccccagctggcagtgtccgtcatactgcgcgttgccaagggctaccaggagctgctggaaaagtgcttccagactgagaaccccctggagtgccaggacaaaggtgaagaggaactgcagaagtatatccaagagagccaggctctggccaagagatcctgtgggctgtttcagaagttgggcgagtattaccttcaaaatgcatttcttgtagcatacacgaagaaagccccccaactgacgagctctgagctgatggccatcacgaggaaaatggccgcaactgcggctacatgttgtcagcttagcgaagataaacttctggcgtgcggcgagggcgctgccgacataattattggacatctctgtataagacacgagatgactccggttaaccctggagtgggacagtgctgcacgtcaagctacgccaaccggagaccctgtttcagctctttagtcgtcgacgagacttacgttccaccagctttcagcgacgacaagttcattttccataaagacctgtgccaagcgcaaggagttgccctgcagacgatgaaacaggagtttctgattaacctagtgaaacagaagcctcagatcaccgaagaacagctggaggccgtcatagctgatttctcaggtctcctggagaagtgttgccaggggcaagagcaggaagtctgctttgctgaagaaggtcagaagctgatatcgaaaacacgcgccgctctgggtgtttag

SEQ ID NO: 49212 - DNA, 1830 bp, Artificial Sequence
  derived and/or modified sequence
atgaagtgggtggagtctatctttttaatcttcctgcttaattttacagagtcccggactctccaccgcaacgaatacggcatcgctagcatccttgattcttaccaatgtaccgccgagatctccttagccgatcttgctacaattttcttcgcgcaattcgtccaggaggcaacctacaaagaggtgtctaaaatggtgaaggatgccttgactgctatcgagaagccaacgggtgacgagcagtcttcagggtgtctggaaaatcaattgcccgcatttttggaggagctgtgtcacgaaaaagaaatactggagaagtatggccactcagactgttgttcacagagtgaggaggggaggcacaattgtttccttgctcataagaaaccaacccccgcatctatcccattgttccaggtgcccgagccggtcacatcctgcgaagcctacgaggaggaccgcgaaacctttatgaataagttcatctacgaaatcgccaggcgtcacccatttctgtatgcacccaccatccttctttgggccgctcggtacgataagattatcccctcttgctgcaaagcggagaatgcggtcgaatgctttcagactaaagccgctacagtgactaaggaacttcgcgagtcttctctgctgaatcagcacgcctgtgcagtgatgaagaacttcggaacccggacattccaggcgattactgttaccaagctgtcccagaagttcactaaggtgaattttaccgagattcaaaaactggtgctggatgtcgctcacgtgcacgaacattgttgcagaggcgacgtgctggattgcctacaggacggtgaaaaaattatgagctatatttgttcgcaacaggataccctgtccaacaagatcaccgagtgctgcaaactcacgaccctcgagcgcggacagtgtattatccatgccgagaacgatgagaagcccgaggggttgtctcctaatctgaaccgttttctgggagatagagacttcaaccagttttcctctggggagaagaacatctttctcgcctctttcgtccacgagtacagtagacgacatccacaattagcagtgtccgtaatactgagagtggcgaagggctatcaagaacttctcgagaagtgcttccaaactgaaaatccactggaatgccaggataaaggagaagaagagctgcaaaagtacatccaggagtcgcaagccctcgccaaacggagttgcggcctattccaaaagctaggagaatattatctgcaaaatgcctttttggttgcatacacaaagaaggcgccacaactaacctcttctgagctaatggccattacacgcaagatggcagctactgctgcgacatgttgccagctgtcagaggataaactcctggcctgtggagaaggcgcagctgacatcatcatcggacacctgtgtatacgccacgaaatgactcctgtgaatcccggagtgggccagtgttgcacatcaagctatgccaacagaaggccctgtttttcatcactagtggtcgacgaaacctacgtaccacctgctttctctgacgacaagttcatttttcataaggacctttgtcaggctcagggtgtcgcactccagaccatgaagcaagaattcttaatcaacctggtcaagcagaagccccagataaccgaggagcagttagaagcggtgatcgctgacttttccggtctacttgagaagtgttgccaggggcaggagcaggaggtttgctttgccgaggaaggccagaagctaattagtaagacaagggcagcccttggcgtctag

SEQ ID NO: 49213 - DNA, 1830 bp, Artificial Sequence
  derived and/or modified sequence
atgaagtgggtggagagcatcttcctgatcttcctgctgaacttcaccgagagcagaaccctgcacagaaacgagtacggcatcgccagcatcctggacagctaccagtgcaccgccgagatcagcctggccgacctggccaccatcttcttcgcccagttcgtgcaggaggccacctacaaggaggtgagcaagatggtgaaggacgccctgaccgccatcgagaagcccaccggcgacgagcagagcagcggctgcctggagaaccagctgcccgccttcctggaggagctgtgccacgagaaggagatcctggagaagtacggccacagcgactgctgcagccagagcgaggagggcagacacaactgcttcctggcccacaagaagcccacccccgccagcatccccctgttccaggtgcccgagcccgtgaccagctgcgaggcctacgaggaggacagagagaccttcatgaacaagttcatctacgagatcgccagaagacaccccttcctgtacgcccccaccatcctgctgtgggccgccagatacgacaagatcatccccagctgctgcaaggccgagaacgccgtggagtgcttccagaccaaggccgccaccgtgaccaaggagctgagagagagcagcctgctgaaccagcacgcctgcgccgtgatgaagaacttcggcaccagaaccttccaggccatcaccgtgaccaagctgagccagaagttcaccaaggtgaacttcaccgagatccagaagctggtgctggacgtggcccacgtgcacgagcactgctgcagaggcgacgtgctggactgcctgcaggacggcgagaagatcatgagctacatctgcagccagcaggacaccctgagcaacaagatcaccgagtgctgcaagctgaccaccctggagagaggccagtgcatcatccacgccgagaacgacgagaagcccgagggcctgagccccaacctgaacagattcctgggcgacagagacttcaaccagttcagcagcggcgagaagaacatcttcctggccagcttcgtgcacgagtacagcagaagacacccccagctggccgtgagcgtgatcctgagagtggccaagggctaccaggagctgctggagaagtgcttccagaccgagaaccccctggagtgccaggacaagggcgaggaggagctgcagaagtacatccaggagagccaggccctggccaagagaagctgcggcctgttccagaagctgggcgagtactacctgcagaacgccttcctggtggcctacaccaagaaggccccccagctgaccagcagcgagctgatggccatcaccagaaagatggccgccaccgccgccacctgctgccagctgagcgaggacaagctgctggcctgcggcgagggcgccgccgacatcatcatcggccacctgtgcatcagacacgagatgacccccgtgaaccccggcgtgggccagtgctgcaccagcagctacgccaacagaagaccctgcttcagcagcctggtggtggacgagacctacgtgccccccgccttcagcgacgacaagttcatcttccacaaggacctgtgccaggcccagggcgtggccctgcagaccatgaagcaggagttcctgatcaacctggtgaagcagaagccccagatcaccgaggagcagctggaggccgtgatcgccgacttcagcggcctgctggagaagtgctgccagggccaggagcaggaggtgtgcttcgccgaggagggccagaagctgatcagcaagaccagagccgccctgggcgtgtag

SEQ ID NO: 49214 - protein, 2431 aa, Artificial Sequence
  derived and/or modified sequence
MTTLLWVFVTLRVITAAVTVETSDHDNSLSVSIPQPSPLRVLLGTSLTIPCYFIDPMHPVTTAPSTAPLAPRIKWSRVSKEKEVVLLVATEGRVRVNSAYQDKVSLPNYPAIPSDATLEVQSLRSNDSGVYRCEVMHGIEDSEATLEVVVKGIVFHYRAISTRYTLDFDRAQRACLQNSAIIATPEQLQAAYEDGFHQCDAGWLADQTVRYPIHTPREGCYGDKDEFPGVRTYGIRDTNETYDVYCFAEEMEGEVFYATSPEKFTFQEAANECRRLGARLATTGQLYLAWQAGMDMCSAGWLADRSVRYPISKARPNCGGNLLGVRTVYVHANQTGYPDPSSRYDAICYTGEDFVDIPENFFGVGGEEDITVQTVTWPDMELPLPRNITEGEARGSVILTVKPIFEVSPSPLEPEEPFTFAPEIGATAFAEVENETGEATRPWGFPTPGLGPATAFTSEDLVVQVTAVPGQPHLPGGVVFHYRPGPTRYSLTFEEAQQACLRTGAVIASPEQLQAAYEAGYEQCDAGWLRDQTVRYPIVSPRTPCVGDKDSSPGVRTYGVRPSTETYDVYCFVDRLEGEVFFATRLEQFTFQEALEFCESHNATLATTGQLYAAWSRGLDKCYAGWLADGSLRYPIVTPRPACGGDKPGVRTVYLYPNQTGLPDPLSRHHAFCFRGISAVPSPGEEEGGTPTSPSGVEEWIVTQVVPGVAAVPVEEETTAVPSGETTAILEFTTEPENQTEWEPAYTPVGTSPLPGILPTWPPTGAATEESTEGPSATEVPSASEEPSPSEVPFPSEEPSPSEEPFPSVRPFPSVELFPSEEPFPSKEPSPSEEPSASEEPYTPSPPVPSWTELPSSGEESGAPDVSGDFTGSGDVSGHLDFSGQLSGDRASGLPSGDLDSSGLTSTVGSGLPVESGLPSGDEERIEWPSTPTVGELPSGAEILEGSASGVGDLSGLPSGEVLETSASGVGDLSGLPSGEVLETTAPGVEDISGLPSGEVLETTAPGVEDISGLPSGEVLETTAPGVEDISGLPSGEVLETTAPGVEDISGLPSGEVLETTAPGVEDISGLPSGEVLETTAPGVEDISGLPSGEVLETAAPGVEDISGLPSGEVLETAAPGVEDISGLPSGEVLETAAPGVEDISGLPSGEVLETAAPGVEDISGLPSGEVLETAAPGVEDISGLPSGEVLETAAPGVEDISGLPSGEVLETAAPGVEDISGLPSGEVLETAAPGVEDISGLPSGEVLETAAPGVEDISGLPSGEVLETAAPGVEDISGLPSGEVLETAAPGVEDISGLPSGEVLETAAPGVEDISGLPSGEVLETAAPGVEDISGLPSGEVLETAAPGVEDISGLPSGEVLETAAPGVEDISGLPSGEVLETAAPGVEDISGLPSGEVLETTAPGVEEISGLPSGEVLETTAPGVDEISGLPSGEVLETTAPGVEEISGLPSGEVLETSTSAVGDLSGLPSGGEVLEISVSGVEDISGLPSGEVVETSASGIEDVSELPSGEGLETSASGVEDLSRLPSGEEVLEISASGFGDLSGLPSGGEGLETSASEVGTDLSGLPSGREGLETSASGAEDLSGLPSGKEDLVGSASGDLDLGKLPSGTLGSGQAPETSGLPSGFSGEYSGVDLGSGPPSGLPDFSGLPSGFPTVSLVDSTLVEVVTASTASELEGRGTIGISGAGEISGLPSSELDISGRASGLPSGTELSGQASGSPDVSGEIPGLFGVSGQPSGFPDTSGETSGVTELSGLSSGQPGISGEASGVLYGTSQPFGITDLSGETSGVPDLSGQPSGLPGFSGATSGVPDLVSGTTSGSGESSGITFVDTSLVEVAPTTFKEEEGLGSVELSGLPSGEADLSGKSGMVDVSGQFSGTVDSSGFTSQTPEFSGLPSGIAEVSGESSRAEIGSSLPSGAYYGSGTPSSFPTVSLVDRTLVESVTQAPTAQEAGEGPSGILELSGAHSGAPDMSGEHSGFLDLSGLQSGLIEPSGEPPGTPYFSGDFASTTNVSGESSVAMGTSGEASGLPEVTLITSEFVEGVTEPTISQELGQRPPVTHTPQLFESSGKVSTAGDISGATPVLPGSGVEVSSVPESSSETSAYPEAGFGASAAPEASREDSGSPDLSETTSAFHEANLERSSGLGVSGSTLTFQEGEASAAPEVSGESTTTSDVGTEAPGLPSATPTASGDRTEISGDLSGHTSQLGVVISTSIPESEWTQQTQRPAETHLEIESSSLLYSGEETHTVETATSPTDASIPASPEWKRESESTAADQEVCEEGWNKYQGHCYRHFPDRETWVDAERRCREQQSHLSSIVTPEEQEFVNNNAQDYQWIGLNDRTIEGDFRWSDGHPMQFENWRPNQPDNFFAAGEDCVVMIWHEKGEWNDVPCNYHLPFTCKKGTATTYKRRLQKRSSRHPRRSRPSTAH

SEQ ID NO: 49215 - DNA, 7296 bp, Artificial Sequence
  derived and/or modified sequence
atgactacattgctgtgggtgtttgtaacactccgcgtgatcaccgctgccgttaccgttgaaacttctgaccatgacaacagcctgtcggtgagtattccacagcccagccccttgagggttctgctgggaactagtttgactattccttgctactttattgatccaatgcatcccgttacaacggcgccttctaccgcccctctagcccctagaatcaaatggtccagagtgagtaaggaaaaagaggtggtgctgcttgtggctactgaggggcgcgtgagggttaacagcgcttaccaggataaagtgtctctccccaattatccagccatcccgtcggatgcaactttagaggtgcaatctctgcgctcaaacgacagcggcgtatatcggtgtgaagtcatgcatggcattgaagactccgaggccaccctggaagtggttgttaaaggcatcgtatttcattacagggctatctccacaaggtacactctggacttcgatcgcgcccagagagcttgcctccaaaattcagctattatcgcaacacctgagcagctccaagctgcctatgaagacgggttccaccagtgtgatgccggctggcttgccgatcagaccgttcgctacccaatccatacgccccgcgaaggctgctatggcgacaaggacgagttcccaggcgtccgcacctacggcattagggatacaaacgagacctacgatgtttactgcttcgctgaggagatggaaggcgaagttttctatgccacctctccagaaaagttcacgttccaggaggcggcgaatgaatgcaggcgtctcggagccaggctcgcgacgacgggtcagctctacttggcctggcaagctggcatggacatgtgtagcgccgggtggctggccgatagatcagttcggtaccccattagcaaagcccgccccaactgtgggggcaacctgttaggcgtcagaacggtgtatgtgcatgccaaccagaccgggtacccggacccttcaagtcgatatgatgcaatctgttacaccggtgaggacttcgtcgacatcccagagaatttctttggggtaggcggcgaagaagatattactgtgcaaacggtgacttggccagatatggagctgcccttgccacgcaacattaccgaaggcgaggcccgaggatccgtgatcttgactgtgaaaccaattttcgaggtgagcccttcacctctggaacccgaggagccctttacattcgctcccgaaattggggctaccgctttcgctgaagtggagaacgaaacgggcgaagccacccgaccttggggatttcccacaccaggcctgggacctgcaactgcttttactagtgaagacctcgttgttcaggttacagctgttcctgggcagccgcacctgcccggaggtgtcgtgttccactatcgtcccgggcccacacgatactccctgacttttgaagaagctcagcaggcttgcctccgcacaggcgcggtcattgcatccccagaacagctgcaggccgcgtatgaagccggttatgagcagtgcgatgccggctggctacgagaccagactgttaggtacccgatagtgtcacctagaacaccatgtgtaggcgacaaggattctagccctggcgtcaggacatacggcgtgcgacccagcacagagacctacgacgtatactgcttcgttgacagactggaaggagaggtctttttcgctaccagacttgaacaattcacattccaggaagctcttgaattttgtgaatcccacaacgcgaccctggctaccaccggccagctatatgctgcttggtcaagagggcttgataaatgttacgctgggtggctggcggacggttcccttcgctatcctatcgtcactcctaggccagcatgcggaggggacaaaccgggtgtgcgtaccgtgtacctttatcctaaccagaccggactccccgatcctctgagcaggcaccacgcattttgtttcagaggcattagcgccgtcccttctccaggcgaggaagagggaggcacacccacctcgccgtctggagttgaggaatggatcgtaacccaagtcgtccccggagtggcagcggtcccagtggaggaggagacaaccgcagtgccgtccggggagacaacagccatcctggagttcacaaccgaacccgagaaccagacggaatgggaacctgcctacactcctgtcggaacaagcccactgcctggcatcctgcctacgtggccccctaccggggcagcaaccgaggagtcgacagagggcccttcagccactgaggtcccctcagcatcagaagagccaagcccttctgaagtgcctttcccctccgaggagcccagcccttctgaagagcccttccccagtgtaaggccgtttccttctgtggaattgttcccatctgaggagcccttcccctcaaaggaaccatctccctcagaggagcccagcgcgtccgaagaaccttatacacccagtcctcctgtccccagttggacagagctaccctcgagtggtgaagagagcggtgctcctgacgtatcaggcgacttcacaggatcaggagacgtctctggccatctcgacttctctggacaactgtccggcgatagggcctccggcctgccatctggtgacctcgatagcagcggtctaacatccactgtgggctctgggctccctgttgagagcggcctccccagcggagacgaagaaagaattgagtggcccagtacccccacagtcggcgaacttccttcaggagcagagatcctcgagggaagtgcttcaggcgtcggggacctcagcgggctccctagcggagaggtactggagacttcagccagtggagtgggggacctctctggcctgccatcaggggaggtccttgaaaccactgcgcccggcgtggaagatatcagcggtttaccatccggagaagtcttagagaccacagccccgggagtggaagatatttcggggcttccgagcggagaagtgctggaaactacggcgcccggggtggaggatatatctggactccccagcggggaggtgctcgagacaacagcccccggtgtggaggacatctccggcctacctagtggggaggtcctggagactactgctccgggtgtcgaggatatctcaggcctgcccagcggcgaggtgctggagaccacggcacccggcgtagaggacatcagcggactgcctagcggagaagtcttagagactgcagcccccggtgtggaggacatttctgggctcccttccggagaggttcttgagacagccgccccgggcgtcgaggacatcagcggactcccttcaggggaggtgctcgagaccgctgcgcctggcgtagaagatatctctggcctgccttctggtgaagtgctggaaacagccgctcccggagttgaggatatctccggcctgccttccggtgaagtgcttgagaccgccgcccccggcgtagaggacatatctggtctaccttcaggtgaggtgctagagaccgcagccccaggcgtagaagatatctccggtctgccttccggggaagtactggaaacagccgctcccggtgttgaagatatttcaggtcttccttctggtgaagtgctcgagactgccgcccctggcgtagaagacatcagcggactgccctccggggaagtactggaaaccgccgctccaggtgttgaggatatcagcggccttccttctggagaggtgctggagacagctgcgcctggagtggaggatatttccggactgccttctggcgaggtcttagagacagcagcccctggtgttgaggacatttctggtttgcccagtggggaggtcttggagactgccgccccgggggttgaagacatctctggactccccagtggagaagtgttggaaaccgcagcccccggtgtggaagacatttcagggttgcctagtggcgaggtattagaaacagctgctcccggggtcgaagatatcagcggtttgccttctggagaggtcctcgaaaccgccgccccaggtgtggaggacatatcagggctcccctcaggcgaagtactggaaaccgccgcccctggagtcgaggatattagcggacttccatccggagaggttctggaaactaccgcccccggagtggaggaaatttcagggcttccttccggcgaggtactcgagacaacggcacccggggtggacgagataagcggcctgccttccggtgaggtcctggagacgacagccccaggggttgaggaaataagtggtctgcctagcggggaagtcctggagacctccacgtccgccgtgggcgacttgtccgggctcccctctggcggagaggtcctagaaatttctgtgtctggagtcgaggacatctcaggactgccatctggagaggtagtggagactagcgcctccgggattgaggacgttagcgagttgcccagtggtgaaggactcgaaacttcagcgtctggcgtcgaagacttgtctagactcccctccggcgaagaagtgctggagatttctgcttctgggtttggcgatctgagcggtctgccgagcggcggcgaaggactcgagacttccgccagtgaagtgggtaccgatctcagcggcctcccttccggccgagaagggctggaaacctcagcttctggagcggaggacctttcaggccttccttcagggaaagaagatctcgtggggtccgccagcggagatctcgatctcggaaagctgcctagcggtacactgggaagcggacaggcccctgaaacctcaggactgccatctggattctcaggcgagtatagtggggttgatctaggatcaggtcccccgtcagggctccctgatttcagtgggttaccgagcggatttcccacagtgagtctcgttgatagcaccctggtcgaagttgttactgcatctactgccagcgagcttgagggtaggggaactattgggatcagtggggccggtgagatcagcgggctgcctagctcagaactggacatctccggaagagcaagcggtctgccctctggcactgagttatccggccaagcaagtggctctcctgatgtgagcggcgagatccctgggctatttggggttagtggccagccttctggcttccccgatacctctggtgaaacaagtggcgtcacagagttgtctgggcttagtagcggccagcctggaatatcaggggaagcctctggcgtgctatatgggacatcccagccattcggcataaccgatctgtcgggcgagacttccggggtccccgacctcagtggccagccatccggcttgcccggtttttctggggccacctctggcgttccagatctggtgtccggtactacctcaggaagcggtgaaagttctggcataacgtttgtcgatacttccttagtggaagtggccccaactacttttaaagaagaagaaggcctcggcagcgtggaattgagcggtctcccatcgggagaggccgacctgtctgggaagtccggcatggtcgatgtgtccggccagttctctggcaccgtggacagtagcgggttcactagccagaccccagagttctcaggtctgcctagtggcatcgccgaggtgagtggagagtctagtcgggccgagataggctcttccctgccttccggtgcatactatggatccgggactcctagcagtttcccaacggtaagccttgttgaccgcactttggtggaatctgttacccaagccccaactgcccaggaggccggcgaagggccaagcggaatcctcgagctttcgggcgcgcattcaggagcccccgacatgagcggtgagcatagcggttttctcgatttgtctgggctgcaatctggcctgatcgagccatctggcgagccgcctggcacaccttatttcagcggagatttcgcatccacgaccaacgtgtctggcgaatcaagcgtggcaatgggcacttccggcgaagcttctggattgccggaagtaacactgatcacaagtgagttcgtggagggtgtgaccgagccaaccatttcccaagagttgggccagcgccctccagtgacccacactccgcagttgttcgaaagttctggaaaggtttcgacagcaggggacatctctggcgctacccccgtgctccctggaagtggggtggaggtaagttctgtgcccgagagcagctctgaaacatcggcataccctgaagccggctttggtgcatctgccgcgcccgaggcatcaagagaagattctggctctcctgatttaagcgagactacttccgccttccacgaagccaacctggagagatcctcaggcttgggcgtatcaggttctactctgactttccaggagggggaagcatccgccgctccagaggtgtctggtgagagcacaactacatcagacgtgggcaccgaagcccccggcttgccttcagctaccccaacagcttccggcgaccgcacagaaatttccggggatttaagcggtcacacaagccagctcggagtggttatctcaacctccataccagagtccgaatggactcagcaaacacagcggcccgccgagacacatctggaaatagagtcatcttccctgttatactcaggagaggaaactcacaccgtggagaccgctacatcgccaactgatgcatctatacccgcaagcccagagtggaagcgggagagcgagtccactgccgcagaccaggaggtttgcgaagagggctggaataagtaccagggtcattgttatcggcacttcccggaccgcgagacttgggtcgatgctgagcgccggtgccgagagcaacaatcccatctttcatccatcgtcacacctgaggagcaggagttcgtgaacaataatgcgcaggattatcagtggattggactgaacgacagaacaatcgagggcgattttcgctggagtgacggccaccccatgcagttcgagaactggcgaccaaatcagcctgacaatttctttgcagccggggaagattgcgttgtgatgatctggcatgagaagggtgagtggaacgacgtcccatgcaactatcacctgcccttcacctgcaagaagggaacggctacaacatacaagcggaggctgcagaagaggtcctcccgccatccaagacgttccaggcctagtacagcccattag

SEQ ID NO: 49216 - DNA, 7296 bp, Artificial Sequence
  derived and/or modified sequence
atgaccaccctgctgtgggtgtttgtgaccctgcgggtcatcacagctgctgtgacagtggagaccagtgaccatgacaacagcctgtctgtgtccatcccccagcccagccccctgcgggtgctgctgggcaccagcctgaccatcccctgctacttcatcgaccccatgcaccctgtgaccacagcccccagcacagcccccctggccccccgcatcaagtggagccgggtgtccaaggagaaggaggtggtgctgctggtggccacagagggccgggtgcgggtgaacagcgcctaccaggacaaggtgtccctgcccaactacccagccatccccagtgatgccaccctggaggtgcagagcctgcggagcaatgacagcggcgtgtaccgctgtgaggtgatgcatggaattgaggacagcgaggccaccctggaggtggtggtgaagggcatcgtgttccactaccgggccatcagcacccgctacaccctggactttgaccgggcccagagggcctgcctgcagaacagcgccatcatcgccaccccagagcagctgcaggccgcctatgaagatggcttccaccagtgtgatgctggctggctggccgaccagacagtgcgctaccccatccacaccccccgggagggctgctatggagacaaggatgagttccctggggtgaggacctacggcatccgggacaccaatgagacctatgatgtgtactgctttgctgaggagatggagggggaggtgttctacgccaccagccctgagaagttcaccttccaggaggccgccaatgaatgtcggcggctgggcgcccggctggccaccaccggccagctgtacctggcctggcaggccggcatggacatgtgcagcgctggctggctggccgacagatctgtgcgctaccccatcagcaaggcccggcccaactgtggcggcaacctgctgggcgtgaggacagtgtatgtgcacgccaaccagacaggctacccagaccccagcagccgctatgatgccatctgctacaccggggaggactttgtggacatccctgagaacttcttcggcgtgggcggggaggaggacatcaccgtgcagacagtgacctggccagacatggagctgcccctgcccaggaacatcacagaaggagaggcccggggcagcgtcatcctgactgtgaagcccatctttgaggtgagccccagccccctggagcctgaggagcccttcacctttgcccctgagatcggggccacagcctttgctgaggtggagaatgagaccggggaggccacccggccctggggcttccccaccccaggcctgggccctgccacagccttcaccagcgaggacctggtggtgcaggtgacagctgtgcccggccagccccacctgcctggaggagtggtgttccactaccggcccggccccacccgctacagcctgacctttgaggaggcccagcaggcctgcctgaggactggagctgtgattgccagccctgagcagctgcaggccgcctatgaagctggctatgagcagtgtgatgctggctggctgcgggaccagacagtgcgctaccccatcgtgagccccaggaccccctgtgtgggggacaaggacagcagccctggggtgaggacctacggcgtgcggcccagcacagagacctatgatgtgtactgctttgtggaccggctggagggggaggtgttctttgccacccggctggagcagttcaccttccaggaggccctggagttctgtgagagccacaatgccaccctggccaccaccggccagctgtatgctgcctggagccggggcctggacaagtgctacgccggctggctggctgatggcagcctgcgctaccccatcgtgacccccaggcctgcctgtggcggggacaagccaggagtgaggacagtgtacctgtaccccaaccagacaggcctgcctgaccccctgagccgccaccacgccttctgcttccggggcatctctgctgtgcccagccctggagaggaggagggcggcacccccaccagccccagcggcgtggaggagtggatcgtgacccaggtggtgcctggggtggccgctgtgcctgtggaggaggagaccacagctgtgcccagcggggagaccacagccatcctggagttcaccacagagcctgagaaccagacagagtgggagcccgcctacacccctgtgggcaccagccccctgcccggcatcctgcccacctggccacccaccggggccgccacagaggagagcacagagggccccagcgccacagaggtgcccagcgccagcgaggagcccagccccagcgaggtgcccttccccagcgaggagcccagccccagcgaggagcccttccccagcgtgcggcccttccccagcgtggagctgttccccagcgaggagcccttccccagcaaggagcccagccccagcgaggagcccagcgccagcgaggagccctacacccccagcccccctgtgcccagctggacagagctgcccagcagtggagaggagagcggggccccagatgtgtctggggacttcaccggcagcggagatgtgtctggccacctggacttcagcggccagctgagcggggaccgggccagcggcctgcccagcggggacctggacagcagcggcctgaccagcacagtgggcagcggcctgcctgtggagagcggcctgcccagcggagatgaggagcgcatcgagtggcccagcacccccaccgtgggggagctgcccagcggggctgagatcctggagggcagcgccagcggcgtgggggacctgagcggcctgcccagcggggaggtgctggagaccagcgccagcggcgtgggggacctgagcggcctgcccagcggggaggtgctggagaccacagcccctggggtggaggacatcagcggcctgcccagcggggaggtgctggagaccacagcccctggggtggaggacatcagcggcctgcccagcggggaggtgctggagaccacagcccctggggtggaggacatcagcggcctgcccagcggggaggtgctggagaccacagcccctggggtggaggacatcagcggcctgcccagcggggaggtgctggagaccacagcccctggggtggaggacatcagcggcctgcccagcggggaggtgctggagaccacagcccctggggtggaggacatcagcggcctgcccagcggggaggtgctggagacagctgcccctggggtggaggacatcagcggcctgcccagcggggaggtgctggagacagctgcccctggggtggaggacatcagcggcctgcccagcggggaggtgctggagacagctgcccctggggtggaggacatcagcggcctgcccagcggggaggtgctggagacagctgcccctggggtggaggacatcagcggcctgcccagcggggaggtgctggagacagctgcccctggggtggaggacatcagcggcctgcccagcggggaggtgctggagacagctgcccctggggtggaggacatcagcggcctgcccagcggggaggtgctggagacagctgcccctggggtggaggacatcagcggcctgcccagcggggaggtgctggagacagctgcccctggggtggaggacatcagcggcctgcccagcggggaggtgctggagacagctgcccctggggtggaggacatcagcggcctgcccagcggggaggtgctggagacagctgcccctggggtggaggacatcagcggcctgcccagcggggaggtgctggagacagctgcccctggggtggaggacatcagcggcctgcccagcggggaggtgctggagacagctgcccctggggtggaggacatcagcggcctgcccagcggggaggtgctggagacagctgcccctggggtggaggacatcagcggcctgcccagcggggaggtgctggagacagctgcccctggggtggaggacatcagcggcctgcccagcggggaggtgctggagacagctgcccctggggtggaggacatcagcggcctgcccagcggggaggtgctggagacagctgcccctggggtggaggacatcagcggcctgcccagcggggaggtgctggagaccacagcccctggggtggaggagatcagcggcctgcccagcggggaggtgctggagaccacagcccctggggtggatgagatcagcggcctgcccagcggggaggtgctggagaccacagcccctggggtggaggagatcagcggcctgcccagcggggaggtgctggagaccagcaccagcgctgtgggggacctgagcggcctgcccagcggcggggaggtgctggagatctctgtgtctggagtggaggacatcagcggcctgcccagcggggaggtggtggagaccagcgccagcggcattgaagatgtgtctgagctgcccagcggggagggcctggagaccagcgccagcggcgtggaggacctgagccggctgcccagcggggaggaggtgctggagatcagcgccagcggctttggagacctgagcggcctgcccagcggcggggagggcctggagaccagcgccagcgaggtgggcacagacctgagcggcctgcccagcggccgggagggcctggagaccagcgccagcggggctgaggacctgagcggcctgcccagcggcaaggaggacctggtgggcagcgccagcggggacctggacctgggcaagctgcccagcggcaccctgggcagcggccaggcccctgagaccagcggcctgcccagcggcttcagcggggagtacagcggcgtggacctgggcagcggcccccccagcggcctgcctgacttcagcggcctgcccagcggcttccccaccgtgtccctggtggacagcaccctggtggaggtggtgacagccagcacagccagcgagctggagggccggggcaccatcggcatctctggagctggggagatcagcggcctgcccagcagcgagctggacatcagcggccgggccagcggcctgcccagcggcacagagctgagcggccaggccagcggcagcccagatgtgtctggagagatccctggcctgtttggagtgtctggccagcccagcggcttcccagacaccagcggggagaccagcggcgtgacagagctgagcggcctgagcagcggccagcccggcatcagcggggaggccagcggcgtgctgtatggcaccagccagcccttcggcatcacagacctgagcggggagaccagcggcgtgcctgacctgagcggccagcccagcggcctgcccggcttcagcggggccaccagcggcgtgcctgacctggtgtctggcaccaccagcggcagcggggagagcagcggcatcacctttgtggacaccagcctggtggaggtggcccccaccaccttcaaggaggaggagggcctgggctctgtggagctgagcggcctgcccagcggggaggccgacctgagcggcaagagcggcatggtggatgtgtctggccagttctctggaacagtggacagcagcggcttcaccagccagaccccagagttcagcggcctgcccagcggcattgctgaggtgtctggagagagcagcagagctgagatcggcagcagcctgcccagcggggcctactacggcagcggcacccccagcagcttccccaccgtgtccctggtggacaggaccctggtggagagcgtgacccaggcccccacagcccaggaggccggggagggccccagcggcatcctggagctgagcggggcccacagcggggccccagacatgtctggagagcacagcggcttcctggacctgagcggcctgcagagcggcctcatcgagcccagcggggagcccccaggcaccccctacttcagcggggactttgccagcaccaccaacgtgtctggagagagctctgtggccatgggcaccagcggggaggccagcggcctgcctgaggtgaccctcatcaccagcgagtttgtggagggcgtgacagagcccaccatcagccaggagctgggccagaggcctcctgtgacccacaccccccagctgtttgagagcagcggcaaggtgtccacagctggggacatcagcggggccacccctgtgctgcccggcagcggcgtggaggtgtcctctgtgcctgagagcagcagcgagaccagcgcctacccagaggccggctttggagccagcgctgcccctgaggccagccgggaggacagcggcagcccagacctgtctgagaccaccagcgccttccacgaggccaacctggagaggagcagcggcctgggcgtgtctggcagcaccctgaccttccaggagggggaggccagcgctgcccctgaggtgtctggagagagcaccaccaccagtgatgtgggcacagaggcccctggcctgcccagcgccacccccacagccagcggggacagaacagagatcagcggggacctgagcggccacaccagccagctgggcgtggtgatcagcaccagcatccctgagagcgagtggacccagcagacccagaggcctgctgagacccacctggagattgagagcagcagcctgctgtacagcggggaggagacccacacagtggagacagccaccagccccacagatgccagcatcccagccagccctgagtggaagcgggagagcgagagcacagctgctgaccaggaggtgtgtgaggagggctggaacaagtaccagggccactgctaccgccacttcccagaccgggagacctgggtggatgctgagcggcgctgccgggagcagcagagccacctgagcagcatcgtgaccccagaggagcaggagtttgtgaacaacaatgcccaggactaccagtggattggcctgaatgacaggaccatcgagggggacttccgctggagcgatggccaccccatgcagtttgagaactggaggcccaaccagcctgacaacttctttgctgctggggaggactgtgtggtgatgatctggcatgagaagggggagtggaatgatgtgccctgcaactaccacctgcccttcacctgcaagaagggcacagccaccacctacaagaggcggctgcagaagaggagcagccgccaccccaggaggagccggcccagcacagcccactag

SEQ ID NO: 49217 - DNA, 7526 bp, Artificial Sequence
  derived and/or modified sequence
gccaggtgtgtgggactgaagttcttggagaagggagtccaactcttcaaggtgaactatgaccactttactctgggttttcgtgactctgagggtcatcactgcagctgtcactgtagaaacttcagaccatgacaactcgctgagtgtcagcatcccccaaccgtccccgctgagggtcctcctggggacctccctcaccatcccctgctatttcatcgaccccatgcaccctgtgaccaccgccccttctaccgccccactggccccaagaatcaagtggagccgtgtgtccaaggagaaggaggtagtgctgctggtggccactgaagggcgcgtgcgggtcaacagtgcctatcaggacaaggtctcactgcccaactacccggccatccccagtgacgccaccttggaagtccagagcctgcgctccaatgactctggggtctaccgctgcgaggtgatgcatggcatcgaggacagcgaggccaccctggaagtcgtggtgaaaggcatcgtgttccattacagagccatctctacacgctacaccctcgactttgacagggcgcagcgggcctgcctgcagaacagtgccatcattgccacgcctgagcagctgcaggccgcctacgaagacggcttccaccagtgtgacgccggctggctggctgaccagactgtcagataccccatccacactccccgggaaggctgctatggagacaaggatgagtttcctggtgtgaggacgtatggcatccgagacaccaacgagacctatgatgtgtactgcttcgccgaggagatggagggtgaggtcttttatgcaacatctccagagaagttcaccttccaggaagcagccaatgagtgccggcggctgggtgcccggctggccaccacgggccagctctacctggcctggcaggctggcatggacatgtgcagcgccggctggctggccgaccgcagcgtgcgctaccccatctccaaggcccggcccaactgcggtggcaacctcctgggcgtgaggaccgtctacgtgcatgccaaccagacgggctaccccgacccctcatcccgctacgacgccatctgctacacaggtgaagactttgtggacatcccagaaaacttctttggagtggggggtgaggaggacatcaccgtccagacagtgacctggcctgacatggagctgccactgcctcgaaacatcactgagggtgaagcccgaggcagcgtgatccttaccgtaaagcccatcttcgaggtctcccccagtcccctggaacccgaggagcccttcacgtttgcccctgaaataggggccactgccttcgctgaggttgagaatgagactggagaggccaccaggccctggggctttcccacacctggcctgggccctgccacggcattcaccagtgaggacctcgtcgtgcaggtgaccgctgtccctgggcagccgcatttgccagggggggtcgtcttccactaccgcccgggacccacccgctactcgctgacctttgaggaggcacagcaggcctgcctgcgcacgggggcggtcattgcctcgccggagcagctccaggccgcctacgaagcaggctatgagcagtgtgacgccggctggctgcgggaccagaccgtcagataccccattgtgagcccccggaccccatgcgtgggtgacaaggacagcagcccaggggtcaggacctatggcgtgcgcccatcaacagagacctacgatgtctactgctttgtagacagacttgagggggaggtgttcttcgccacacgccttgagcagttcaccttccaggaagcactggagttctgtgaatctcacaatgctacgctggccaccacgggccagctctacgccgcctggagccgcggcctggacaagtgctatgccggctggctggccgacggcagcctccgctaccccatcgtcaccccaaggcctgcctgcggtggggacaagccaggcgtgagaacggtctacctctaccctaaccagacgggcctcccagacccactgtcccggcaccatgccttctgcttccgaggcatttcagcggttccttctccaggagaagaagagggtggcacacccacatcaccctctggtgtggaggagtggatcgtgacccaagtggttcctggtgtggctgctgtccccgtagaagaggagacaactgctgtaccctcaggggagactactgccatcctagagttcaccaccgagccagaaaaccagacagaatgggaaccagcctataccccagtgggcacatccccgctgccagggatccttcctacttggcctcccactggcgcagcaacagaggaaagtacagaaggcccttctgcaactgaagtgccctctgcctcagaggaaccatccccctcagaggtgccattcccctcagaggagccatccccctcagaggaaccattcccctcagtgaggccattcccctcagtggagctgttcccctcagaggagccattcccctccaaggagccatccccctcagaggaaccatcagcctcggaagagccgtatacaccttcaccccccgtgcccagctggactgagctgcccagctctggggaggaatctggggcccctgatgtcagtggtgacttcacaggcagtggagatgtttcaggacaccttgacttcagtgggcagctgtcaggggacagggcaagtggactgccctctggagacctggactccagtggtcttacttccacagtgggctcaggcctgcctgtggaaagtggactaccctcaggggatgaagagagaattgagtggcccagcactcctacggttggtgaactgccctctggagctgagatcctagagggctctgcctctggagttggggatctcagtggacttccttctggagaagttctagagacctctgcctctggagtaggagacctcagtgggcttccttctggagaagttctagagaccactgcccctggagtagaggacatcagcgggcttccttctggagaagttctagagaccactgcccctggagtagaggacatcagcgggcttccttctggagaagttctagagaccactgcccctggagtagaggacatcagcgggcttccttctggagaagttctagagaccactgcccctggagtagaggacatcagcgggcttccttctggagaagttctagagaccactgcccctggagtagaggacatcagcgggcttccttctggagaagttctagagaccactgcccctggagtagaggacatcagcgggcttccttctggagaagttctagagaccgctgcccctggagtagaggacatcagcgggcttccttctggagaagttctagagaccgctgcccctggagtagaggacatcagcgggcttccttctggagaagttctagagaccgctgcccctggagtagaggacatcagcgggcttccttctggagaagttctagagaccgctgcccctggagtagaggacatcagcgggcttccttctggagaagttctagagaccgctgcccctggagtagaggacatcagcgggcttccttctggagaagttctagagaccgctgcccctggagtagaggacatcagcgggcttccttctggagaagttctagagaccgctgcccctggagtagaggacatcagcgggcttccttctggagaagttctagagactgctgcccctggagtagaggacatcagcgggcttccttctggagaagttctagagactgctgcccctggagtagaggacatcagcgggcttccttctggagaagttctagagactgctgcccctggagtagaggacatcagcgggcttccttctggagaagttctagagactgctgcccctggagtagaggacatcagcgggcttccttctggagaagttctagagactgctgcccctggagtagaggacatcagcgggcttccttctggagaagttctagagactgctgcccctggagtagaggacatcagcgggcttccttctggagaagttctagagactgctgcccctggagtagaggacatcagcgggcttccttctggagaagttctagagactgctgcccctggagtagaggacatcagcgggcttccttctggagaagttctagagactgctgcccctggagtagaggacatcagcgggcttccttctggagaagttctagagactactgcccctggagtagaggagatcagcgggcttccttctggagaagttctagagactactgcccctggagtagatgagatcagtgggcttccttctggagaagttctagagactactgcccctggagtagaggagatcagcgggcttccttctggagaagttctagagacttctacctctgcggtaggggacctcagtggacttccttctggaggagaagttctagagatttctgtctctggagtagaggacatcagtgggcttccttctggagaggttgtagagacttctgcctctggaatagaggatgtcagtgaacttccttcaggagaaggtctagagacctctgcttctggagtagaggacctcagcaggctcccttctggagaagaagttctagagatttctgcctctggatttggggacctcagtggacttccttctggaggagaaggtctagagacctctgcttctgaagtagggactgacctcagtgggcttccttctggaagggagggtctagagacttcagcttctggagctgaggacctcagtgggttgccttctggaaaagaagacttggtggggtcagcttctggagacttggacttgggcaaactgccttctggaactctaggaagtgggcaagctccagaaacaagtggtcttccctctggatttagtggtgagtattctggggtggaccttggaagtggcccaccctctggcctgcctgactttagtggacttccatctggattcccaactgtttccctagtggattctacattggtggaagtggtcacagcctccactgcaagtgaactggaagggaggggaaccattggcatcagtggtgcaggagaaatatctggactgccctccagtgagctggacattagtgggagagctagtggactcccttcaggaactgaactcagtggccaagcatctgggtctcctgatgtcagtggggaaatacctggactctttggtgtcagtggacagccatcagggtttcctgacactagtggggaaacatctggagtgactgagcttagcgggctgtcctctggacaaccaggtattagtggagaagcatctggagttctttatggcactagtcaaccctttggcataactgatctgagtggagaaacatctggggtccctgatctcagtgggcagccttcagggttaccagggttcagtggggcaacatcaggagtccctgacctggtttctggtaccacgagtggcagcggtgaatcttctgggattacatttgtggacaccagtttggttgaagtggcccctactacatttaaagaagaagaaggcttagggtctgtggaactcagtggcctcccttccggagaggcagatctgtcaggcaaatctgggatggtggatgtcagtggacagttttctggaacagtcgattccagtgggtttacatcccagactccggaattcagtggcctaccaagtggcatagctgaggtcagtggagaatcctccagagctgagattgggagcagcctgccctcgggagcatattatggcagtggaactccatctagtttccccactgtctctcttgtagacagaactttggtggaatctgtaacccaggctccaacagcccaagaggcaggagaagggccttctggcattttagaactcagtggtgctcattctggagcaccagacatgtctggggagcattctggatttctggacctaagtgggctgcagtccgggctgatagagcccagcggagagccaccaggtactccatattttagtggggattttgccagcaccaccaatgtaagtggagaatcctctgtagccatgggcaccagtggagaggcctcaggacttccagaagttactttaatcacttctgagttcgtggagggtgttactgaaccaactatttctcaggaactaggccaaaggccccctgtgacacacacaccccagctttttgagtccagtggaaaagtctccacagctggggacattagtggagctaccccagtgctccctgggtctggagtagaagtatcatcagtcccagaatctagcagtgagacgtccgcctatcctgaagctgggttcggggcatctgccgcccctgaggccagcagagaagattctgggtcccctgatctgagtgaaaccacctctgcattccacgaagctaaccttgagagatcctctggcctaggagtgagcggcagcactttgacatttcaagaaggcgaggcgtccgctgccccagaagtgagtggagaatccaccaccaccagtgatgtggggacagaggcaccaggcttgccttcagccactcccacggcttctggagacaggactgaaatcagcggagacctgtctggtcacacctcgcagctgggcgttgtcatcagcaccagcatcccagagtctgagtggacccagcagacccagcgccctgcagagacgcatctagaaattgagtcctcaagcctcctgtactcaggagaagagactcacacagtcgaaacagccacctccccaacagatgcttccatcccagcttctccggaatggaaacgtgaatcagaatcaactgctgcagaccaggaggtatgtgaggagggctggaacaagtaccagggccactgttaccgccacttcccggaccgcgagacctgggtggatgctgagcgccggtgtcgggagcagcagtcacacctgagcagcatcgtcacccccgaggagcaggagtttgtcaacaacaatgcccaagactaccagtggatcggcctgaacgacaggaccatcgaaggggacttccgctggtcagatggacaccccatgcaatttgagaactggcgccccaaccagcctgacaacttttttgccgctggagaggactgtgtggtgatgatctggcacgagaagggcgagtggaatgatgttccctgcaattaccacctccccttcacgtgtaaaaagggcacagccaccacctacaaacgcagactacagaagcggagctcacggcaccctcggaggagccgccccagcacagcccactgagaagagcttccaggacgcacccaggacgctgagcccaggagcctgccaggctgacgtgcatcccacccagacggtgtcctcttcttgtcgctttttgtcatataaggaatcccattaaagaaggaaaaaaataaatcccacatttgtgtatgcacccactcacccctccaaa

SEQ ID NO: 49218 - DNA, 7296 bp, Artificial Sequence
  derived and/or modified sequence
atgaccaccctgctgtgggtgttcgtgaccctgcgggtgatcaccgctgccgtgaccgttgaaacaagcgatcacgataattctctctccgttagcatcccccagccatctccactgagggtcctgttgggcacatctttgacgatcccttgctacttcattgatccaatgcatccagtcaccacagcaccgagtaccgctccattagctcccagaatcaaatggtctcgggtcagtaaagaaaaagaagtcgtgttgctggttgcaactgagggtcgcgtgcgcgtcaattccgcataccaggataaagtgtcattgcctaactacccagccattccctcagacgctacccttgaggtccagagcctgcgctccaacgacagtggtgtgtatcgttgcgaagttatgcacggcatcgaagatagtgaggcaacgttggaggttgtagtgaaagggatcgtgttccattatcgggcgatttccacccggtatacattagatttcgatagggcacagcgggcttgtttgcagaatagcgctatcatcgctactcccgagcaattacaagcagcctacgaggatggtttccaccagtgcgacgctggatggctcgctgatcaaacagtccgataccccattcacacaccgagagagggctgttatggagataaggatgaattcccaggcgtgagaacctacggaatacgagacacaaacgagacctacgacgtatactgctttgccgaagagatggagggcgaggtcttttacgcaacaagcccagaaaagttcacctttcaggaggctgctaatgagtgtcgaagactgggagcccggctcgccaccacaggccagctgtacctcgcatggcaagcgggtatggatatgtgtagtgccgggtggctggcagaccgcagtgttagatatcccatatctaaggcaaggcctaattgtggcggaaacttattgggcgtgcgcacagtgtacgtccatgccaaccagacagggtacccggatccttcctcaagatacgatgccatatgctacacaggggaagattttgtagatatccccgagaatttcttcggcgttggaggcgaggaagacatcaccgtgcagaccgttacttggccagatatggagctgccactcccaagaaatatcaccgagggcgaggcccggggatcggttatcctgacagtgaaaccaattttcgaagtgagcccatcccctctggaacctgaagagcccttcactttcgcccccgaaatcggtgcgaccgcgtttgcggaagtcgaaaatgagaccggagaggccacaaggccctggggctttcccacccctggacttggcccagctacagcattcaccagtgaggatcttgtcgtgcaggtgacagccgtgccaggacagcctcacctgccaggtggcgttgtgttccattaccgccccggtccaacccggtatagcttgacctttgaggaagcccaacaggcttgcctgcgcacaggggctgtgatagccagcccagagcagcttcaggctgcctacgaagccggatatgagcagtgtgatgccggttggctacgggatcagaccgttcgctaccccattgtctcaccccgtacaccttgcgtgggagataaggacagtagcccaggtgtgcgtacctacggtgtccggccaagcaccgagacctacgatgtgtattgctttgtggatcgtctggaaggagaggtcttctttgcgactaggctcgagcagtttacattccaggaagccctagaattttgtgaatcccataacgctacgctcgccaccacaggccagctctatgccgcctggtcaaggggcctcgacaagtgctacgcagggtggcttgccgacggatccctgcgctaccctatcgtaacccctcgacctgcctgcggaggggacaaacctggagttaggacggtgtatctctatcccaatcagaccggcctgcctgatcccctgagtcgacaccacgcattttgttttagaggtatatccgcggtgccctccccaggagaggaggaaggtggaacacctacaagcccttctggagtggaggagtggatcgtcacccaggttgtgccaggcgtggcagccgttccagtcgaggaagagaccaccgcagttccctccggggagactacagccatactggaattcacaacagagccggaaaaccaaaccgaatgggaaccggcctacacacctgttggaacatcacccctgcctggtatcttgcctacctggccacctacgggtgcggcgaccgaggaaagtacagagggtcccagtgcaacagaggtgccatcagccagcgaggagcctagcccgagcgaggtgcccttcccgagtgaagagccatccccttccgaggagccattcccctctgtgcgtccgttcccaagtgttgagctgttcccatctgaggaaccgtttccgtcaaaagagccttcacctagtgaggagccctcagcctctgaggaaccctatacaccttctccccccgtgccatcttggaccgaactgccttcaagcggcgaagaatccggagcacccgatgtgagcggggacttcaccgggtccggagacgtctccggacacctcgacttcagtggtcagctcagcggcgatcgagcctcaggactgccatctggagacctggacagttctggccttacaagcacagtgggtagcggcttgccagtcgaatccggactccctagcggtgacgaagagagaatagagtggcccagtactccgaccgtaggagagctcccctccggcgctgagattctagagggatctgcaagtggggtcggcgaccttagcggtcttccttctggtgaggtgctagaaacatccgcctctggcgtgggcgacctcagcggtcttccttccggcgaggtactcgagacaacagcgccgggcgtcgaagacatcagcgggctcccatccggggaagtactggagacaacagcccctggtgtggaggatatttccggcttaccatcaggtgaggtgttagagaccaccgcccctggcgtggaagatatatccggtttgccaagcggagaggttcttgagacaacagctcccggtgttgaagatatcagcggactgcccagcggggaagtcctggagaccaccgcgccgggcgtggaggatatttcgggtcttccttccggtgaggttcttgagactacggccccgggcgtcgaagatatttctgggctgccatcgggcgaggtattggagacggcagcgcctggcgtcgaagatatctccggactgccaagcggcgaggtgctcgagaccgctgccccgggcgtcgaggacatttctggcctgccctctggggaggtccttgaaacagctgcaccaggagttgaggacatctcgggcctgccgagcggggaggtcttagagacagcggcgcctggagtagaagacatttccggcctaccaagtggcgaagtcctggagactgcagctcccggcgtggaggatataagtggtttacccagcggcgaagtgcttgaaacagcggcccctggggtggaggacatctctggactgccttcaggcgaggtgctggagaccgctgcgcccggtgttgaggatatcagcggactgccctccggagaagtgctcgagaccgctgcgccaggggtcgaggatatttccggacttccatccggagaagttctggaaaccgcagccccaggcgttgaagacatcagcggtctgcccagtggtgaggtgcttgaaacagcagcacctggagtggaggacatttcaggcttaccaagcggagaggtgctggaaaccgcagcccctggggtcgaagacatttctggtttaccatccggtgaagtccttgaaacggcagccccaggggtggaagacataagcgggctgccaagcggcgaggtgctggagacagctgctcctggcgtggaagacataagcggattgcccagcggcgaggtgctggaaactgcagccccgggcgtagaggatataagtggactgccaagcggggaagttctggaaacagccgcccccggagtcgaagatatatccggactcccatctggggaggttttggaaaccgcggcaccgggagttgaggatatttccggactgccgtcaggggaagtcctggagaccaccgctccgggcgtggaggagattagtggcctcccgagcggcgaggtgctggagactactgcccctggtgtcgacgaaattagcggtctcccatctggcgaggttttggagacgaccgccccgggtgttgaagagataagcgggctcccgtctggagaggtgctggaaaccagcacctctgcggtcggtgacttgagcggactgccctctggaggagaggtgttggaaatctctgttagcggagtcgaggacatatccggtctcccatccggggaagtggtcgaaacaagcgctagcggcattgaggacgtcagcgagcttcctagcggagagggcctggagacatccgcctcgggcgtggaggacctgagccggctgccaagcggagaagaggttcttgagatcagcgcgagcggctttggggacctatctgggctgccatcaggtggtgagggactggagacatctgccagtgaagtcggaacggatctgtccgggctgcctagcggaagagagggcttggaaacgtcggcctccggggccgaggacctctccggccttccatccggaaaggaggacctagtggggagtgcctccggggacttagatcttggcaagttgccctcaggcacactgggctcagggcaagcacccgagacatccggcctcccatcggggttctccggcgagtacagtggagtggacttaggttcaggtccgcccagcggcctgcccgacttttcaggacttccttctggatttccgacagtctctctcgtggatagtaccctggtggaagtggtcacagcgtctacagcgtccgagctggagggaagagggacgatcggaattagcggtgccggcgaaatttccggacttccatcaagcgagctggatattagtggcagagcatcgggactcccatctggcacagagctctctggacaggcctcaggctctcccgacgttagcggtgagatccccgggctgtttggggtctccgggcagccctctgggttccctgacacatccggtgagacctctggcgttaccgaactgtctggactgtcaagcggccagcccggtatcagcggagaagcctcaggtgttctttacggcaccagccagccattcggaattactgatctttcaggcgagacatctggggtgccagacctctcagggcagcctagcgggcttccaggcttctcaggcgctacgtccggagttccagatcttgtgtctgggacgacaagtgggtcgggcgagtcctctgggataactttcgttgacacctctctggtggaagtagccccaacaacatttaaggaagaggagggtctgggaagtgtggaactttcaggtctgcccagcggtgaggcagacctctcaggcaagtcgggcatggtggatgtgagcggacagtttagcggcacggtcgactctagcgggttcacttctcagactccagagttctctggtttgccgagtggcatagccgaggtcagtggagagtcatcccgggcagagatagggtcatcccttccatctggcgcctattacgggagtggcacaccttccagtttccctacagtcagcctcgtcgacagaacccttgttgagagcgtcactcaggcaccaaccgctcaagaggccggagagggcccctccggaattctggaattgagcggcgctcactcaggcgcccctgatatgtccggcgaacactcgggtttcctggacctgtctggtttgcagtccggattgatcgagccgtctggggaaccaccgggtacaccctacttcagtggtgacttcgcctcgacaactaatgtgtctggagagtcttctgtcgcaatgggaacttcaggcgaggcctcaggtctgcctgaggtgacactcatcacttctgagtttgtggagggggtgaccgagccaactatcagtcaagaactaggccagaggcccccagtgacacacactccacagctgtttgagtccagcggcaaagtctcaaccgcaggtgacatcagcggagcaactccagtccttccgggtagcggggtggaagttagctcagtcccagaaagctcatccgagacctctgcgtaccctgaagcagggtttggcgcctctgctgcacctgaggcctcccgcgaggacagcgggtcccccgatctgtccgaaacgacatcggcttttcatgaagcgaacctcgagagaagctccggtttgggtgtgagtgggagcacactgacgttccaggaaggggaggcctccgccgctcccgaagtgtctggtgaatcgactacgacttctgacgtgggcactgaggccccgggcttaccctctgcaacccccactgcctccggcgatcgtaccgagatctcaggagatctgagcggtcacaccagccaacttggagtcgttattagcacatcaatccctgaaagcgagtggacgcagcagacccagagacctgctgaaactcaccttgagatcgaatcctcatccttgttatattccggcgaggagacccatactgttgagactgctacaagcccaacagacgcatcaataccggccagcccagagtggaagcgcgagtccgagtccactgccgccgatcaggaagtatgcgaggaaggttggaataaataccagggccactgctatcgccactttccagaccgtgagacgtgggtggacgcagagcgacgctgtcgggagcagcaatcccatctctcctctattgtcacccccgaggagcaggagttcgtcaataataacgcccaagactaccagtggataggactcaatgaccggaccattgaaggagactttagatggagcgacggccaccctatgcagttcgagaactggcggcccaatcaacctgataattttttcgctgctggtgaggattgcgtggtgatgatttggcatgaaaagggcgagtggaacgacgtgccatgtaactatcatcttccttttacttgtaagaagggcacagccaccacttacaagagacgcctgcagaaacggtcttctcgccaccctaggagatcccgaccctctacggcccactag

SEQ ID NO: 49219 - DNA, 7296 bp, Artificial Sequence
  derived and/or modified sequence
atgacaacactcttgtgggtattcgtcacgctgagagtgattactgccgcagtgacggtcgagacctccgatcacgataactctttgtctgtatcaattccgcagccatcccccctaagggtgctgctcggtacttcattgacgataccctgttacttcattgatcctatgcaccccgtgactacagcgccatccaccgctccactggcgccaaggattaaatggtcccgcgtgtccaaagagaaggaggttgtactgttggtcgccacagagggtagggtgagggtgaacagcgcctatcaggacaaggtcagcttgccaaattaccccgctattccttcagatgcaacacttgaggtgcagtccctgagaagtaacgacagcggagtgtatcgatgcgaggtaatgcatgggattgaagacagcgaggccactcttgaggttgtggtcaagggcattgttttccactaccgcgctattagcacccgttataccctagatttcgaccgtgcccagcgggcatgccttcaaaacagcgcaattatcgccacccctgaacagctccaggcagcctatgaggacgggtttcaccagtgtgacgccggatggctcgcagaccaaaccgtgcgctatcctatccacactcccagagagggatgctacggggataaagacgagtttcccggagtgagaacttatggtatccgcgataccaacgagacctatgacgtgtactgcttcgctgaggagatggagggcgaggttttttatgcaacatctccagagaagttcactttccaggaggctgccaatgaatgtaggcggcttggggcacggctggctactaccggccaactgtacctcgcctggcaggctggcatggacatgtgttcagcaggatggctggctgaccggtcggtacggtaccctattagcaaagctcggcctaattgcggaggcaatctgctaggcgttaggaccgtctacgtgcacgctaatcagacgggatacccagatccctcatcacgatacgacgccatctgctatactggagaggacttcgtagacataccagagaattttttcggggtggggggagaggaggatattactgtacagacagtgacatggccagatatggagttgccgcttccccgtaacattaccgagggggaggcccgaggatctgtgattctgacagtaaaacccattttcgaagtgagccctagtccactggagcctgaggaaccatttacttttgccccagagattggagcaacggccttcgccgaagtggaaaatgaaacaggtgaagcaaccaggccatggggcttcccaactcccggtctgggtcctgccaccgcattcacgagcgaggacttggtggtccaggtgacagccgtcccgggacagccacacttaccaggaggcgtagtctttcactatcggcctggcccaactcgctacagcctgacgttcgaggaggctcagcaggcttgccttcgcactggcgctgtaatcgccagccctgaacagcttcaagcagcatatgaggctggctacgagcagtgtgacgctggctggttaagggatcagacagtgcgctaccctattgtaagcccacgcacaccatgcgtgggagataaagacagtagcccgggtgtaagaacctacggtgtgcgcccatccactgaaacgtatgatgtttattgttttgtcgatagattagaaggcgaggtgtttttcgccactcgtttggagcagttcactttccaagaggctctggagttttgcgaaagtcataatgcaaccctggcaactaccggccagctgtatgctgcatggtcaagggggctagataaatgttacgccggatggctggccgatggttcactgcgctatccgattgtcacacccaggccagcctgcggtggcgacaagcctggtgtccgtacagtatacctctacccaaaccaaactggtcttcctgaccctttgagtcggcaccacgctttctgcttccgcggtatcagtgcagtcccttcccctggcgaggaggagggcggtacacctacatctccttccggtgtggaagagtggatcgtgacccaggtcgtgccgggtgtggcagcggtgccagttgaggaagagactacggcagtgcccagcggtgaaacaaccgcgattctggagttcaccaccgaacccgaaaaccagaccgagtgggaacctgcatacacgccagtgggcacatctcccctacccggtattcttcccacatggccccctaccggcgctgctacggaggaaagtactgaagggcctagcgctactgaggttcctagtgccagtgaggagccatcccctagtgaagtgcctttcccgtcggaggaaccatccccttctgaggagcccttcccaagtgttcgcccattcccctccgtggagcttttcccaagcgaggaacctttcccctccaaagaaccctcaccatctgaggagccctcagctagcgaggagccgtacacaccctcgccccctgtgccatcctggacggaactcccaagttccggggaggagtctggtgctcccgatgtatcaggcgactttacagggtctggcgatgtttccgggcatctggacttttccgggcagttgtccggggaccgtgcctcgggtctcccgtcaggtgatctggactcctctggtctgacaagcacggtgggctcgggtcttcctgtggagtctggactgcccagtggcgacgaggagcgaatcgaatggccgagcaccccgactgtcggggaactgccatcaggagccgaaattctcgaaggatcggccagtggcgtgggagatctttccggtcttccatcaggagaggtgctggaaaccagtgcctccggggtgggcgacttgtccggcctgccgtcgggcgaagttctggagacgaccgcccctggagtagaggatatttcaggattgccgtccggggaggtgctggagactactgctccaggtgttgaagacatcagcggacttccaagtggagaggtgctggaaaccacagcacctggtgtggaggacatctccggcctgcccagtggcgaggtgctggagaccactgcccctggcgttgaagacatttccggcctcccctcaggcgaagtgttggaaaccaccgccccaggcgtggaggatattagtggattgcctagcggggaggtcctagagactaccgcccctggcgtagaggatatcagtggactgccctccggggaggtgctggaaaccgcagctcccggtgtagaggacatcagcggactgcccagtggagaagtgctagagacggccgctcctggcgtagaggatatttcaggactgccttcaggggaggtgctggagacagctgccccaggggtggaggatattagtggccttccgagtggtgaggtgctggaaacagccgcacctggagtcgaggacatctcaggtcttccctccggtgaggtgctcgagaccgctgccccaggagttgaagacatcagcggacttccgagtggtgaggttcttgagacagctgctcctggcgttgaggacatcagcggcctgccctcaggcgaggtactggagacagcggcacccggagtggaagatatctccgggctcccgagcggggaagtgctggaaacagccgcaccaggagttgaggacatctccgggctccctagcggagaggtcttggaaaccgctgctccaggtgtggaagacatcagcggcttaccaagcggcgaggtgctggaaacagccgctcctggggtggaagacattagtggactgccgtctggagaagttctcgagacagctgcccctggcgtcgaggatatctctggcctgccatcaggagaagtattagagaccgctgcaccgggtgtcgaagacattagtggcctgccttccggagaagtgttggagactgccgctcccggagtcgaggatatttctgggctgccaagtggcgaggtcctggagacggctgcaccaggggtggaagatatctccgggctcccatccggggaggtgctcgaaacggccgcacctggcgtagaagatattagcggtcttccaagcggtgaggtcctggagactgcagctccaggggttgaggacatctccggactcccgtccggcgaagtgcttgaaacgaccgcacctggagtggaagaaattagtggactgccttccggcgaggtgctggaaactacagcacctggcgtagatgagatctctggcctgcccagtggggaggtgcttgaaacaaccgctccaggtgtcgaggaaatatccggcctacctagcggggaagtcttggagacatctacttcagctgttggggaccttagtggtctgcccagcggcggagaggttcttgaaatttcggtgtcaggagtggaggatatcagtggtctgccatctggagaagtcgtggaaaccagtgctagcggtatagaggatgtctcggagttgccgagcggagagggcctggagacttccgcgtccggcgtagaggacctgtctcgactaccctcaggcgaggaggttctcgagattagtgccagtggttttggggatctcagcggcctgccctccggcggtgagggattagagacatcagcttcagaagtggggactgacttgtcgggcctgccctccggcagagaagggctcgagacttccgccagcggcgcagaggacctgtcaggcctgccatcaggtaaagaggatctagtgggtagcgcctccggagacttagacctgggcaagcttccctcagggactctaggttcggggcaggcgcctgagaccagcggattgcctagcggcttcagtggtgagtactctggagtggaccttggctctggccctccctcaggactcccagacttttctggattgccaagtggcttcccaaccgttagcctagtggattcaaccctggtggaggttgtgacggcttccacggccagcgaactcgaaggccgaggtacaatcggaatctctggtgctggcgagatttcaggactgcctagttccgaactcgacatctcaggacgggcaagcggtcttcctagtgggactgagctgtccggccaggcaagcggtagcccagatgtatccggcgaaatcccaggcctcttcggggtcagcggacagccatccggattccccgacacctcaggagaaaccagcggcgtgaccgaactgagtggcctctcttctgggcagccaggcatctctggggaagcttctggtgtgctgtatggaacctcacagccgtttggtattactgacctgtccggcgagacatctggcgtgcccgatctgagcggacagccaagtggactaccaggatttagcggggctacctccggcgtgcctgatctggtatcaggaaccaccagcgggtcgggagaatccagcggcatcaccttcgtggacacttccctagtcgaggtagcacctaccacatttaaggaggaggagggattaggctcggttgagctgtctggcctgccatctggcgaggccgatctctcgggcaagagcggcatggttgatgtttccggacaattcagcggaactgtggattcttctggcttcacatcccaaacacctgagttctcagggttgccatctggaatcgccgaggttagcggggaatcttcgcgggctgagataggctcctcgctgcccagcggggcatactacggctcagggacaccctcctcttttccgaccgtaagccttgtagatcggaccctcgttgaatctgtgacgcaggcaccaacagcccaggaggccggtgaagggccttcgggcatcttagaattgagcggggcacactcaggggctcctgacatgagcggagagcattcgggatttctggacctcagcgggctacagtcaggattgatcgaacctagcggcgaaccacctgggacaccctacttctccggggattttgccagtaccaccaacgtatctggtgaatcttccgttgccatggggacgtctggcgaggcctcaggacttcctgaggttactctgattacatccgaattcgtagagggcgtcacagaacccaccattagtcaggaattaggacagcggcctcccgttactcacactccccagctgttcgagagtagcggcaaggtgagtactgccggtgacatctccggcgcaaccccagttttgccgggaagcggggtggaggttagtagtgtgcccgaatcctcgagtgaaaccagtgcctatccggaggccggatttggggcatccgccgcacccgaggcatcgagagaggacagcggctctcccgacctgtctgaaactacttctgcctttcacgaggctaatctggagcgctcctccggcctcggagtctcaggttctacactgacattccaggagggcgaggcaagcgccgcaccagaagtgagcggagagtctaccacaacctctgacgtggggaccgaggctcccggtctccctagcgccaccccgaccgcatctggtgatcggactgagatttctggggacctctctggacacacctcccagcttggcgttgttatctctacctccatccctgagagtgagtggacgcaacaaactcagcgacccgctgaaacgcatcttgagatagagtcttcctcgctgctgtattcaggcgaggaaacccatactgtggagacagctaccagccctaccgatgcatctatcccggcatcccccgagtggaaacgtgaaagcgagagtacagcggcagaccaggaagtctgtgaggagggatggaacaagtaccaggggcattgttatcgacacttccccgaccgcgaaacctgggtggatgctgagcggcgttgcagagaacaacaatctcatctatcctctattgtgacccctgaagagcaggaattcgtaaacaataacgcccaggactatcaatggatcgggttaaatgacagaaccattgaaggggacttcaggtggtcggatggccacccaatgcaattcgaaaattggagacccaatcagccagataactttttcgccgcaggagaggactgcgtcgtgatgatctggcatgagaaaggcgaatggaatgacgtgccttgcaattatcacctccctttcacatgcaagaaggggaccgcgacgacctacaaacggcgtctacagaagcgctcttcacgccaccctagaaggtctaggccaagtaccgctcactaa

SEQ ID NO: 49220 - DNA, 7296 bp, Artificial Sequence
  derived and/or modified sequence
atgacaactctcctgtgggtcttcgtgaccttgcgtgtgattacagccgctgtcaccgtcgagacgtcggatcacgacaatagcttgagcgtgtccattcctcagccgtctcccctacgcgttctgctgggtaccagcctgacaataccgtgttatttcatagatcccatgcacccagtgaccaccgccccgtcaaccgccccgcttgcccccagaataaagtggagccgcgtaagcaaggagaaggaagtcgttctgctcgtggcgacagaaggcagggtaagagtaaattccgcataccaagataaagtcagcctcccaaattaccctgctatccctagcgacgccaccctcgaggtccagagccttaggagtaatgattctggagtgtacagatgcgaggtgatgcacggaattgaagacagtgaggcaacgctagaggttgttgtcaagggtatcgtcttccattatagagcgatttctactagatacacactggattttgacagggctcagagggcgtgtttgcagaattctgctattatcgccacccctgagcagttgcaagccgcttacgaggacggcttccatcaatgcgacgccgggtggctggctgatcagacagtccggtacccaatccatactcccagagaaggctgctatggtgacaaggatgaatttccaggtgtgagaacctacggaatacgcgataccaacgaaacctacgatgtgtattgcttcgccgaagagatggaaggagaggtgttttatgcaacatctcccgagaagttcacctttcaggaggccgcaaatgagtgccgccgtctgggcgctaggcttgcaactactggccagctgtatttggcttggcaggctggaatggatatgtgttccgccggctggcttgctgaccgttctgtacggtacccaatatcgaaggcaaggccaaactgcggcggtaatttgcttggagtgcgcacagtttatgtacacgccaatcagactggctatccagaccccagttcaagatatgacgccatatgttacaccggagaagactttgtggacattcccgagaactttttcggcgtgggcggggaagaggatataaccgttcaaaccgtgacctggccagacatggagcttccactcccacgcaatattaccgaaggcgaggcaagaggaagcgtgatcctcaccgtgaagcctatcttcgaggtgagtccttcacctttggaaccggaggaacctttcacattcgccccggagatcggagctaccgccttcgccgaagtggaaaatgagacaggagaagctacccgtccttggggctttcccacccccggtctgggccctgccaccgcatttacatcagaagaccttgtggttcaggtcacagccgtcccaggacaacctcacctgccaggaggcgttgtgttccattaccgtccgggcccaacccgctatagtctgaccttcgaggaagcccagcaagcttgtctcaggaccggggcagtgattgccagccccgaacaattgcaggccgcctatgaggctggttacgagcagtgcgacgccgggtggctccgtgatcagactgttagatacccgatcgtgagcccaaggaccccttgtgtaggcgacaaggattcgtctcctggcgtacgtacatatggcgtcaggccgtctaccgagacttacgacgtctattgcttcgtggatagacttgaaggggaggtttttttcgctacacgactagaacagtttactttccaggaagctcttgaattttgcgagtcccacaatgccacactggcaaccaccgggcaattatatgcggcttggtcgaggggactggataaatgttatgccggatggctggccgatgggagtctgaggtatcccatcgtgacccctcgacccgcttgcggtggcgataaaccgggagtcagaactgtctacctgtatcctaatcagaccgggctgcccgaccctctgagccggcaccacgccttttgcttccgaggcatctccgcagtccctagccctggagaggaggaaggaggcacccctacatcaccaagcggggtggaggaatggatcgtaacacaggtagtgcctggcgtggccgccgtaccagtggaggaggaaacaacagctgttcccagcggtgagactactgcgatcctcgaattcactactgagccagaaaaccagacagagtgggaacctgcatatacccccgtggggaccagccctctgcccggaatcctcccaacatggcctccaaccggggcggctaccgaggaatctacggaaggcccctccgcaacggaagtgccaagcgccagcgaggagccctcaccttctgaagtgccctttccgtctgaggaaccatccccctccgaagaaccctttcctagcgttcgaccattccctagcgtggagttgttcccttcggaggaaccgttcccatccaaagagccaagtcccagcgaggaacctagcgccagtgaagaaccatatacgccctctcctcccgtgccaagttggactgaattgccttccagtggcgaagaaagtggcgcaccagacgtttccggggactttacaggttcaggcgatgtgtcaggccacctggatttttccggccaactgagcggtgatagggcctccggcttgccaagtggtgacctcgattcgtccggattgacctccacagttggcagcggcctccccgtcgagtctggactccctagcggcgatgaggagcgaatcgagtggccttcaacacctacagtgggtgaacttccatccggcgccgaaatcctagaagggagcgccagcggtgttggcgatctgagtggactgcccagcggtgaggtcctggagacctccgcctctggagtgggggacttaagcgggttgccttcgggagaggtgctcgagactacagcccccggcgtggaggacattagcgggttaccatccggcgaggtactcgagactacggccccaggggtggaagacatcagtggtcttccatcgggggaggttctggaaacaaccgctcctggggtcgaagacatctccggtctgccctctggtgaggtattggaaacaaccgcccccggtgtcgaagatatcagcggactcccatcaggagaggtgctggagaccacagccccgggagtggaagatattagtggtctacctagcggtgaagtgctcgaaaccacagccccaggggtggaggacatcagcggcctgcctagcggggaggtactcgagactgccgcgcccggcgtcgaggatatcagcggactgcccagcggggaagtgctggaaacggccgcgcctggcgtggaagacatttcagggctcccctcgggagaagttctcgagaccgcagctcctggggttgaggatatcagcggattgccaagcggcgaggttctggagaccgccgcacccggcgtggaggacatttctggccttccgagtggtgaggtgttggagacagccgccccaggcgttgaggacattagcgggcttcccagtggcgaagtgcttgagaccgctgcccccggcgtcgaggatatttctggcctgccctcaggcgaggttctcgaaaccgctgcccctggagtggaagacatatccgggctgccctctggtgaggttctggagactgcggcccctggcgtcgaggacatttccggactccccagcggcgaagttcttgagacggcagcacccggtgtggaagacatctccggcctgccttccggagaagtcttggaaacagccgcaccaggagtggaagacataagcggtttacccagtggtgaggtcctggagaccgcagcgccaggggttgaagacatcagtggcctacccagcggagaggtcttagagacagcagctcccggcgtggaagatatctccggcctgcccagcggggaggtccttgaaacagcagccccaggcgtcgaggatatttccggcctgccatctggcgaagtgctggagaccgcagcccctggggttgaagacatctcaggactgccatccggggaggtgctcgagaccgcagcgccaggcgttgaagacatttcaggactgccctccggagaagtcctggagaccgctgcaccaggtgtcgaggatatatcaggactccccagcggagaggtacttgaaacaaccgcacctggcgtggaagaaatcagcggcctgccgtccggcgaagtgcttgagactacggcccccggagtcgacgaaatcagtggcttgccatccggcgaagtccttgaaacaactgcgcccggcgtcgaagaaatcagtggcctgcccagtggagaggtgctggaaacttctaccagcgcggtcggcgacctcagcggactaccatccggaggagaggtgctcgagatctctgtgtcaggcgttgaagatatatctggcttaccctccggagaagtcgtggaaacatcagcctccggtattgaggacgtcagcgagcttccttctggggaggggctcgaaacatccgcttctggagtggaagacttgtctaggctgccaagcggcgaggaagtgcttgagatcagcgcttccgggttcggagacctgtcgggcctgccctcaggaggggaaggcctggagacttcagcatcagaagtcggtactgacctgagcgggttgccgtcgggccgtgaaggactcgaaacaagtgcttcaggcgctgaggacctctccggactaccaagtgggaaagaagatctggtgggctctgcgtcgggtgacttggacttgggcaaactaccctcagggactctgggctccggccaagcccccgaaacatctggattgcctagcggcttttccggagagtacagtggggtggacctaggatctgggccgccctccgggctgccagatttctccggactgccaagtggcttccctaccgtgtccctggtggattctactctggtcgaggtggtaactgcgtctactgcctccgagctagagggaagaggtaccatcggaatttcgggggccggtgagattagcggcctcccgtctagtgaattagatatctcaggcagggccagtggactcccctctggcacggaactgtcaggacaggcttctggaagccccgacgtgtcaggggagatcccagggcttttcggcgtcagtggacagccctcaggttttccagacacaagcggcgagaccagtggagtaacagagctgagtggcctgtctagcggacagcccggtatatccggcgaagctagcggagtgctttacggcacgagtcaaccttttggcattaccgacctcagcggagagacaagcggtgtgcccgacctgagcggccaaccttcagggctcccaggcttctctggggctactagcggcgtgcccgatctcgtctctggtactacatctggctcaggcgagagctcaggtatcactttcgtggatacctctcttgttgaggtagcgccgacaaccttcaaggaggaggagggactaggctcagtggagctcagcggcctcccttcaggggaagccgacctgtccgggaagtccgggatggttgatgtcagcggccagttttcaggcacagtggactctagtggctttacgagccagaccccggaattcagtggccttccttctggaatcgcggaagtgtcaggggagtcgagtagggcagaaatcgggtcctcccttccctccggagcttactacggatctggcaccccatcatcattccctacagtgtccctagtggaccgcacgctagtcgaaagtgtgactcaggcacccaccgcacaagaggcaggcgagggcccttcaggcatactggaattatccggagcccacagcggagcgcctgatatgtcaggcgaacacagcggcttcctagacctcagcggtctacagtcagggctaatcgagccatcgggagagccgcccggaacgccttacttttctggagacttcgcgagcacaacaaacgtgtctggcgagagctctgtggccatggggacctctggcgaagcgagcggtctgccagaggtcaccctaatcacatccgagtttgtcgaaggagtgacagaaccgacaattagccaggagctgggccaacgacccccagtgactcacactccgcagctgtttgagagttcagggaaggtgtctacggccggcgatatatccggggccacgcccgttctgccagggtcaggcgtggaagtgtcttcagttcctgagagttcttcggagaccagtgcctaccccgaagcgggtttcggtgcctccgcagcccctgaggcttcaagagaggattccgggagtccggatcttagtgaaactacctctgctttccacgaggctaacctggaaagatctagcggactgggcgtgtcgggaagtacactgaccttccaagagggcgaagcctccgccgcacccgaagtaagcggagagagcacaacaacaagcgacgtcggaaccgaggcacctggcctgccgtccgccacccccacggcatcaggcgacaggaccgagatctccggagatctgtctggccacactagccagctcggagtcgtgatttctacctccatccctgagtccgagtggacccagcagactcagcgtccggccgagacgcacttagaaatcgaatcttctagcctgctttattcaggcgaggaaacgcatacagtggagacagcaaccagtcctacagacgcttcgatacctgcaagccccgaatggaaacgagagtcagagagcaccgccgcagatcaggaggtctgcgaagagggctggaataagtaccaggggcactgttaccggcatttccccgatagggaaacttgggtggatgccgaaagaagatgtagggaacagcagtcacatctttcctcaattgtgacccccgaggagcaggaattcgtcaacaataatgcacaggattaccaatggatcgggctgaacgacagaactatcgagggagatttccgatggtccgatggccacccaatgcaatttgagaattggcggccgaatcaacctgataattttttcgccgccggcgaagactgcgttgtgatgatttggcacgagaaaggggaatggaatgatgtgccctgcaattatcatcttcctttcacctgtaaaaagggaactgctacaacatataaaagaagactgcagaaaagaagttcacgccatcccaggcggtcacggcccagcacggcccattag

SEQ ID NO: 49221 - DNA, 7296 bp, Artificial Sequence
  derived and/or modified sequence
atgaccactctgttatgggtgtttgtcacacttagggtaatcacagccgccgtaaccgttgagacaagtgatcacgacaatagcctctccgtaagtatcccacagccttcccccctccgagtcctcttagggactagcctcactatcccatgttactttattgatcctatgcatccagttacaacagcgccatcaactgcaccattagccccgaggattaaatggtcgagagtgtccaaagaaaaagaggtggtgctcctggtagcgaccgagggcagagtgcgggttaactcagcctaccaagataaggtcagtctgccaaactacccagcgatcccaagtgatgccacgctcgaagtccagagcctgagatcaaacgactccggggtttaccgctgtgaagtaatgcacgggatagaagactccgaagctacacttgaggtggtagtcaagggaattgtttttcactatcgcgccatcagtacaagatacaccttggatttcgaccgagcgcagagagcctgtctacaaaattccgccataatcgcaacccccgaacagctgcaggcggcgtatgaagatggtttccatcaatgtgacgccggttggctggcagatcagacagtcagatacccaattcataccccacgcgagggctgctacggggataaagatgaattcccgggagtgcgaacgtacggcattcgggacaccaacgaaacgtatgacgtgtactgttttgcagaagagatggaaggcgaagtgttttacgcgactagcccagaaaaattcacattccaggaagccgccaacgaatgcagacgtctcggggccaggctcgcaaccaccggtcagctttatcttgcttggcaggctgggatggatatgtgctcagcaggatggttagcagaccggtcagtccgctacccaatttccaaagcgagacccaattgtggcggcaatcttctgggagtgagaacagtctacgttcacgccaaccagacaggataccctgacccctcatcccggtacgacgccatttgttatactggcgaagattttgtagacatccctgagaacttttttggcgtgggcggggaggaagatattaccgtgcagactgtcacatggccagacatggaactgccccttccaaggaacattactgagggcgaagctagaggaagcgtaattctgacagttaagcctatttttgaagtgagtcctagcccccttgaaccagaggagccttttacgttcgcccccgagattggagccacagcctttgccgaagtggaaaacgagacaggcgaggccacccgaccctggggctttcccacccccggcctcggccctgctaccgcttttacttctgaagatctcgtcgttcaggtgaccgcagtccccggacagccccacctaccaggaggagtggtcttccactatcggcctggccctacacgatactctttgacatttgaagaagcacagcaggcatgcctgcgcactggagccgttatcgcttccccggaacagttgcaagctgcgtatgaggccggatacgagcagtgtgatgcagggtggctccgagaccagacggtaagatacccgatcgtgtcgccaagaactccatgtgtgggcgacaaagacagcagcccaggcgtaagaacctatggcgtaaggccctccactgaaacttatgacgtttactgcttcgtggaccgtcttgaaggcgaggtcttttttgcaaccaggctcgagcaatttaccttccaagaagctcttgaattctgcgagagccataatgcgacgctcgcaacaactggacaactgtacgcagcgtggtcaagaggactggacaagtgttacgccgggtggctagcggacggctcactgagatatccaatcgtgactcctcgacctgcttgtggcggggataaaccaggagtgaggactgtctatctgtatcccaatcagaccggcctgcccgatccactgtcaaggcaccatgcgttttgtttccgagggatcagtgcagtaccatcacctggagaggaggaggggggaactcccacttcaccgtctggtgtcgaggagtggatcgttacacaggtcgtgcccggcgtcgccgccgtgccagtcgaggaagaaactaccgctgtgccgtctggagagactaccgcaatcttggagttcacaactgaacccgaaaaccaaacagagtgggaaccagcatataccccggttggtacttcccccctcccgggcatactgcctacctggcctcccacaggagctgccaccgaggaaagcaccgaggggcctagcgcaactgaagtgccatctgctagtgaggagccatccccgtccgaagtacctttcccaagcgaggaacctagcccttccgaggaacccttccctagtgtccgcccctttccctcagttgagttgtttccgtccgaagaaccgtttcctagcaaagaacctagcccgagtgaagagccaagcgccagtgaggaaccttatacccctagccctcccgtgccgagttggaccgagctccccagttctggcgaggaaagtggagctcccgacgtaagcggagattttactggatccggcgacgtaagtgggcaccttgacttttctggccagctgtcaggggatagagcgagtgggttgccttccggcgatttggactcttcgggactgacatctaccgtggggagtggcctcccagtggagagcgggctgccatcaggcgacgaggagagaatagagtggccttccacaccgaccgtgggagaactcccgagtggagctgaaatcctggaagggagtgcctcaggcgtgggcgatttgagtggactgcccagtggagaagtgctcgagacaagcgctagcggggtcggagatctgagcggcttgccaagcggcgaggttctggagactacagcccctggagtggaggatattagcggcttaccctctggagaagtgttggaaacaaccgctcctggcgtggaagatatcagcggactgccatccggagaggtgcttgagacgaccgcaccaggtgtagaggatatcagcggactaccatcgggcgaagtactggagactacggctcccggcgtagaggacatatcaggcttacccagtggggaggttttggaaacaacagctcctggcgtcgaggacataagtggactgccttctggagaagtactagaaaccactgccccaggcgtggaggacattagcggcctgccaagtggggaagttctcgaaacagcagcacccggagtagaagatattagcgggttaccgtccggcgaagttctagaaaccgctgcacccggtgtagaagatatctctggcctgccatcaggtgaagttttagagactgccgcaccaggagtggaagacattagcggcctgccctcaggagaggtactagagacggcggcgcccggtgtggaggatatatcaggactgccttccggggaagtgttggagaccgcagcgccaggagtggaggatatctcgggtctgccttcaggggaagtcctcgaaacggccgcgcccggagtggaagacatctccggtttgccttctggggaagtactggaaacagccgcaccaggggtggaggatataagcggactcccgagtggtgaggtcctggagactgctgctcctggcgtagaagatatttctggcctgccctccggagaggtactcgaaacagcagcaccaggcgttgaggacatatctgggcttccgagcggcgaggtcctggagactgcggcccctggagttgaagacatatccggactgccttcaggagaggtgcttgagacagcggcaccaggtgtagaagacattagcggcctcccttctggagaagtgttagagactgcagctccaggcgtggaagacatctctgggctgccatcaggcgaagtgctcgagacagctgctcccggcgtggaggacatctccggcttgccaagcggcgaggtcctggaaaccgcggcccccggcgtcgaggacattagcggcctgcctagtggggaagttcttgaaacagccgcccctggagttgaggacataagtggactgccatcgggggaggtactggagaccgcagccccaggtgtggaggatatttcaggtttaccaagcggcgaagtcctggaaacaaccgcacctggcgtggaagaaatcagcggcctgccgtccggcgaagtgcttgagactacggcccccggagtcgacgaaatcagtggcttgccatccggcgaagtccttgaaacaactgcgcccggcgtcgaagaaatcagtggcctgcccagtggagaggtgctggaaacttctaccagcgcggtcggcgacctcagcggactaccatccggaggagaggtgctcgagatctctgtgtcaggcgttgaagatatatctggcttaccctccggagaagtcgtggaaacatcagccagcggtatcgaggacgtcagtgaactcccgagtggcgaggggcttgagacaagcgcttcaggcgtggaggacttatccagacttccgtctggggaagaagtgttagagattagcgcgagcgggttcggcgatctgagtggtttaccgtccgggggagagggtttggaaacgtcagcaagtgaagtgggaactgacttatcaggtctccccagtgggcgtgagggactggagacatcagcgtccggagcggaagacctgtctggactcccttcaggcaaagaggaccttgtaggatccgcatcgggcgatcttgacttaggtaagctcccttctggaacactggggtccggccaagctcctgagacatctggactgccatccgggtttagtggcgagtattctggcgtcgacttagggtccggtcctccttctggcctccccgactttagcgggctcccatcgggctttccaacagtctctttggtggactctacactcgtcgaagtggtgactgcaagcactgcatctgagctcgagggccggggaactatcggcatcagcggtgccggcgagatctctgggctgccatcctctgagttggacatctccggcagagccagcgggctaccaagcggaacagaattgagcggccaagcatccggctcaccagatgtcagcggtgagatccctggactgtttggcgtgtctggtcagccctcagggtttcctgatactagcggtgagacaagcggcgtgaccgaacttagcggactgtcctctggccaaccaggaatatctggggaggcatccggggtgttgtatggtacttcacagcccttcggcatcaccgacctatctggtgaaactagtggcgtccccgacctctcaggccagcctagcggactgcccgggttcagcggggcaacttccggcgttcccgacttggtctctggtacaacctctgggtctggagaaagtagcgggattacattcgtggatacaagtcttgtggaagtggcaccaacgactttcaaggaggaggagggacttggaagcgtggaactgagcgggctaccttctggagaagccgacctttcaggaaagagcgggatggtggacgttagtgggcagtttagcggtacggtcgactcatcaggctttacctcacaaactcccgagttttctggcctacctagcggtatcgcggaagttagcggagagagctcacgcgcagagattggctcttccctcccttccggtgcatattatggaagtggaacaccttccagctttccgacagtctctctcgtcgatcgaacccttgtcgaatctgtcacgcaagccccaacagcccaagaagctggtgaagggccgtctggcattctggaactcagcggcgcgcactcgggagctcctgacatgtcaggcgagcactcaggatttctagatctatctggattgcagtctggactgatagaaccgtccggggagccaccagggaccccttatttctccggcgacttcgcttctacgactaacgtttcaggagaatcatcagtggctatggggacctcaggggaagcatccggacttcctgaagttacactgattacttccgaatttgttgaaggtgtgaccgaacccaccatctcccaagaacttggccaacggccacccgtgacccacacaccacagctatttgagagctctggcaaggtcagtacagccggcgatatttctggcgctacacccgtgctccccggatctggtgtggaggtatcaagcgtccctgaatcctcaagtgagacgtcagcttatccagaggcaggctttggcgcctccgcagctcctgaagcaagcagggaagatagtggatcccccgatttaagcgaaacaacctcagctttccacgaagctaacctggagcgatcatctggacttggcgtatctggatctaccttaacttttcaagagggagaggcctccgctgcccctgaagtgagtggggagagcacgacaacatccgacgtgggcaccgaagccccaggtctgccctccgctacacctacagcctctggcgatagaacggaaatcagtggagatctgtcgggacacacctcacagctgggcgtcgtcattagtacatctataccagagtctgaatggacgcagcagacacagcggccagccgagacacaccttgagattgagtcatcctcactgctatactctggcgaggaaacccatactgtagagaccgcgacctcacccaccgacgcttctatccccgcctcaccagagtggaagagagagagtgagagcacagcggccgaccaagaagtttgcgaagaaggctggaataagtatcaaggacattgctaccgccattttccagatagggaaacttgggtggacgcagaaagaagatgcagagaacagcaatcccacttgtcatcgatcgttaccccagaagagcaagagtttgttaataacaacgcccaggactaccagtggatcggccttaacgacaggacaattgagggcgacttcagatggagcgacggacacccaatgcagttcgaaaactggcggcccaatcaacctgataattttttcgcagctggtgaagactgcgtcgttatgatatggcacgagaaaggcgaatggaatgacgtgccttgcaactaccacctgccgttcacttgtaagaaaggcacagccactacatacaagcgaagactacagaaacgttcaagccggcaccctcgacgttcacgaccatctaccgcccactag

SEQ ID NO: 49222 - DNA, 7296 bp, Artificial Sequence
  derived and/or modified sequence
atgaccaccctgctgtgggtgttcgtgaccctgagagtgatcaccgccgccgtgaccgtggagaccagcgaccacgacaacagcctgagcgtgagcatcccccagcccagccccctgagagtgctgctgggcaccagcctgaccatcccctgctacttcatcgaccccatgcaccccgtgaccaccgcccccagcaccgcccccctggcccccagaatcaagtggagcagagtgagcaaggagaaggaggtggtgctgctggtggccaccgagggcagagtgagagtgaacagcgcctaccaggacaaggtgagcctgcccaactaccccgccatccccagcgacgccaccctggaggtgcagagcctgagaagcaacgacagcggcgtgtacagatgcgaggtgatgcacggcatcgaggacagcgaggccaccctggaggtggtggtgaagggcatcgtgttccactacagagccatcagcaccagatacaccctggacttcgacagagcccagagagcctgcctgcagaacagcgccatcatcgccacccccgagcagctgcaggccgcctacgaggacggcttccaccagtgcgacgccggctggctggccgaccagaccgtgagataccccatccacacccccagagagggctgctacggcgacaaggacgagttccccggcgtgagaacctacggcatcagagacaccaacgagacctacgacgtgtactgcttcgccgaggagatggagggcgaggtgttctacgccaccagccccgagaagttcaccttccaggaggccgccaacgagtgcagaagactgggcgccagactggccaccaccggccagctgtacctggcctggcaggccggcatggacatgtgcagcgccggctggctggccgacagaagcgtgagataccccatcagcaaggccagacccaactgcggcggcaacctgctgggcgtgagaaccgtgtacgtgcacgccaaccagaccggctaccccgaccccagcagcagatacgacgccatctgctacaccggcgaggacttcgtggacatccccgagaacttcttcggcgtgggcggcgaggaggacatcaccgtgcagaccgtgacctggcccgacatggagctgcccctgcccagaaacatcaccgagggcgaggccagaggcagcgtgatcctgaccgtgaagcccatcttcgaggtgagccccagccccctggagcccgaggagcccttcaccttcgcccccgagatcggcgccaccgccttcgccgaggtggagaacgagaccggcgaggccaccagaccctggggcttccccacccccggcctgggccccgccaccgccttcaccagcgaggacctggtggtgcaggtgaccgccgtgcccggccagccccacctgcccggcggcgtggtgttccactacagacccggccccaccagatacagcctgaccttcgaggaggcccagcaggcctgcctgagaaccggcgccgtgatcgccagccccgagcagctgcaggccgcctacgaggccggctacgagcagtgcgacgccggctggctgagagaccagaccgtgagataccccatcgtgagccccagaaccccctgcgtgggcgacaaggacagcagccccggcgtgagaacctacggcgtgagacccagcaccgagacctacgacgtgtactgcttcgtggacagactggagggcgaggtgttcttcgccaccagactggagcagttcaccttccaggaggccctggagttctgcgagagccacaacgccaccctggccaccaccggccagctgtacgccgcctggagcagaggcctggacaagtgctacgccggctggctggccgacggcagcctgagataccccatcgtgacccccagacccgcctgcggcggcgacaagcccggcgtgagaaccgtgtacctgtaccccaaccagaccggcctgcccgaccccctgagcagacaccacgccttctgcttcagaggcatcagcgccgtgcccagccccggcgaggaggagggcggcacccccaccagccccagcggcgtggaggagtggatcgtgacccaggtggtgcccggcgtggccgccgtgcccgtggaggaggagaccaccgccgtgcccagcggcgagaccaccgccatcctggagttcaccaccgagcccgagaaccagaccgagtgggagcccgcctacacccccgtgggcaccagccccctgcccggcatcctgcccacctggccccccaccggcgccgccaccgaggagagcaccgagggccccagcgccaccgaggtgcccagcgccagcgaggagcccagccccagcgaggtgcccttccccagcgaggagcccagccccagcgaggagcccttccccagcgtgagacccttccccagcgtggagctgttccccagcgaggagcccttccccagcaaggagcccagccccagcgaggagcccagcgccagcgaggagccctacacccccagcccccccgtgcccagctggaccgagctgcccagcagcggcgaggagagcggcgcccccgacgtgagcggcgacttcaccggcagcggcgacgtgagcggccacctggacttcagcggccagctgagcggcgacagagccagcggcctgcccagcggcgacctggacagcagcggcctgaccagcaccgtgggcagcggcctgcccgtggagagcggcctgcccagcggcgacgaggagagaatcgagtggcccagcacccccaccgtgggcgagctgcccagcggcgccgagatcctggagggcagcgccagcggcgtgggcgacctgagcggcctgcccagcggcgaggtgctggagaccagcgccagcggcgtgggcgacctgagcggcctgcccagcggcgaggtgctggagaccaccgcccccggcgtggaggacatcagcggcctgcccagcggcgaggtgctggagaccaccgcccccggcgtggaggacatcagcggcctgcccagcggcgaggtgctggagaccaccgcccccggcgtggaggacatcagcggcctgcccagcggcgaggtgctggagaccaccgcccccggcgtggaggacatcagcggcctgcccagcggcgaggtgctggagaccaccgcccccggcgtggaggacatcagcggcctgcccagcggcgaggtgctggagaccaccgcccccggcgtggaggacatcagcggcctgcccagcggcgaggtgctggagaccgccgcccccggcgtggaggacatcagcggcctgcccagcggcgaggtgctggagaccgccgcccccggcgtggaggacatcagcggcctgcccagcggcgaggtgctggagaccgccgcccccggcgtggaggacatcagcggcctgcccagcggcgaggtgctggagaccgccgcccccggcgtggaggacatcagcggcctgcccagcggcgaggtgctggagaccgccgcccccggcgtggaggacatcagcggcctgcccagcggcgaggtgctggagaccgccgcccccggcgtggaggacatcagcggcctgcccagcggcgaggtgctggagaccgccgcccccggcgtggaggacatcagcggcctgcccagcggcgaggtgctggagaccgccgcccccggcgtggaggacatcagcggcctgcccagcggcgaggtgctggagaccgccgcccccggcgtggaggacatcagcggcctgcccagcggcgaggtgctggagaccgccgcccccggcgtggaggacatcagcggcctgcccagcggcgaggtgctggagaccgccgcccccggcgtggaggacatcagcggcctgcccagcggcgaggtgctggagaccgccgcccccggcgtggaggacatcagcggcctgcccagcggcgaggtgctggagaccgccgcccccggcgtggaggacatcagcggcctgcccagcggcgaggtgctggagaccgccgcccccggcgtggaggacatcagcggcctgcccagcggcgaggtgctggagaccgccgcccccggcgtggaggacatcagcggcctgcccagcggcgaggtgctggagaccgccgcccccggcgtggaggacatcagcggcctgcccagcggcgaggtgctggagaccaccgcccccggcgtggaggagatcagcggcctgcccagcggcgaggtgctggagaccaccgcccccggcgtggacgagatcagcggcctgcccagcggcgaggtgctggagaccaccgcccccggcgtggaggagatcagcggcctgcccagcggcgaggtgctggagaccagcaccagcgccgtgggcgacctgagcggcctgcccagcggcggcgaggtgctggagatcagcgtgagcggcgtggaggacatcagcggcctgcccagcggcgaggtggtggagaccagcgccagcggcatcgaggacgtgagcgagctgcccagcggcgagggcctggagaccagcgccagcggcgtggaggacctgagcagactgcccagcggcgaggaggtgctggagatcagcgccagcggcttcggcgacctgagcggcctgcccagcggcggcgagggcctggagaccagcgccagcgaggtgggcaccgacctgagcggcctgcccagcggcagagagggcctggagaccagcgccagcggcgccgaggacctgagcggcctgcccagcggcaaggaggacctggtgggcagcgccagcggcgacctggacctgggcaagctgcccagcggcaccctgggcagcggccaggcccccgagaccagcggcctgcccagcggcttcagcggcgagtacagcggcgtggacctgggcagcggcccccccagcggcctgcccgacttcagcggcctgcccagcggcttccccaccgtgagcctggtggacagcaccctggtggaggtggtgaccgccagcaccgccagcgagctggagggcagaggcaccatcggcatcagcggcgccggcgagatcagcggcctgcccagcagcgagctggacatcagcggcagagccagcggcctgcccagcggcaccgagctgagcggccaggccagcggcagccccgacgtgagcggcgagatccccggcctgttcggcgtgagcggccagcccagcggcttccccgacaccagcggcgagaccagcggcgtgaccgagctgagcggcctgagcagcggccagcccggcatcagcggcgaggccagcggcgtgctgtacggcaccagccagcccttcggcatcaccgacctgagcggcgagaccagcggcgtgcccgacctgagcggccagcccagcggcctgcccggcttcagcggcgccaccagcggcgtgcccgacctggtgagcggcaccaccagcggcagcggcgagagcagcggcatcaccttcgtggacaccagcctggtggaggtggcccccaccaccttcaaggaggaggagggcctgggcagcgtggagctgagcggcctgcccagcggcgaggccgacctgagcggcaagagcggcatggtggacgtgagcggccagttcagcggcaccgtggacagcagcggcttcaccagccagacccccgagttcagcggcctgcccagcggcatcgccgaggtgagcggcgagagcagcagagccgagatcggcagcagcctgcccagcggcgcctactacggcagcggcacccccagcagcttccccaccgtgagcctggtggacagaaccctggtggagagcgtgacccaggcccccaccgcccaggaggccggcgagggccccagcggcatcctggagctgagcggcgcccacagcggcgcccccgacatgagcggcgagcacagcggcttcctggacctgagcggcctgcagagcggcctgatcgagcccagcggcgagccccccggcaccccctacttcagcggcgacttcgccagcaccaccaacgtgagcggcgagagcagcgtggccatgggcaccagcggcgaggccagcggcctgcccgaggtgaccctgatcaccagcgagttcgtggagggcgtgaccgagcccaccatcagccaggagctgggccagagaccccccgtgacccacaccccccagctgttcgagagcagcggcaaggtgagcaccgccggcgacatcagcggcgccacccccgtgctgcccggcagcggcgtggaggtgagcagcgtgcccgagagcagcagcgagaccagcgcctaccccgaggccggcttcggcgccagcgccgcccccgaggccagcagagaggacagcggcagccccgacctgagcgagaccaccagcgccttccacgaggccaacctggagagaagcagcggcctgggcgtgagcggcagcaccctgaccttccaggagggcgaggccagcgccgcccccgaggtgagcggcgagagcaccaccaccagcgacgtgggcaccgaggcccccggcctgcccagcgccacccccaccgccagcggcgacagaaccgagatcagcggcgacctgagcggccacaccagccagctgggcgtggtgatcagcaccagcatccccgagagcgagtggacccagcagacccagagacccgccgagacccacctggagatcgagagcagcagcctgctgtacagcggcgaggagacccacaccgtggagaccgccaccagccccaccgacgccagcatccccgccagccccgagtggaagagagagagcgagagcaccgccgccgaccaggaggtgtgcgaggagggctggaacaagtaccagggccactgctacagacacttccccgacagagagacctgggtggacgccgagagaagatgcagagagcagcagagccacctgagcagcatcgtgacccccgaggagcaggagttcgtgaacaacaacgcccaggactaccagtggatcggcctgaacgacagaaccatcgagggcgacttcagatggagcgacggccaccccatgcagttcgagaactggagacccaaccagcccgacaacttcttcgccgccggcgaggactgcgtggtgatgatctggcacgagaagggcgagtggaacgacgtgccctgcaactaccacctgcccttcacctgcaagaagggcaccgccaccacctacaagagaagactgcagaagagaagcagcagacaccccagaagaagcagacccagcaccgcccactag

SEQ ID NO: 49223 - protein, 418 aa, Artificial Sequence
  derived and/or modified sequence
MRAAPLLLARAASLSLGFLFLLFFWLDRSVLAKELKFVTLVFRHGDRSPIDTFPTDPIKESSWPQGFGQLTQLGMEQHYELGEYIRKRYRKFLNESYKHEQVYIRSTDVDRTLMSAMTNLAALFPPEGVSIWNPILLWQPIPVHTVPLSEDQLLYLPFRNCPRFQELESETLKSEEFQKRLHPYKDFIATLGKLSGLHGQDLFGIWSKVYDPLYCESVHNFTLPSWATEDTMTKLRELSELSLLSLYGIHKQKEKSRLQGGVLVNEILNHMKRATQIPSYKKLIMYSAHDTTVSGLQMALDVYNGLLPPYASCHLTELYFEKGEYFVEMYYRNETQHEPYPLMLPGCSPSCPLERFAELVGPVIPQDWSTECMTTNSHQVLKVIFAVAFCLISAVLMVLLFIHIRRGLCWQRESYGNI

SEQ ID NO: 49224 - DNA, 92 bp, Artificial Sequence
  derived and/or modified sequence
aaggaatggaatggtacggaatagaatggaatggaacgaattgtaatggaatggaatttaatggaacggaatggaatggaatggaatcaacg

SEQ ID NO: 49225 - DNA, 1257 bp, Artificial Sequence
  derived and/or modified sequence
atgcgcgcagctcccctacttcttgctcgcgcagcttccttgtcactagggttcctatttctcctgttcttttggctcgacaggagcgtgcttgccaaagagttaaagttcgtcaccttggtgttcaggcacggcgaccgaagccctattgacacattccccactgaccctataaaagagagttcctggccgcagggctttgggcagctgactcaacttggcatggagcaacactacgagctgggagagtatattaggaagcggtaccgcaaattcctgaacgaatcttataagcacgagcaagtttacatcagaagcaccgacgtcgatcggaccttgatgtccgctatgactaaccttgccgccctgttccctcctgagggcgtgtcaatctggaaccccattcttctgtggcagcctataccagtgcacactgtgccccttagtgaagatcagctcttgtacttgccatttagaaattgccccagattccaggaacttgagtccgagaccttgaaatccgaggagttccaaaagcgattacacccttataaggacttcatcgctacactggggaaactgtctggactgcacgggcaggacctctttggaatttggagcaaggtgtacgatccgctgtattgtgagtccgtgcataatttcacactcccatcatgggctacagaggacaccatgacaaagctgcgggagctatctgaactgagcctgctaagcttgtatggcatccacaaacagaaagagaaatctagactgcagggcggtgttctggtcaacgaaatcctcaaccatatgaagagagcaacccaaattcccagttataaaaaattgatcatgtattctgctcacgacaccacggtgtctggcctacagatggccttggatgtgtacaatggcctcctccctccatatgcatcctgtcacctcaccgaactgtacttcgagaagggagagtatttcgtcgaaatgtactacaggaacgagacacaacacgaaccctatccactgatgctgccaggttgcagcccttcttgccctttggagaggttcgccgaattagtgggccccgttattcctcaggactggagcactgagtgtatgaccacgaatagccaccaagttttgaaggtcatttttgctgtggccttttgtctgatttcagcagtgctcatggttctcttatttattcacatccggcgtggcttgtgttggcaaagagagagttatggtaacatctag

SEQ ID NO: 49226 - DNA, 1257 bp, Artificial Sequence
  derived and/or modified sequence
atgagagctgcccccctgctgctggcccgggccgccagcctgagcctgggcttcctgttcctgctcttcttctggctggacagatctgtgctggccaaggagctgaagtttgtgaccctggtgttccgccacggggacaggagccccatcgacaccttccccacagaccccatcaaggagagctcctggccccagggcttcggccagctgacccagctgggcatggagcagcactatgagctgggggagtacatcaggaagcgctacaggaagttcctgaatgaaagctacaagcatgagcaggtgtacatccgcagcacagatgtggacaggaccctgatgtctgccatgaccaacctggccgccctcttccccccagagggcgtgtccatctggaaccccatcctgctgtggcagcccatccctgtgcacacagtgcccctgtctgaggaccagctgctgtacctgcccttcaggaactgcccccgcttccaggagctggagagcgagaccctgaagtctgaggagttccagaagaggctgcacccctacaaggacttcatcgccaccctgggcaagctgagcggcctgcacggccaggacctgtttggcatctggagcaaggtgtatgaccccctgtactgtgagagcgtgcacaacttcaccctgcccagctgggccacagaggacaccatgaccaagctgcgggagctgtctgagctgagcctgctgagcctgtatggcatccacaagcagaaggagaagagccggctgcagggcggcgtgctggtgaatgagatcctgaaccacatgaagagggccacccagatccccagctacaagaagctgatcatgtacagcgcccatgacaccaccgtgtctggcctgcagatggccctggatgtgtacaacggcctgctgcccccctatgccagctgccacctgacagagctgtactttgagaagggggagtactttgtggagatgtactacagaaatgagacccagcacgagccctaccccctgatgctgcccggctgcagccccagctgccccctggagagatttgctgagctggtgggccctgtgatcccccaggactggagcacagagtgcatgaccaccaacagccaccaggtgctgaaggtgatctttgctgtggccttctgcctgatctctgctgtgctgatggtgctgctcttcatccacatcagaagaggcctgtgctggcagcgggagagctatggcaacatctag

SEQ ID NO: 49227 - DNA, 1257 bp, Artificial Sequence
  derived and/or modified sequence
atgcgggccgcccccctgctgctggcccgggccgccagcctgagcctgggcttcctctttttactcttcttctggcttgacaggagtgtacttgctaaggagctgaagttcgtcaccctcgtcttccgacacggggatcgcagccctatcgataccttcccaacagaccccatcaaggaatctagttggcctcagggttttgggcagctgacccagcttgggatggagcagcattatgagctgggagaatacatccgcaagaggtaccgcaagtttcttaacgaatcttacaagcacgagcaggtctacataaggagcaccgacgtagaccggacgcttatgtccgccatgacgaatctggcagcactttttccccccgaaggagttagtatttggaacccaatcttactgtggcaaccaataccagttcatacagtgcctctatctgaagaccagcttctctacttgccgttcaggaactgtccaagattccaagagctggaaagtgaaaccctgaagtccgaggagttccagaaacggctccacccatataaggacttcattgcaacgctcggcaagctgagtggtctgcacggacaagatttgttcgggatctggtcaaaagtttatgatcccctttattgcgaatctgttcacaatttcaccctgccttcctgggctactgaggacactatgacaaaactccgagaactgtccgagctttctttgctctcattgtacgggatccacaagcagaaggagaaatctaggctgcaggggggagtgctggttaacgagatcctaaaccacatgaagcgagccacacagatccccagttataagaaactgatcatgtatagtgcgcacgatacgacagtgagcggtttacaaatggctttggatgtgtataacggcttgctccctccatatgcgtcatgtcacctgactgagctgtacttcgagaagggggaatatttcgtggagatgtactaccgaaacgagacccagcacgaaccctaccctttaatgttaccagggtgctccccatcgtgtcctctggaaagatttgcggaacttgtgggcccagtcatcccccaggattggtcgacagagtgtatgacaactaactctcaccaggttctcaaggtcatatttgctgtggcattttgtctcatcagtgccgtactgatggtcctgctgttcattcatatcagaagagggttatgttggcagcgggaaagctatgggaatatttag

SEQ ID NO: 49228 - DNA, 1257 bp, Artificial Sequence
  derived and/or modified sequence
atgcgcgcagcccctttgctccttgcacgagctgcctctttgtctttgggtttcctcttcctcctgtttttttggcttgatagatccgtcctcgccaaagaactaaaattcgtgaccctcgtctttcgccatggagatagatcccctatcgacacattccccaccgatcccattaaagagagctcctggccacagggttttgggcaacttacacagttgggcatggagcaacattacgagttgggcgagtatattcgcaaaagataccgcaaattcctcaatgaaagttacaagcacgaacaagtctacatccggtcaacagatgtcgatagaactctcatgagcgccatgaccaatctagctgcactgtttccccctgaaggcgtgagtatctggaacccaatcctcttatggcagccaattcccgtgcacacagtgcccctcagtgaggaccagctcctctacttgcctttcagaaactgcccacgttttcaggaactggagtccgagactctgaagtcagaggagtttcaaaaacgcttacatccatacaaagactttatcgccactctggggaagttatcgggtctacacggccaggacttgtttggtatttggagcaaggtttacgaccctctttactgcgaatctgtacataatttcacgctgccttcctgggctacggaagacacaatgaccaaactccgtgaattgtccgaactgagtctgttgtccttgtacggtatccacaaacagaaggagaaaagtagacttcaggggggagtgttggttaacgagatcctgaatcacatgaagcgcgctactcaaattccatcttataagaaactgattatgtacagtgcccacgacactactgtctctgggttgcagatggccctcgatgtatataacggactcctccccccatacgctagttgccacctgacagagctgtactttgagaagggtgagtactttgttgagatgtattataggaatgagacacagcacgaaccttaccccctaatgctgccagggtgttccccctcctgcccgctcgagcgatttgcagagttagtgggccctgttatccctcaagattggagcaccgagtgcatgacaaccaatagccaccaggtgcttaaggtaatctttgcggtagcattctgcttaatcagcgctgtgcttatggttctcctgttcattcatatccgcagaggcctgtgctggcagagagagagctacggcaatatctag

SEQ ID NO: 49229 - DNA, 1783 bp, Artificial Sequence
  derived and/or modified sequence
gaagtggtagcagttcctcctaactcctgccagaaacagctctcctcaacatgagagctgcacccctcctcctggccagggcagcaagccttagccttggcttcttgtttctgctttttttctggctagaccgaagtgtactagccaaggagttgaagtttgtgactttggtgtttcggcatggagaccgaagtcccattgacacctttcccactgaccccataaaggaatcctcatggccacaaggatttggccaactcacccagctgggcatggagcagcattatgaacttggagagtatataagaaagagatatagaaaattcttgaatgagtcctataaacatgaacaggtttatattcgaagcacagacgttgaccggactttgatgagtgctatgacaaacctggcagccctgtttcccccagaaggtgtcagcatctggaatcctatcctactctggcagcccatcccggtgcacacagttcctctttctgaagatcagttgctatacctgcctttcaggaactgccctcgttttcaagaacttgagagtgagactttgaaatcagaggaattccagaagaggctgcacccttataaggattttatagctaccttgggaaaactttcaggattacatggccaggacctttttggaatttggagtaaagtctacgaccctttatattgtgagagtgttcacaatttcactttaccctcctgggccactgaggacaccatgactaagttgagagaattgtcagaattgtccctcctgtccctctatggaattcacaagcagaaagagaaatctaggctccaagggggtgtcctggtcaatgaaatcctcaatcacatgaagagagcaactcagataccaagctacaaaaaactcatcatgtattctgcgcatgacactactgtgagtggcctacagatggcgctagatgtttacaacggactccttcctccctatgcttcttgccacttgacggaattgtactttgagaagggggagtactttgtggagatgtactatcggaatgagacgcagcacgagccgtatcccctcatgctacctggctgcagccccagctgtcctctggagaggtttgctgagctggttggccctgtgatccctcaagactggtccacggagtgtatgaccacaaacagccatcaagttctaaaggtcatctttgctgttgccttttgcctgatatctgctgtcctaatggtactactgtttatccacattcgccgtggactctgctggcagagagaatcctatgggaacatctgaacagacagctggataagccaggccaacctcctgtgacacagcatctctcagtggtgccgcatctaaaggacaggcttttgccatgtgggcattgccatcctcacaccctgccttttgaatctgcccagagcagggtctgaactcacagtgacccacaggctgctgctggatgaacactcaggctacctaggtcttctcataatggagtggtagtgcaggctgcttgttcagctagaaagaggctgttatgcataggatggttgtattctctgccacagttgtccggagagaaataagaagccaaactccaatcagccttttacctgcaaagagtgaagggtgagaaggtggacaaagacatagattagaaaaatactggatattgggggaagttagactagaagtattattatacagggtgattcttacgaaagaagacccaatcataaattataaataaactttttatttagcta

SEQ ID NO: 49230 - DNA, 1257 bp, Artificial Sequence
  derived and/or modified sequence
atgagagccgcccccctgctgctggccagagccgccagcctgagcctgggcttcctgttcctgctgttcttctggctggacagaagcgtgctggccaaggagctgaagttcgtgaccctggtgttcagacacggcgacagaagccccatcgacaccttccccaccgaccccatcaaggagagcagctggccccagggcttcggccagctgacccagctgggcatggagcagcactacgagctgggcgagtacatcagaaagagatacagaaagttcctgaacgagagctacaagcacgagcaggtgtacatcagaagcaccgacgtggacagaaccctgatgagcgccatgaccaacctggccgccctgttcccccccgagggcgtgagcatctggaaccccatcctgctgtggcagcccatccccgtgcacaccgtgcccctgagcgaggaccagctgctgtacctgcccttcagaaactgccccagattccaggagctggagagcgagaccctgaagagcgaggagttccagaagagactgcacccctacaaggacttcatcgccaccctgggcaagctgagcggcctgcacggccaggacctgttcggcatctggagcaaggtgtacgaccccctgtactgcgagagcgtgcacaacttcaccctgcccagctgggccaccgaggacaccatgaccaagctgagagagctgagcgagctgagcctgctgagcctgtacggcatccacaagcagaaggagaagagcagactgcagggcggcgtgctggtgaacgagatcctgaaccacatgaagagagccacccagatccccagctacaagaagctgatcatgtacagcgcccacgacaccaccgtgagcggcctgcagatggccctggacgtgtacaacggcctgctgcccccctacgccagctgccacctgaccgagctgtacttcgagaagggcgagtacttcgtggagatgtactacagaaacgagacccagcacgagccctaccccctgatgctgcccggctgcagccccagctgccccctggagagattcgccgagctggtgggccccgtgatcccccaggactggagcaccgagtgcatgaccaccaacagccaccaggtgctgaaggtgatcttcgccgtggccttctgcctgatcagcgccgtgctgatggtgctgctgttcatccacatcagaagaggcctgtgctggcagagagagagctacggcaacatctag

SEQ ID NO: 49231 - protein, 359 aa, Artificial Sequence
  derived and/or modified sequence
MNCFQGTNASALEKDIGPEQFPINEHYFGLVNFGNTCYCNSVLQALYFCRPFRENVLAYKAQQKKKENLLTCLADLFHSIATQKKKVGVIPPKKFISRLRKENDLFDNYMQQDAHEFLNYLLNTIADILQEEKKQEKQNGKLKNGNMNEPAENNKPELTWVHEIFQGTLTNETRCLNCETVSSKDEDFLDLSVDVEQNTSITHCLRDFSNTETLCSEQKYYCETCCSKQEAQKRMRVKKLPMILALHLKRFKYMEQLHRYTKLSYRVVFPLELRLFNTSSDAVNLDRMYDLVAVVVHCGSGPNRGHYITIVKSHGFWLLFDDDIVEKIDAQAIEEFYGLTSDISKNSESGYILFYQSRE

SEQ ID NO: 49232 - DNA, 1080 bp, Artificial Sequence
  derived and/or modified sequence
atgaactgcttccagggcaccaacgccagcgccctggagaaggacatcggccccgagcagttccccatcaacgagcactacttcggcctggtgaacttcggcaacacctgctactgcaacagcgtgctgcaggccctgtacttctgcagacccttcagagagaacgtgctggcctacaaggcccagcagaagaagaaggagaacctgctgacctgcctggccgacctgttccacagcatcgccacccagaagaagaaggtgggcgtgatcccccccaagaagttcatcagcagactgagaaaggagaacgacctgttcgacaactacatgcagcaggacgcccacgagttcctgaactacctgctgaacaccatcgccgacatcctgcaggaggagaagaagcaggagaagcagaacggcaagctgaagaacggcaacatgaacgagcccgccgagaacaacaagcccgagctgacctgggtgcacgagatcttccagggcaccctgaccaacgagaccagatgcctgaactgcgagaccgtgagcagcaaggacgaggacttcctggacctgagcgtggacgtggagcagaacaccagcatcacccactgcctgagagacttcagcaacaccgagaccctgtgcagcgagcagaagtactactgcgagacctgctgcagcaagcaggaggcccagaagagaatgagagtgaagaagctgcccatgatcctggccctgcacctgaagagattcaagtacatggagcagctgcacagatacaccaagctgagctacagagtggtgttccccctggagctgagactgttcaacaccagcagcgacgccgtgaacctggacagaatgtacgacctggtggccgtggtggtgcactgcggcagcggccccaacagaggccactacatcaccatcgtgaagagccacggcttctggctgctgttcgacgacgacatcgtggagaagatcgacgcccaggccatcgaggagttctacggcctgaccagcgacatcagcaagaacagcgagagcggctacatcctgttctaccagagcagagagtag

SEQ ID NO: 49233 - DNA, 1080 bp, Artificial Sequence
  derived and/or modified sequence
atgaactgctttcagggcaccaatgccagcgcacttgagaaagatattggtcctgagcagttccctatcaatgaacactacttcggcctggtgaattttggcaatacatgttattgtaactcggtcctgcaggctttgtatttctgcaggcctttcagggagaacgtgctggcttataaagcgcagcagaagaagaaagagaacttactgacttgtttggccgatctctttcatagcattgccacgcagaagaagaaagtcggcgtaattcctcctaagaaattcattagtagacttcggaaagagaatgacctgttcgacaactacatgcagcaagacgcacacgaattcctgaattacttattgaacacaattgccgatatactacaggaagagaaaaaacaggaaaagcagaatggaaagttgaagaacggcaatatgaatgagcccgcggagaataacaaaccagagctgacatgggtgcacgagatcttccagggtaccctgaccaatgagacaagatgcctgaactgcgagacggttagtagcaaggacgaggattttttagatctgagcgttgatgtggaacagaatacttcaataacccattgcctccgcgatttttcaaacacagagacgttgtgcagcgaacagaagtactactgtgagacatgttgtagtaaacaggaggcccagaagcgcatgcgcgtcaaaaaactgcccatgattcttgctcttcatctaaagagatttaagtacatggagcaactgcacaggtataccaaattaagttacagagttgtgttcccattggaactccgcctgttcaacaccagctccgatgccgttaatctggatcgtatgtatgatctcgttgcggtggtggtgcactgcgggtccggtcccaaccgcggccattatattacaatagttaaaagccacggcttttggcttctgttcgacgacgatatagttgaaaagattgacgcgcaggcaattgaagaattttacggactgacatccgatatcagcaagaatagcgagagcggatatatcctgttttaccagagccgggaatag

SEQ ID NO: 49234 - DNA, 1080 bp, Artificial Sequence
  derived and/or modified sequence
atgaactgcttccagggcaccaatgccagcgccctggagaaggacatcggccctgagcagttccccatcaatgagcactacttcggcctggtgaactttggaaacacctgctactgcaacagcgtgctgcaggccctgtacttctgccggcccttccgggagaatgtgctggcctacaaggcccagcagaagaagaaggagaacctgctgacctgcctggccgacctcttccacagcatcgccacccagaagaagaaggtgggcgtcatcccccccaagaagttcatcagccggctgaggaaagaaaatgacctgtttgacaactacatgcagcaggatgcccacgagttcctgaactacctgctgaacaccatcgctgacatcctgcaggaggagaagaagcaggagaagcagaatggcaagctgaagaatggaaacatgaatgaacctgctgagaacaacaagccagagctgacctgggtgcatgagatcttccagggcaccctgaccaatgagacccgctgcctgaactgtgagaccgtgagcagcaaggatgaggacttcctggacctgtctgtggatgtggagcagaacaccagcatcacccactgcctgcgggacttcagcaacacagagaccctgtgcagcgagcagaagtactactgtgagacctgctgcagcaagcaggaggcccagaagaggatgagggtgaagaagctgcccatgatcctggccctgcacctgaagcgcttcaagtacatggagcagctgcaccgctacaccaagctgagctacagagtggtgttccccctggagctgcggctcttcaacaccagcagtgatgctgtgaacctggacaggatgtatgacctggtggccgtggtggtgcactgcggcagcggccccaacagaggccactacatcaccatcgtgaagagccacggcttctggctgctgtttgatgatgacatcgtggagaagattgatgcccaggccatcgaggagttctacggcctgaccagtgacatcagcaagaacagcgagagcggctacatcctcttctaccagagccgggagtag

SEQ ID NO: 49235 - DNA, 1080 bp, Artificial Sequence
  derived and/or modified sequence
atgaactgcttccagggcaccaacgccagcgccctggagaaggacattggcccagagcaattccccatcaatgaacattatttcggactggtgaatttcggtaacacctgctattgtaatagcgtgctccaagcactctacttctgtaggccttttagagagaacgtgctagcatacaaggcccagcagaagaaaaaagaaaatttactgacctgcctggcagatctgttccacagtatcgccacgcagaagaagaaggtgggcgtgattccccccaaaaagttcatatctagactgagaaaggaaaatgacctgtttgataactatatgcaacaagacgctcacgaattcctaaattacctgctgaacactatcgccgatattctccaggaagagaagaagcaggaaaaacagaacggaaaactgaagaacggaaatatgaatgagcccgctgaaaacaataagcctgagctgacgtgggtccatgaaatttttcagggaacactaaccaacgagaccaggtgcctcaactgcgagaccgtttcctcaaaggacgaagatttcttagacctatccgtcgatgtggaacagaatacatcaatcacccattgtctgcgtgacttctctaacactgaaaccctgtgcagtgagcagaagtactactgcgagacatgctgctcaaagcaagaggcccagaaaaggatgcgggtgaaaaagctgccaatgatactagccctgcatctgaagcgattcaagtatatggagcagctccaccgatataccaagctgagttatcgagtggtatttcccctggaattaagactttttaacacttcttcagatgcagttaacctcgaccggatgtatgatttggtggcagtcgtcgtccactgcggatcaggaccaaaccgcggacactacatcacaatcgtgaagtcacacggattttggctcctgttcgacgacgacattgtcgaaaagatcgacgcccaggccatagaggaattttacgggcttacaagtgatatctccaaaaattcagagtctggttatatccttttttatcaatccagagagtag

SEQ ID NO: 49236 - DNA, 1080 bp, Artificial Sequence
  derived and/or modified sequence
atgaattgtttccagggcaccaacgcgagcgcattggagaaagatataggtcccgagcagttcccaatcaatgagcactactttggattggtgaattttgggaatacttgctactgtaactctgtgctgcaggctctatacttttgccgaccctttcgggaaaacgtgcttgcatataaggcacaacaaaagaaaaaggagaacctattaacctgcttggctgacctgtttcattctattgcaacccaaaagaaaaaagtcggggtgattccacccaagaagttcatttcaagactcagaaaagagaacgacctgtttgataactatatgcaacaggacgctcatgagttcctcaattacttgctgaacaccatcgcagatattctgcaggaagagaaaaagcaggagaagcagaacggaaagctgaagaatggcaatatgaacgaaccagccgaaaacaacaagcctgagctcacctgggtgcacgaaatttttcagggcacgttgaccaacgaaaccagatgcctcaattgtgaaacggtctcttctaaggacgaggactttctcgacctcagcgttgacgttgaacagaacaccagcataactcattgcctgcgcgatttcagtaacacagaaacactatgttctgagcagaaatactactgcgagacctgctgctcaaagcaggaggctcaaaaacgaatgagggttaaaaaactgcccatgattttggcacttcacctgaaacggttcaagtacatggagcagcttcatcgctataccaaactctcctatcgtgtcgtcttcccgctggagctgagactttttaatactagttctgacgccgtcaacctggacagaatgtacgatttagtggccgtggttgtgcactgtggatctgggccaaatcggggacattacataacaatcgtgaaatctcatggcttttggctcctgttcgatgacgacattgtcgaaaaaatcgatgctcaggctatcgaggagttttatggtctcacctcagacatctcgaagaatagcgaatcaggttatatccttttttaccagtcacgcgaatag

SEQ ID NO: 49237 - DNA, 1419 bp, Artificial Sequence
  derived and/or modified sequence
tgttatgtcatctaccaggtgtttaagggacagtggagatcatgccatttcagacctggtggaagcaaccactaatataaacacctcccatgtataggaaggctggagtgggaatccttaaccccgccccctgctcaggtcaatcccccacccaccgcccccactgtccctcccagtcttccttcccagaggagaaggctgggtatgaggaaactgctgtcttttcactggatcagacgtaaatattaactggacctctctttagattctttgctcaataatgaattgttttcagggcaccaatgcctctgctctggaaaaagacattggtccagagcagtttccaatcaatgaacactatttcggattggtcaattttggaaacacatgctactgtaactccgtgcttcaggcattgtacttctgccgtccattccgggagaatgtgttggcatacaaggcccagcaaaagaagaaggaaaacttgctgacgtgcctggcggaccttttccacagcattgccacacagaagaagaaggttggcgtcatcccaccaaagaagttcatttcaaggctgagaaaagagaatgatctctttgataactacatgcagcaggatgctcatgaatttttaaattatttgctaaacactattgcggacatccttcaggaggagaagaaacaggaaaaacaaaatggaaaattaaaaaatggcaacatgaacgaacctgcggaaaataataaaccagaactcacctgggtccatgagatttttcagggaacgcttaccaatgaaactcgatgcttgaactgtgaaactgttagtagcaaagatgaagattttcttgacctttctgttgatgtggagcagaatacatccattacccactgtctaagagacttcagcaacacagaaacactgtgtagtgaacaaaaatattattgtgaaacatgctgcagcaaacaagaagcccagaaaaggatgagggtaaaaaagctgcccatgatcttggccctgcacctaaagcggttcaagtacatggagcagctgcacagatacaccaagctgtcttaccgtgtggtcttccctctggaactccggctcttcaacacctccagtgatgcagtgaacctggaccgcatgtatgacttggttgcggtggtcgttcactgtggcagtggtcctaatcgtgggcattatatcactattgtgaaaagtcacggcttctggcttttgtttgatgatgacattgtagagaaaatagatgctcaagctattgaagaattctatggcctgacgtcagatatatcaaaaaattcagaatctggatatattttattctatcagtcaagagagtaactgaaagacctgcgggactgattcacgtggggagaatgttcacagcactgtcacccggc

SEQ ID NO: 49238 - protein, 977 aa, Artificial Sequence
  derived and/or modified sequence
MTAREHSPRHGARARAMQRASTIDVAADMLGLSLAGNIQDPDEPILEFSLACSELHTPSLDRKPNSFVAVSVTTPPQAFWTKHAQTEIIEGTNNPIFLSSIAFFQDSLINQMTQVKLSVYDVKDRSQGTMYLLGSGTFIVKDLLQDRHHRLHLTLRSAESDRVGNITVIGWQMEEKSDQRPPVTRSVDTVNGRMVLPVDESLTEALGIRSKYASLRKDTLLKSVFGGAICRMYRFPTTDGNHLRILEQMAESVLSLHVPRQFVKLLLEEDAARVCELEELGELSPCWESLRRQIVTQYQTIILTYQENLTDLHQYRGPSFKASSLKADKKLEFVPTNLHIQRMRVQDDGGSDQNYDIVTIGAPAAHCQGFKSGGLRKKLHKFEETKKHFEECCTSSGCQSIIYIPQDVVRAKEIIAQINTLKTQVSYYAERLSRAAKDRSATGLERTLAILADKTRQLVTVCDCKLLANSIHGLNAARPDYIASKASPTSTEEEQVMLRNDQDTLMARWTGRNSRSSLQVDWHEEEWEKVWLNVDKSLECIIQRVDKLLQKERLHGEGCEDVFPCAGSCTSKKGNPDSHAYWIRPEDPFCDVPSSPCPSTMPSTACHPHLTTHCSPPPEESSPGEWSEALYPLLTTLTDCVAMMSDKAKKAMVFLLMQDSAPTIATYLSLQYRRDVVFCQTLTALICGFIIKLRNCLHDDGFLRQLYTIGLLAQFESLLSTYGEELAMLEDMSLGIMDLRNVTFKVTQATSSASADMLPVITGNRDGFNVRVPLPGPLFDALPREIQSGMLLRVQPVLFNVGINEQQTLAERFGDTSLQEVINVESLVRLNSYFEQFKEVLPEDCLPRSRSQTCLPELLRFLGQNVHARKNKNVDILWQAAEICRRLNGVRFTSCKSAKDRTAMSVTLEQCLILQHEHGMAPQVFTQALECMRSEGCRRENTMKNVGSRKYAFNSLQLKAFPKHYRPPEGTYGKVET

SEQ ID NO: 49239 - DNA, 2934 bp, Artificial Sequence
  derived and/or modified sequence
atgaccgcccgagaacacagcccgaggcatggagccagagcccgcgcgatgcagcgcgcctctactatcgacgtcgctgccgatatgcttgggctctctctggcagggaatatccaggaccctgatgagcccatcttggagttttcgctggcctgctcagaattacacaccccctctctggacagaaaaccaaactcattcgtcgccgtcagcgttaccacaccaccacaagctttctggaccaaacacgctcaaactgagattatcgaggggacaaacaaccccattttcttgtctagcatcgcattcttccaggacagcctgatcaaccagatgacacaggtgaagttatcagtctacgacgtgaaagatcgcagccaagggaccatgtacttgttgggttcgggtacattcatcgtcaaagatctgctgcaggaccgacaccatcgcctgcacttgacactcagaagcgccgagtccgatagagtgggcaacattactgtcattggctggcagatggaggaaaagagtgaccaacggccacccgtgacccggtcagtggacacagtgaacggccgcatggtactgcccgtagatgaaagcctcactgaggcactaggcatccgctcaaaatatgcatcccttcgaaaagatacactgttgaaatcagtgtttggaggcgcgatctgcaggatgtatcgatttccgacaacagacggaaaccatttgcggattcttgagcagatggcagaatctgtcctgagcttacatgtccctagacagttcgttaaattgctgctggaggaagatgctgcgcgagtgtgtgagttagaggaactgggcgagttgagcccatgctgggagagcctacgccggcagatagtgacgcaatatcagaccatcatactgacctaccaagaaaatctgaccgatttgcaccagtaccgcggtcctagttttaaggctagctctcttaaggcggacaagaagctggaatttgtgcccacaaacctccatatacagcgaatgagagtccaggatgatggaggatccgatcaaaactatgatattgtcaccattggagcaccagccgcccactgtcaagggttcaagtctggtgggcttaggaaaaagctacataaattcgaggagaccaagaaacatttcgaggaatgttgtaccagttcaggctgtcaaagcatcatatacatcccccaagatgtcgtccgggccaaggagattatcgctcagataaacacgctgaaaactcaagtgtcctactatgccgaaaggctgagcagagctgcgaaagatcggtccgcgacaggtttggaaaggactctggcaatcctggccgataagactaggcagttggtcaccgtatgcgactgcaaattattggcaaacagtatccacgggctgaacgccgcccgccccgactatatcgctagcaaggcctcgcctacgtcgaccgaagaagaacaggttatgttaagaaacgaccaagatacactgatggctagatggacagggagaaattcccggtcctccctgcaggtggattggcacgaggaagaatgggagaaagtatggttgaacgtagataagagcttggaatgtatcatacaaagggtggataaactgttacaaaaagagcggctgcatggggaaggatgtgaggacgtttttccttgcgctggatcctgtacatctaagaaggggaatccggatagccacgcttactggatccgacccgaggaccccttttgcgatgtgccctcttccccatgtccgtccaccatgccctccaccgcatgtcacccccacttaacaactcattgcagtcctcctccagaggaaagttccccgggcgagtggtcagaggccctgtacccactcctcaccaccctaaccgattgtgttgccatgatgtccgataaggccaagaaggctatggtttttctgttgatgcaggactccgcgccgaccatcgccacctatttgagtctgcagtacaggcgtgacgttgtgttctgccaaacgttaaccgctcttatctgcggcttcattattaagcttcggaactgtctccatgatgatggatttcttcggcagttatataccattggtttgctagcccagttcgaatctctgctgtccacatatggagaggagctagccatgcttgaagacatgtctctgggtatcatggacctgaggaatgtgacgttcaaagtgacccaggctacctctagcgcatctgctgacatgctgcctgtgatcactggcaatcgggatggatttaatgtgagagtgcccctcccaggcccgctgtttgacgctctgccaagggagattcaaagtgggatgctcctccgtgtacagcccgtcctgttcaacgtgggtatcaacgagcagcagacattggctgagcggttcggcgacacctctctgcaggaagttataaacgtggaatcccttgttcggttgaattcctacttcgaacagtttaaagaggtcttacctgaggactgcctaccaagatctcgttcacagacctgccttccggagttattacggttcttaggtcagaacgtccatgcgcggaaaaacaagaacgtggatattctttggcaggctgcggagatctgtcgccgcctcaatggagtgcgcttcactagttgtaagagtgctaaggatcgcacagccatgagtgtcacgctcgaacagtgtctgatcctgcaacatgagcatggcatggccccccaggtgtttacgcaggctctggaatgcatgcggtctgagggatgccgacgtgagaacaccatgaagaatgtaggctcacggaagtacgccttcaatagcttacagctgaaagcattccccaagcattaccgaccaccagagggtacatatgggaaagtggagacatag

SEQ ID NO: 49240 - DNA, 2934 bp, Artificial Sequence
  derived and/or modified sequence
atgacagcaagagaacactcccctcgacatggggcccgggcacgggctatgcaaagagcgtctactatcgatgttgccgccgacatgctgggcctgagccttgccggtaacattcaggatcccgatgaacccattctcgagttctcactggcttgttccgagctacatacccccagtctggataggaagcccaactcttttgtggccgtcagcgtcacaaccccaccccaagccttttggactaagcatgcacagacggagattatcgagggtacaaacaatcccatttttctgtccagtatagctttttttcaagacagtttaattaaccaaatgacacaggtaaagctgagtgtttacgacgttaaagaccgctcacaaggtacaatgtacctgctaggaagcggcacattcatagtgaaagacctgcttcaggataggcaccataggcttcacctgaccctgagaagtgccgagagcgacagagtcggaaacatcacagtgatcggctggcaaatggaagagaagagcgaccaaaggccgcccgtaacacgcagcgtggatacggtgaacggaagaatggtactccccgtggacgaatccctgaccgaggctttaggcattcgaagtaagtatgcgagcctaagaaaagacaccctgctgaaaagtgtgtttggcggcgctatctgccgtatgtataggttccctaccactgatggaaaccatctgcgtatcttggagcaaatggcagagtcggtgcttagtttacacgtccccaggcagtttgtaaaactactgctggaagaagatgctgcccgtgtttgtgagcttgaggagctcggggaactaagcccctgttgggagtcactgaggagacagattgttacacaatatcagacaatcatcctgacataccaggaaaatctgaccgacctgcaccagtacaggggtccctctttcaaagcaagcagtcttaaagctgataaaaaactggaattcgttccgaccaacctacacatccagaggatgagggtgcaggacgacggcggtagcgatcagaactacgacattgtcactattggcgcccccgccgcccattgtcagggcttcaagagtggggggttgcgaaagaaactgcacaagtttgaagaaacaaagaagcacttcgaagaatgctgtacgtcctccggctgccagagcattatatacatcccccaggacgtggtgagagccaaagagatcatagcacaaatcaatactttaaaaacacaggtaagctactacgccgaacgactgtcgcgggccgcaaaagacagaagcgcaaccggcctggagcgtacactggcaatcctggccgacaagacacgtcagctggtcactgtgtgcgattgcaagctcctggccaacagtatccatggtttgaacgccgccaggcctgattacatagctagtaaagctagtcctaccagcaccgaagaagagcaggttatgctccgcaacgatcaagatactctgatggctcgctggactgggaggaactcccgatcctcactgcaggtggattggcacgaagaggaatgggagaaggtgtggttgaacgtggataaatccttagaatgcatcatccaaagagtggacaaacttttacagaaggagagactgcatggcgagggatgcgaggacgtctttccatgtgccgggtcttgcaccagtaaaaagggtaaccccgattcacatgcttactggatcagaccagaggaccccttttgcgacgttcccagttctccctgcccgagcacgatgccttccactgcatgccatccacacctcaccactcattgtagtcctccgcccgaagagtcatcccctggcgagtggtccgaagcgctgtacccactactcacaacactgacagactgcgtagccatgatgagcgacaaagccaagaaggccatggtgttcctgctgatgcaagattcagccccgaccatcgctacttatctcagtctgcagtacaggagggacgtggtgttctgccagaccctgacggctctgatctgtggatttattataaaactgcgaaattgtttgcacgatgatgggttcttgcggcagttgtatacgatcggcctgcttgcccaatttgagtccctgctgtcaacgtatggagaagagcttgccatgcttgaggacatgagccttggcataatggacctgaggaatgttacttttaaagtcactcaagccacatcctccgctagcgccgacatgttaccagtgatcaccggtaatcgcgacggattcaacgtgagggtgccgctgccaggccctctattcgatgcattaccccgcgaaatacagagtggaatgctgctaagagtccaacctgtcctgttcaatgtgggtatcaatgaacagcagaccctggcagaacgttttggcgacacgtcactacaggaggtgattaatgttgaaagtctggtgcgccttaattcctattttgagcagtttaaggaggtcctgcctgaagattgcctgccaaggagccgcagccaaacctgcctgcccgaactgctgaggttcttaggacagaatgtacacgcgcgaaagaacaaaaacgtggatattctctggcaagctgccgaaatttgtaggaggctgaatggggtgcgattcacaagctgtaagtccgctaaggatcggaccgctatgtcagtcaccctggaacaatgcctgatcctgcaacacgaacacgggatggccccccaggtgttcacacaagctcttgagtgcatgcgatctgaaggctgtcgtagggagaacacgatgaagaatgtgggctcccggaagtacgcattcaactctctccagctgaaagcatttccgaagcactatcggccaccggaaggtacctacggaaaggtggagacttag

SEQ ID NO: 49241 - DNA, 6752 bp, Artificial Sequence
  derived and/or modified sequence
gtctagagcggcggcggctggctagggctgcggcgcgcgtggagggttcgctgctggtttgccgccgggtcgggctccgtgggccggggcaggaggaccagcacctgaggccgggcccgcagcccgcgacttcacagccaggcggcggcgctgctgctgctgcggggctctggcgcgcagcccggcgggacagcggggcggctggcgccgggggccggggagcgccagatgatggatttggacatgcttctatgaagaaatgccacatggtccgagagcaaacatgtccaggctactgccactttagtggactagggctcggtgccagcacttcccgggtaatcaggcgtggtctgaccgaggatcaagaagcacatcatcaccaatgacatcatgacagcaagagagcacagccctcgccatggtgccagggcccgtgcaatgcagcgggcttccaccatcgacgtggcggccgacatgctgggcctctctctggcaggaaatatacaagacccagatgagcccattttagaatttagcttagcttgcagtgagctgcatactccatcgctagatcgaaagccaaatagttttgttgcggtgagtgtcaccacccctcctcaggcattctggacgaagcatgcacagacggagatcattgagggaaccaacaatcctatatttctaagcagtattgccttctttcaagactctcttatcaatcagatgacacaagtcaaactctccgtgtatgatgtcaaagatagatctcagggaacaatgtatttactgggctctggaacgttcattgtcaaagatctgctccaggacaggcatcataggttgcatttaacactaaggtctgcagagagtgaccgtgtaggtaacatcaccgtgattggctggcagatggaggagaagtcagaccaacggccccctgtgacccggtctgtggacactgtcaatgggaggatggttcttcctgtcgatgagagcttgacggaggcgttaggaatccgatccaaatacgcttcattgcgaaaggacactttgctgaaatcggtgttcggtggtgccatctgccgcatgtaccggtttccaaccactgatggtaaccatttgcggatcctggagcagatggcagagagcgtgctctccctgcacgtgccccggcagttcgtgaagctcctactagaggaagatgcagccagagtgtgtgagctggaggagctgggagagctgtccccttgctgggagagcctccggcgccaaattgtcacccagtaccagaccatcatcctcacataccaggagaacctgaccgacctccatcagtacagagggccctcgtttaaagcaagcagtttgaaagcagataaaaagttagaatttgttcccacaaacttgcacatacaaaggatgagagttcaagacgatggaggatcagatcagaactacgacatcgtcaccattggggcgccagcagcacactgccaaggttttaagtcaggaggtctccgcaaaaagctgcacaaatttgaagagaccaagaaacattttgaggagtgttgtacatcatctggctgccagtccataatctacataccccaggatgttgtcagagccaaggagatcatcgcccagatcaacaccctgaaaacccaagtgagttactacgcagagcggctgtcaagggcagccaaggacaggtctgccactggccttgagaggacactcgccatcttggcagacaagacacggcagctggtcacggtctgcgactgcaagctcctggccaactccatccatgggctgaacgctgcacggcctgactacattgcctccaaggcctctcccacttcgactgaggaggagcaggtgatgcttagaaatgaccaggacaccctcatggcccggtggacagggagaaacagccgatcttccctgcaggtggactggcacgaggaggagtgggagaaagtgtggctgaacgtggacaagagcctagagtgcatcattcagcgtgtggacaagctgctgcagaaggagcggctgcatggcgagggctgtgaggatgtcttcccctgtgcaggcagctgcaccagcaagaaaggtaacccggacagccacgcctactggatcagaccagaagaccccttctgtgatgtcccctcctcaccatgcccctccaccatgccctccactgcatgccatcctcatctgaccacacattgcagtccccctcctgaagagtccagcccaggtgaatggagtgaggccctttacccgctgctgaccactctcaccgactgcgtggccatgatgagtgacaaggccaagaaggccatggtattcctgctcatgcaggacagcgcgcccaccatagccacctacctgagcctgcagtaccgccgtgacgtggtcttctgccagacgctgaccgccctcatctgcggcttcatcattaagctgaggaactgcctgcatgacgacggcttcctgcgccagctctacaccatcgggctgctggcccagttcgagagcctgctgagcacctacggggaggagctggcaatgctggaggacatgagccttgggatcatggacttgaggaacgtgaccttcaaagtcactcaggccacttccagcgcctccgcagacatgctgcccgtcatcacaggaaatcgcgacgggtttaacgtgcgggtccctctgccgggcccgctgtttgacgccttgccccgggagatccagagtggcatgctgctgcgagtgcagcccgtcctcttcaacgtgggcatcaatgagcagcagacactggccgagaggtttggcgatacgtctttacaagaagtcatcaacgtggagagtttggtgcggttaaattcctactttgagcagtttaaggaagttttgcctgaggattgcctgcctcggtctcgcagtcagacgtgcctgccagagctgctgcggtttctgggtcagaacgtgcatgcccggaagaataagaacgtcgacattctctggcaagctgctgagatctgccgccgccttaatggggtccggttcaccagctgcaagagcgctaaggaccgtacagccatgtcggtgacactggagcagtgcctgatcctgcaacacgagcatggcatggccccgcaggtcttcacccaggccctggagtgcatgcgcagtgagggttgtcgaagagaaaatacaatgaagaatgttggaagtcgcaaatatgcatttaattccctgcagctgaaggctttccccaagcattacaggcctcccgaagggacttacggaaaagttgaaacgtgaacacacggtttcctctaattagctgttacataataaatgtgggtaccctctagtgtcatatatgaattcttcaagaagacctgaaggattggtttttattttttgtggtttttttaaaaaaaacatttcactaaagagtctctggagcatgttttttgttttttgggtttttttccccattggaatcaataggaggtaatgtttggctcaatagtgtggatagtaacaactgcctatttaaattaaatagcctttggctgtaactacacagatctcatcaatagttacctacatgaatcaagctaggtttgtctgaaatgctagaagactttttcaaatgcctgcttgctcacttacttttctacagagtaactcaaaagtaaccattgaattacaatccactttgtaaaaatctgaatgtaaaacagtaaataataaattaaataattggatcctaggcataccaataaatgttatttggggaaagaagctagcactatctcatgcagtgagaataacgggttctagtgaattatcctatctacactaccacctgaagaagttgaaagaaagattgataaatcaacgggagataagactttattagaaggtaacacctgcaaggtaccccacatagttggggccactcttttttctgtcccttatgagttacagaacagggagtctgctggagacacaaagccagcagtaaggtccctttagcctgtctcctgttctctgaagctccctgccgaggctccctcacgcccagaggacacatctccccttcttctctagatgttaatgtagggcctcagatgtggcatgtcaacactcccatggggaatttatgaccatagagatagtagaaacctaaatattttcagaaaaaaaattttttttgcaggatttccaatttatctttgaaaagacagtacaatcatgtttgaatgtctgatgaaagtgtcttatttttaggtttgcaataattgttactttcttattctcattcttatgtaagatgactattgagaaacagttgaaatttattctcctcaaatgagattttgaaagggatttatgggccataaaacttaggaatttcatagaaaattttgtctggtcatcttttataagatgatgatgagtcttatctgcacatagcagagtttgtttcttaggagtttatatgttttattgattctgtttacgatgtttacatgttcttgaaaaggttgtaaaagaaatacatatggcacatattaatgatgctgatcctaatgatttgtgaacctcttagaaattcttttgtctaaaagcctagagattcttctggttcctttagaaacatgtaacaaacttgggccaggggtgctgaggcatggggaggactgcttattggcaggaacacagagggggtgggcatcaggtagggtggaactggatgaccttccagaccccctcctactcagaagtcagcatgcaagcagcgcctgctgtctcccgatgcctgcagggaggaaaatgtctgtgaaggacactttaatgaaggacgaagctctctgctgctccctcaaagctgagttcactgtggcaggcaggaagcagagaagctcctgcccgccaaacccactgcacaggtggctgctgctggtatcagattctcctttttaagtgtcaatttctgttcacagacagtttgttttcaatatggctgatttaccctttcacctctccaccatctcatttaatttgtaaatttttagttctgtcttttctcattttaacttttaaaaaatctccttgctttttaaaaataaatattacccacatagttttcagatcttttttgtctggagagcattaaatatctgcactcatcaaagggaatatagcaaatgttgatcatctgtcagcagttttgcatgtgacacctttatatgaattattttcccaatttttgctctatgtaatgggtcaccataaaactgtaagacttggcaaatgctatagaaaaggttcaggtttcagtattctctctgaaggcatcattcctgggcttccggcagcatcacacgcttccagtgcctgcagggtgagggtgtgtggcacagaggcaagcagctcctctcttctgtaggagctttgggttttcagaggtgcagggaaggcagttttacaggttaccgtaaaacagaggttccgtccagtgttccttatgatgcctccccatttaaaaagaaaagagatctatggaaaactgggaatgtaatgtggattctgtcagagctcctacagagcacagttgcctttagtttcctttaaagatgtaaaaatattgtataatacagttttgtccctacacaattgtatttgccaagcttagtgcattatgatacctttatttatttgttttgggcagtattactatatatatataaacatacagttactgttttatatattcttaggtcattcaaagccatgtatgctgtaaatgtgctagtctttagaatgacacataataaataactgacaagatattaaatgtggtcttgcctgattcatcctattaggaggactagttctatgtgaccagcctgtgactggaccattgttcttgggcattgcattgagtgctcgggtgctgaatacatgtttgtaaacatgggaccatgggagacttccattttataagcttgtttctgcctaatttgaagcagaggggcaacagcgttgaggttaagagcacggactttgggagcacacagaccaggtcccaatcctggttctgcccctgactggctggtgactctgagcaagttgcttgacctctccaagcctccgtttcctcatgtgcaaagtgtggacaacaacagtaccttcctcataaggaacgtgcgacgcgcctcagaagtacgtgttcataaatggtagccattgttgttaccttcccgtctgtgaacatggatcacatcatctctgtgggtaacccagtcctcgttgtatgacttgtcaaaatgcagttccacttgtattaatattgaccctgttcatcgtcaccaggactgcatcttgcaccactgtgccgtcttctaggcacacacgacccgttatctcccttggaaaaattcctctcactggaaatgtacaattaaaggatgattgaaatgtttaactcttggagtttttagtattaccaaactcctagaaatttaagctaccaccaaaaataacatgtgccttttccctttattctcattgatggtagcagtgcacctcgtttcagtgtcctgattccttgattactgtgaacactgaacatcttttatacctttatgatatttctatgtttgtgacttcattggaatgttgatctatttcatatagattgtttttaatatacaatgtattagcccctgtca

SEQ ID NO: 49242 - DNA, 2934 bp, Artificial Sequence
  derived and/or modified sequence
atgacagcaagagagcacagccctcgccatggtgccagggcccgtgcaatgcagcgggcttccaccatcgacgtggcggccgacatgctgggcctctctctggcaggaaatatacaagacccagatgagcccattttagaatttagcttagcttgcagtgagctgcatactccatcgctagatcgaaagccaaatagttttgttgcggtgagtgtcaccacccctcctcaggcattctggacgaagcatgcacagacggagatcattgagggaaccaacaatcctatatttctaagcagtattgccttctttcaagactctcttatcaatcagatgacacaagtcaaactctccgtgtatgatgtcaaagatagatctcagggaacaatgtatttactgggctctggaacgttcattgtcaaagatctgctccaggacaggcatcataggttgcatttaacactaaggtctgcagagagtgaccgtgtaggtaacatcaccgtgattggctggcagatggaggagaagtcagaccaacggccccctgtgacccggtctgtggacactgtcaatgggaggatggttcttcctgtcgatgagagcttgacggaggcgttaggaatccgatccaaatacgcttcattgcgaaaggacactttgctgaaatcggtgttcggtggtgccatctgccgcatgtaccggtttccaaccactgatggtaaccatttgcggatcctggagcagatggcagagagcgtgctctccctgcacgtgccccggcagttcgtgaagctcctactagaggaagatgcagccagagtgtgtgagctggaggagctgggagagctgtccccttgctgggagagcctccggcgccaaattgtcacccagtaccagaccatcatcctcacataccaggagaacctgaccgacctccatcagtacagagggccctcgtttaaagcaagcagtttgaaagcagataaaaagttagaatttgttcccacaaacttgcacatacaaaggatgagagttcaagacgatggaggatcagatcagaactacgacatcgtcaccattggggcgccagcagcacactgccaaggttttaagtcaggaggtctccgcaaaaagctgcacaaatttgaagagaccaagaaacattttgaggagtgttgtacatcatctggctgccagtccataatctacataccccaggatgttgtcagagccaaggagatcatcgcccagatcaacaccctgaaaacccaagtgagttactacgcagagcggctgtcaagggcagccaaggacaggtctgccactggccttgagaggacactcgccatcttggcagacaagacacggcagctggtcacggtctgcgactgcaagctcctggccaactccatccatgggctgaacgctgcacggcctgactacattgcctccaaggcctctcccacttcgactgaggaggagcaggtgatgcttagaaatgaccaggacaccctcatggcccggtggacagggagaaacagccgatcttccctgcaggtggactggcacgaggaggagtgggagaaagtgtggctgaacgtggacaagagcctagagtgcatcattcagcgtgtggacaagctgctgcagaaggagcggctgcatggcgagggctgtgaggatgtcttcccctgtgcaggcagctgcaccagcaagaaaggtaacccggacagccacgcctactggatcagaccagaagaccccttctgtgatgtcccctcctcaccatgcccctccaccatgccctccactgcatgccatcctcatctgaccacacattgcagtccccctcctgaagagtccagcccaggtgaatggagtgaggccctttacccgctgctgaccactctcaccgactgcgtggccatgatgagtgacaaggccaagaaggccatggtattcctgctcatgcaggacagcgcgcccaccatagccacctacctgagcctgcagtaccgccgtgacgtggtcttctgccagacgctgaccgccctcatctgcggcttcatcattaagctgaggaactgcctgcatgacgacggcttcctgcgccagctctacaccatcgggctgctggcccagttcgagagcctgctgagcacctacggggaggagctggcaatgctggaggacatgagccttgggatcatggacttgaggaacgtgaccttcaaagtcactcaggccacttccagcgcctccgcagacatgctgcccgtcatcacaggaaatcgcgacgggtttaacgtgcgggtccctctgccgggcccgctgtttgacgccttgccccgggagatccagagtggcatgctgctgcgagtgcagcccgtcctcttcaacgtgggcatcaatgagcagcagacactggccgagaggtttggcgatacgtctttacaagaagtcatcaacgtggagagtttggtgcggttaaattcctactttgagcagtttaaggaagttttgcctgaggattgcctgcctcggtctcgcagtcagacgtgcctgccagagctgctgcggtttctgggtcagaacgtgcatgcccggaagaataagaacgtcgacattctctggcaagctgctgagatctgccgccgccttaatggggtccggttcaccagctgcaagagcgctaaggaccgtacagccatgtcggtgacactggagcagtgcctgatcctgcaacacgagcatggcatggccccgcaggtcttcacccaggccctggagtgcatgcgcagtgagggttgtcgaagagaaaatacaatgaagaatgttggaagtcgcaaatatgcatttaattccctgcagctgaaggctttccccaagcattacaggcctcccgaagggacttacggaaaagttgaaacgtga

SEQ ID NO: 49243 - DNA, 2934 bp, Artificial Sequence
  derived and/or modified sequence
atgacagcccgggagcacagccccaggcatggagcccgggcccgggccatgcagagggccagcaccattgatgtggccgctgacatgctgggcctgagcctggccggcaacatccaggaccctgatgagcccatcctggagttcagcctggcctgcagcgagctgcacacccccagcctggacaggaagcccaacagctttgtggccgtgtctgtgaccaccccaccccaggccttctggaccaagcacgcccagacagagatcatcgagggcaccaacaaccccatcttcctgagcagcatcgccttcttccaggacagcctcatcaaccagatgacccaggtgaagctgtctgtgtatgatgtgaaggacaggagccagggcaccatgtacctgctgggcagcggcaccttcatcgtgaaggacctgctgcaggacagacaccaccggctgcacctgaccctgcggtctgctgagagtgacagagtgggcaacatcaccgtgattggctggcagatggaggagaagagtgaccagaggcctcctgtgaccaggtctgtggacacagtgaatggaaggatggtgctgcctgtggatgagagcctgacagaggccctgggcatccgcagcaaatatgccagcctgaggaaggacaccctgctgaagtctgtgtttggaggagccatctgcaggatgtaccgcttccccaccacagatggcaaccacctgcgcatcctggagcagatggccgagagcgtgctgagcctgcacgtgccccggcagtttgtgaagctgctgctggaggaggatgctgcccgggtgtgtgagctggaggagctgggggagctgagcccctgctgggagagcctgcggcggcagatcgtgacccagtaccagaccatcatcctgacctaccaggagaacctgacagacctgcaccagtaccggggccccagcttcaaggccagcagcctgaaggctgacaagaagctggagtttgtgcccaccaacctgcacatccagaggatgagggtgcaggatgatggcggcagtgaccagaactatgacatcgtgaccatcggggccccagctgcccactgccagggcttcaagagcggcggcctgaggaagaagctgcacaagtttgaggagaccaagaagcactttgaggagtgctgcaccagcagcggctgccagagcatcatctacatcccccaggatgtggtgcgggccaaggagatcatcgcccagatcaacaccctgaagacccaggtgtcctactatgcagagcggctgagcagagctgccaaggacagaagtgccaccggcctggagaggaccctggccatcctggccgacaagacccggcagctggtgacagtgtgtgactgcaagctgctggccaacagcatccacggcctgaatgctgcccggccagactacatcgccagcaaggccagccccaccagcacagaggaggagcaggtgatgctgagaaatgaccaggacaccctgatggcccgctggacaggcaggaacagccgcagcagcctgcaggtggactggcatgaggaggagtgggagaaggtgtggctgaatgtggacaagagcctggagtgcatcatccagagggtggacaagctgctgcagaaggagcggctgcatggagagggctgtgaagatgtgttcccctgtgccggcagctgcaccagcaagaagggcaacccagacagccacgcctactggatccggcctgaggaccccttctgtgatgtgcccagcagcccctgccccagcaccatgcccagcacagcctgccacccccacctgaccacccactgcagccccccacctgaggagagcagccctggagagtggagcgaggccctgtaccccctgctgaccaccctgacagactgtgtggccatgatgtctgacaaggccaagaaggccatggtgttcctgctgatgcaggacagcgcccccaccatcgccacctacctgagcctgcagtacagaagagatgtggtgttctgccagaccctgacagccctgatctgtggcttcatcatcaagctgaggaactgcctgcatgatgatggcttcctgcggcagctgtacaccatcggcctgctggcccagtttgagagcctgctgagcacctacggggaggagctggccatgctggaggacatgagcctgggcatcatggacctgagaaatgtgaccttcaaggtgacccaggccaccagcagcgccagcgctgacatgctgcctgtgatcaccggcaacagagatggcttcaacgtgcgggtgcccctgcccggccccctgtttgatgccctgccccgggagatccagagcggcatgctgctgcgggtgcagcctgtgctcttcaacgtgggcatcaatgagcagcagaccctggccgagagatttggagacaccagcctgcaggaggtgatcaacgtggagagcctggtgcggctgaacagctactttgagcagttcaaggaggtgctgcctgaggactgcctgcccaggagccgcagccagacctgcctgcctgagctgctgcgcttcctgggccagaatgtgcacgccaggaagaacaagaatgtggacatcctgtggcaggccgctgagatctgccggcggctgaatggagtgcgcttcaccagctgcaagagcgccaaggacagaacagccatgtctgtgaccctggagcagtgcctgatcctgcagcacgagcacggcatggccccccaggtgttcacccaggccctggagtgcatgaggtctgagggctgccggcgggagaacaccatgaagaatgtgggcagcaggaaatatgccttcaacagcctgcagctgaaggccttccccaagcactacagacctcctgagggcacctacggcaaggtggagacctag

SEQ ID NO: 49244 - DNA, 2934 bp, Artificial Sequence
  derived and/or modified sequence
atgaccgcccgggagcacagcccccggcacggcgcccgggcccgggccatgcagagggcgtctacaatcgacgttgcagcggacatgctggggctctctcttgcaggcaacattcaggacccagatgagcctattctggagttttcattagcctgctccgagctgcacacaccctctctcgacaggaagcccaactccttcgtcgcagtttccgtgacaacgcctccccaggccttctggactaaacatgcccagacagaaattatcgaaggtactaacaaccccatcttcctgtccagtattgctttttttcaggactcgctaattaatcaaatgactcaggtgaaactctcggtatatgacgtgaaggatagaagccaggggaccatgtacttgctcggcagtgggacatttatcgtcaaggatctcctccaggacagacaccatagacttcatctcacactcaggtccgcagaatccgacagagttggcaacattacagtcatcggatggcaaatggaagaaaaatcagatcagagaccccccgttacaaggtctgtggacaccgttaatggacgcatggtccttccggttgacgagtcgctgactgaggcacttgggattagatccaaatatgccagcctgcggaaggataccctgctgaaaagtgtcttcggaggggccatctgcaggatgtaccgctttcctactacagatggcaaccatctgagaattctggaacagatggccgagtcagtgctaagcttacacgtaccaaggcagtttgttaagctgctgctggaagaggacgctgctcgagtgtgcgagcttgaggagctcggcgagctgtcaccatgttgggagtccttaaggcgccagatcgtcactcagtaccagacaattatcttgacgtatcaggagaacttgactgacctgcatcagtacagaggtccaagctttaaggcttcgtccctgaaggctgataaaaaactcgaattcgttcctactaacctccatatccagcgaatgagagtacaagacgacgggggctcggaccagaactatgatattgtcactatcggagcaccggctgcacactgccaaggatttaaatcaggaggtttgcggaaaaaacttcacaaatttgaggaaacaaagaaacatttcgaagaatgttgcacatcgagtgggtgccaaagtattatttatatcccacaggatgtggtgagggcgaaagagattatagcgcagattaacacactcaaaactcaggtgtcctactatgcggagcgcctgtccagagcggccaaggatcggtctgcaactgggctcgagcggacactggcaattctggccgacaaaactcgacagttggtaaccgtctgtgattgcaagctcctcgccaattcaatccacggactcaacgctgcccgaccagattatatcgcaagcaaagcttcaccaacaagtaccgaagaagagcaggtaatgctgcgcaacgatcaggacaccctcatggctaggtggactggccggaactccagaagcagtctgcaggttgactggcacgaggaggagtgggagaaggtttggctcaacgtcgacaaatccttggaatgcatcatccaaagggtcgataaactactgcagaaggagcgtttacatggagaagggtgcgaggacgtgttcccgtgcgcgggttcctgtacaagcaagaaagggaatcctgattctcacgcatactggatcaggccggaagacccattttgcgacgtgccgtcctccccctgtccttccacgatgccatccacagcgtgtcatccacacctgaccactcattgttcccctccacctgaagagtcaagtcccggcgagtggagcgaagccctctaccccctgttgaccactcttaccgactgcgtcgccatgatgtctgataaggccaagaaggctatggtgtttctgctgatgcaggatagcgctcctaccatcgcaacatacctctcattgcagtaccggcgcgacgtggttttttgtcagacactgacggccctcatttgcgggttcatcattaagctgcgaaactgcctgcatgatgatggattcctgcggcagctctacacaataggcttgctggcgcagttcgaatctttattgtccacctacggagaggagctggccatgcttgaagacatgtccctgggtatcatggatctgcgcaatgtcactttcaaagttacacaggcgaccagttccgcgtccgccgacatgctgcccgtaatcacaggaaatagggacggcttcaatgtaagggtcccgctgccaggaccgttattcgacgcactgccaagggaaatccaaagcgggatgctcttgcgcgtccaacccgtattatttaacgtcggcatcaacgagcaacaaacgctggccgagcgatttggcgacacgtctctgcaggaagtcattaatgtagaatcactggtgcgtctcaattcctacttcgagcagttcaaagaggtgttgcctgaggactgccttcctagatccaggtcacaaacttgtcttcccgagctgctacgttttctgggccagaatgtccatgctaggaagaacaagaacgttgatattctatggcaggcagccgaaatctgccgccggctgaacggcgtgagatttaccagctgcaaatctgcaaaagaccgtaccgcaatgagcgtcactctcgaacaatgtctaatcctccaacacgagcacggaatggctcctcaggtgttcactcaggcactcgagtgcatgcgcagcgaaggttgtcgtcgcgagaatactatgaaaaatgtgggaagcaggaaatacgcctttaattcacttcagcttaaggccttcccgaagcactacaggccacccgagggaacatacggaaaagtggaaacgtag

SEQ ID NO: 49245 - DNA, 2934 bp, Artificial Sequence
  derived and/or modified sequence
atgaccgcccgggagcacagcccccggcacggcgcccgggcccgggcaatgcagagagcctccacgattgacgtcgcagccgatatgctcggtttgtccctcgccggcaatatccaggatcctgacgaacctattcttgagttctcgctcgcctgctcggagcttcatacaccaagcctcgaccgcaagcccaattctttcgtcgctgtgagcgtcacaacaccacctcaggctttctggaccaaacatgcacagaccgagatcattgaggggaccaacaatcctatctttttgtcgtccatagccttctttcaggacagtctgataaatcaaatgacccaggtcaaactcagcgtgtacgacgtgaaagaccgtagccaaggaaccatgtacctcttgggatcaggaacctttatcgtcaaggacctcctccaagacagacaccaccgactgcacctgacactcaggtctgcagaaagtgacagggtcgggaacattacagtgatcggctggcagatggaagaaaaatccgatcagcggcctcccgtcactaggtcagtggataccgtcaatggtcgcatggtgctccccgtcgacgagtcccttacggaggcattaggcataagatccaagtatgcctcactcagaaaggacaccctgctgaagagcgtattcggcggtgcaatctgcagaatgtataggtttcccacgactgatggcaatcacctgcgaatcctggaacagatggctgagtcggttctctctctccatgtgcccaggcagttcgttaagttgcttctggaggaggatgccgctcgtgtgtgtgagctggaggagctgggcgaactgagcccctgttgggagtcacttcgcaggcaaatcgttactcagtatcagacaatcatcctgacttatcaggagaatctaacagaccttcaccagtatcgaggaccatctttcaaggccagttcactcaaagccgacaagaagctcgaatttgtcccaacaaatcttcatatacagcgcatgcgcgtgcaggatgacggggggtccgaccagaactacgacattgtgaccataggcgctcctgctgcccactgtcagggcttcaagagtggagggttgcggaaaaagctgcataagtttgaggaaacaaagaaacactttgaagagtgttgcacctcttccggctgccaaagcatcatttacattccccaggacgtcgtgcgcgcgaaagaaatcatagctcagattaacacactgaaaacccaggtgtcttactatgcagaacggctgtctagagctgcaaaggatagatctgcaactggcttggaaagaacccttgccattttggcagataagactagacagctggtgaccgtgtgcgattgcaaactgctcgccaattccatccacgggctgaatgcagcacgacctgattacatcgctagtaaagcctctccgacatcaacagaggaagagcaagtgatgctccggaatgatcaggacactttgatggctcggtggacaggacgaaattcgagaagcagcctgcaagtggattggcacgaagaagagtgggaaaaggtttggttaaatgtggacaaatcattagaatgcattattcagcgcgtcgataagcttttgcagaaggagagattgcacggggagggatgcgaggacgtgttcccctgtgctgggtcctgtacgagtaagaagggcaaccctgactcccacgcgtactggattagacctgaggatccattctgtgacgtgccttcttccccatgtcccagcactatgccatcaactgcatgccatcctcacctgaccacccattgctccccccccccggaggaatcatcccctggcgaatggtcagaggcgctatatcccttgctgaccactctgacagactgtgtcgccatgatgtcggacaaggcgaaaaaagccatggtttttctgctgatgcaggacagcgctcctaccatcgcaacatatctaagcctccagtatcggcgtgacgttgtgttctgtcagactctaaccgccctcatttgcggttttatcattaagctccggaattgcctgcacgatgacgggttcctgaggcagctctacaccatcggcttgctggcccagttcgaaagcttattgtctacttatggggaggaactggccatgctggaagatatgtctctaggaataatggatctccgtaatgttacattcaaggtcacccaggccactagcagtgcgtctgcagacatgcttcccgtaataacaggtaacagagatgggttcaacgtacgggttccactacctggcccattgtttgacgcgttgcccagggagatccaatctggcatgctgctgcgggtgcaacccgtactgttcaatgtggggattaacgaacaacagacactggctgagagattcggcgatacatctctgcaggaagtcataaacgtcgaatcgctggtgagactcaatagctactttgaacagttcaaggaagtgctccctgaggactgtctgcctcgcagtcggtcgcagacgtgcttaccagagctgctgaggttcttaggccagaatgtgcacgctcggaaaaacaaaaacgtggacatattatggcaggctgccgaaatctgtaggaggctgaatggcgtgcgattcaccagttgtaagtctgcgaaggatcggacagccatgagcgtgaccctcgaacagtgcttaatcttgcaacacgagcacgggatggctcctcaggtgtttactcaggcactcgaatgcatgcggtccgaagggtgccgaagagaaaacactatgaaaaatgttggaagcaggaagtatgcgttcaacagtctccagctgaaagccttccccaaacactacagaccacccgaaggcacatatggtaaggtggagacctag

SEQ ID NO: 49246 - DNA, 2934 bp, Artificial Sequence
  derived and/or modified sequence
atgaccgctcgtgagcatagtcctagacatggcgcacgggctcgcgcaatgcaaagagctagcacgatagacgtcgctgccgatatgctggggctgtcgctcgctggaaacatccaggatcccgacgaacctatcctggaattctctctggcgtgttctgagctgcacacaccaagcctggacagaaagcctaatagcttcgtggctgtgtcagtgacaacaccgcctcaggccttctggaccaaacacgcacagacagaaataattgaagggaccaataaccccatattcctgtcaagcatcgccttctttcaagatagtcttatcaaccagatgacacaggtcaagctgtccgtctatgatgtgaaggataggagccaggggaccatgtacctgctgggcagtggtaccttcattgttaaggatctgctgcaggatcgccaccacaggcttcatctcacactccgtagcgcagagtccgatagggtcggcaatattaccgttatcggctggcagatggaggaaaaatctgaccagcgccctcccgtaactcggagcgtggataccgtcaacggacgtatggtgctgcctgtggacgaatctctgacagaggcactcgggattaggtctaaatacgcgtctctgaggaaggacacacttcttaaaagtgtgttcggcggagcgatatgtcgcatgtaccggttccccaccacagacgggaaccacctgcggatactcgaacagatggcggagagtgtactgagtttacacgttcctcggcaatttgtgaagttgttgttagaggaggacgccgctcgcgtgtgtgagctggaagaattgggggagctttccccctgctgggagagcttgagaaggcagatcgtaacacaataccaaactataatactgacctaccaagagaacctgacagatttgcaccagtacaggggaccctcttttaaagcttcttccctgaaggcagacaagaagttagagttcgtccctactaatttgcatatccagaggatgcgcgtccaggacgatggcggatcagaccagaattatgatatcgtgacaatcggcgcacctgctgctcactgccaaggctttaagagtggcggactccgcaaaaagctgcacaaattcgaagaaactaagaaacatttcgaggaatgctgtacctcttccggatgtcagagtattatttatatcccacaggacgtcgtgagagctaaagagatcatcgcacagatcaatacattaaaaacacaagtgtcttattacgccgagagactgtctagggcagcaaaggaccgaagtgccactggattagagagaacgcttgccatcctggcggacaagacacgtcagttggtgaccgtgtgtgactgtaagctcctcgctaactcaattcacggcctgaatgcagctcgcccagattacatcgcatcaaaagccagccccactagcacggaggaggaacaggtgatgcttagaaacgatcaggatacactcatggcacggtggaccggcaggaatagtagaagctccctgcaggttgattggcatgaggaagagtgggagaaggtctggctcaatgttgacaaatctctggagtgcattatccagagggtggataagcttttgcagaaagaacgccttcacggagaaggctgcgaagacgtcttcccttgcgctggttcttgtacttccaagaagggaaacccagattcgcacgcgtattggataagacccgaggacccattctgcgatgtgcccagcagcccctgtccaagcaccatgccctcaacagcttgtcacccccatctgacaacacactgctccccccctcccgaagagtccagccccggtgagtggtctgaggccctgtacccactcctaacgactctgacagattgcgttgccatgatgtccgacaaggcaaaaaaagcaatggttttcttgctcatgcaagattctgcaccgacgatcgccacttacttatcacttcagtacagacgagacgttgtgttctgtcagacactgactgccctaatctgtgggttcatcatcaaattgcgcaactgtctccacgacgacggcttcctgcgacagctgtatactatcgggctgcttgctcagttcgagtccctgctcagcacctacggggaagagctggccatgcttgaggatatgagtctcggaattatggacctgcggaacgttaccttcaaagttacacaagctactagctcagctagtgccgatatgctcccagttatcacaggaaaccgcgatggttttaacgttcgggtccctctgcctggtccgctctttgatgccctgcccagagagattcagtcaggcatgctgctccgggttcagccagtgttgtttaatgtcgggattaacgagcagcaaacactggccgaacgctttggagatacgtcactccaggaggttattaatgtagagagtctagtccgcttaaactcttactttgagcagtttaaagaagtgcttcccgaggattgtttgcccaggtcacgcagtcaaacatgtctgccagagctcctgcggtttctgggtcagaacgtgcacgcgaggaaaaacaaaaatgtggatatcctgtggcaggcagcagagatctgccggcgactgaatggggtaagatttacatcttgcaagtcagccaaggacaggaccgcaatgagcgtgaccctagagcaatgcctgatactccagcacgagcatggtatggctccccaggtgtttactcaagctctcgaatgcatgagatcagaaggttgtcgaagagaaaatactatgaagaacgtggggagtaggaaatacgcctttaatagtctgcagctcaaagccttcccaaagcattatagaccaccagaaggaacatatggtaaggttgagacttag

SEQ ID NO: 49247 - DNA, 2934 bp, Artificial Sequence
  derived and/or modified sequence
atgactgccagggaacactcaccgaggcacggggcaagagcaagggcgatgcaaagggcgagtaccattgacgtggcagccgatatgttggggctgtcactagccggtaacatacaggatccagatgagcccattctggaattctcactggcatgttccgagctgcatacacccagcctcgatagaaaacccaacagcttcgtggctgtgtccgtcacaactccccctcaggcattttggaccaagcacgctcagacagaaatcatagagggaacaaacaatcctatctttctgtcgtccatcgctttctttcaggattctcttataaaccagatgacccaagtcaaactctccgtctatgacgtgaaagacaggtcccaggggacaatgtacctgctcgggtcaggaacatttattgtgaaggacctgctgcaggaccgccatcacagactccacctgacattgaggtctgcagaatcagacagggtaggcaacataactgtcatcggctggcaaatggaggaaaagtcagaccagaggccccctgtgacacggagcgtggataccgtcaatggaagaatggttctgcctgtcgatgaaagcctgaccgaagccttgggaatccgttctaagtacgcaagtctgaggaaggataccttactaaagagcgtctttggcggtgcgatctgccgaatgtaccggtttccaacaacagacggcaaccatcttcgtatactggagcaaatggcagagtctgtcttgagtttgcacgttccgagacagttcgtcaagctgctcctcgaagaggacgctgccagagtctgtgagctggaggagctgggggaattgagtccgtgttgggaaagcctgcggagacaaatagtgacacagtatcagaccatcattttgacgtaccaggagaatttgacagacttgcatcagtaccgagggccttctttcaaggcttcgtcactcaaagctgacaagaaacttgagtttgttcctaccaatttgcacattcagcgcatgcgggtccaggacgacggagggtccgaccaaaactatgatattgtcaccattggggcacccgctgctcattgccagggcttcaagtcagggggtctccggaaaaagttgcataaattcgaggaaaccaaaaagcatttcgaagaatgttgcacatctagcggctgccagtcaattatttacataccacaggatgtggtgagggccaaagaaattattgctcagatcaataccctgaagacccaggtcagttattatgcagaacgccttagtcgcgctgctaaggatagatcggccaccggcctcgaacggaccttggctatcttagccgacaagacccgccagttggtaaccgtgtgcgactgtaagttgctcgccaattctattcacggtttaaacgcagcacgcccagattacattgcttcaaaggcctcccccacgagcacagaagaagaacaagtgatgttacggaacgaccaggatacacttatggcaagatggaccggaagaaattctcgctctagcctgcaagtagattggcacgaggaagagtgggagaaggtgtggcttaacgtggacaagtctctggagtgtattattcagcgggtcgataaactgctacaaaaagagaggctgcatggagaagggtgtgaggacgtatttccttgtgctggctcctgcactagcaaaaaaggtaatccagatagccatgcctattggatcaggccggaggaccctttctgcgacgtgccctcctctccttgcccatccacaatgccttccaccgcatgtcatcctcatcttaccactcattgcagtcctccaccagaggaaagtagcccaggagagtggagcgaagcgctgtatccactgcttacgacgctgaccgattgcgtggcaatgatgtcagacaaagcaaagaaagccatggtgttcctgctaatgcaggactcagccccaacgatcgcgacctacctttcactgcaatatcggagagacgtggtgttttgtcagactctgaccgccctgatctgcggtttcattatcaagttgcgcaactgtctgcatgacgacgggttcctgcgacaactatacacaatcggtctgctggcacagtttgagtcactgctgtcgacttacggagaggaattagccatgctggaggacatgtccctggggatcatggatcttaggaacgtgacatttaaggtgacacaggccactagcagtgcctcagccgacatgctgccagttataaccggcaacagggacggcttcaatgtgagggtcccactgcccggtccactgtttgacgcgctgcccagagaaattcagtcaggcatgctgttaagagttcagcccgttttatttaacgtcggcattaatgaacagcagactctcgctgagagattcggagacacatctctgcaagaggtgatcaacgttgaatctctggtgcggctaaactcctattttgaacagttcaaagaagtattgcccgaggattgcctaccacgatctcgcagccagacctgcttgcccgagttgttacgtttcctcgggcaaaatgtccatgctcggaagaataaaaacgttgatatcctttggcaagccgctgagatatgccggagactgaatggggtgaggtttacctcctgtaaatccgccaaagacaggaccgccatgtcagtcactctcgagcagtgcttaatccttcaacacgagcatggcatggctccccaagtgttcacccaagccctcgaatgtatgagatcagagggttgcaggagggaaaacacaatgaaaaacgtcggtagcagaaagtacgccttcaactcactgcagctaaaggcctttcccaagcactatcgacctcctgaagggacctacggtaaagtagagacctag

SEQ ID NO: 49248 - DNA, 2934 bp, Artificial Sequence
  derived and/or modified sequence
atgactgcccgcgagcattcaccccggcacggcgctagggctcgggcaatgcagcgcgcgtccacaatcgacgtagctgctgacatgctgggcctcagtctggcggggaatattcaggatcccgatgagcccattcttgaattcagcttggcatgcagcgagcttcacacaccttctttggatcggaaaccaaacagtttcgtggccgtctctgtgacgaccccacctcaagctttttggacaaaacacgcccagactgaaatcatagagggtaccaacaaccccatctttctgagtagcattgcattctttcaggactccctcatcaaccagatgacacaggtcaaactgtcagtgtacgatgtcaaggatcgcagccagggaacaatgtacctgctgggcagtggaacctttatagtgaaggacctcctgcaggatcgacaccaccggctccatctcaccctgcggtctgctgagtctgatcgcgttgggaatattacggtgatcggttggcaaatggaagagaagtcagatcagcgccccccagtcacaaggtcagttgataccgttaacgggcgcatggtccttccagtggacgagtcccttaccgaagcactgggcatcaggtctaagtatgcatcactcaggaaagacaccctgttgaagagcgtgttcggcggcgccatctgtaggatgtatcgtttccctacgacggacggcaaccatctccgcatcctcgagcaaatggcagaatctgtgctttccttgcacgtgcctcgccagtttgtaaaattgttgctggaggaagatgcagccagggtctgtgaactcgaggaactgggcgaactgagtccctgctgggaaagcttgagacggcagatagtgacccagtaccaaactatcattttaacctatcaagaaaacctgacggaccttcatcagtatagggggcccagctttaaggccagtagcttaaaggccgacaaaaaattagagtttgtacctacaaatctccatatccaacgtatgagagtgcaggatgacggcggcagcgatcagaactacgatatcgtgactataggtgcacccgccgctcattgtcaaggcttcaaatcggggggacttaggaaaaaactgcacaagtttgaagaaaccaagaagcatttcgaggaatgctgtactagctccggatgtcagagcatcatttatatacctcaagacgtcgtgagagctaaggagattatcgcacaaatcaacaccctcaaaactcaggtctcttattacgctgaaagactgtctagggcagccaaagatagatcagccaccgggctcgaacgtacccttgccatccttgcagataaaactaggcagttagtgaccgtttgcgattgcaagcttcttgcgaactccattcacgggctcaacgctgctaggcccgactacatcgcatccaaagcttcccctacctccacggaggaggaacaggtgatgcttcgcaacgatcaagacaccctcatggcccgctggacaggccgtaacagtcgcagttctctacaagttgactggcacgaagaggaatgggagaaggtttggttaaacgtggacaaatccttggaatgtatcatccagagagtggacaaattactacaaaaggagagattgcacggggaagggtgcgaggatgtgttcccatgtgccggtagttgtacttctaaaaagggcaatcctgatagccatgcatattggatcagacctgaagacccgttctgcgacgtcccatcatctccctgcccctcaacaatgccatcgactgcgtgtcatccacatctgacaactcattgttcgcccccgcctgaggagtcttctcccggagaatggtccgaagcactgtacccccttttaactacactcaccgattgcgttgcgatgatgagcgataaagctaaaaaagcaatggtattcttactcatgcaggactccgctccaacaatcgctacatacctaagtctccagtataggcgggacgtggtgttttgtcagacactgacagctctcatatgtggttttatcattaaattgagaaattgtcttcacgatgatggcttcttgcgccagttgtacacaatcggattgctggcacagttcgaatcactcctgagtacctatggagaggaactggctatgctggaagacatgtcgctgggcataatggaccttagaaatgtcacctttaaagttacccaagcaacctcatcagcttcagccgacatgctgcccgtcattacaggcaaccgggatggcttcaatgttcgagtgcctctgccagggcctttgtttgatgcactgcctcgcgagattcagagcggtatgcttctgcgggtccagccggtgctatttaatgtcggtattaacgagcaacagacattggccgagaggttcggcgacacctcactacaggaggtgatcaatgttgagtccctcgtgagattgaacagttatttcgaacagtttaaggaggtcctgcccgaggattgcctgcctcgaagtcggagtcaaacctgcttgccggagctgctgcgattcctgggacagaacgtacacgctcggaagaataagaatgttgatatactgtggcaggccgccgaaatctgtagaagactgaacggtgtgcggttcacaagctgcaagagtgcaaaagaccggactgccatgtccgtgacactggaacagtgcttgattctacagcatgaacatggcatggcaccccaggttttcacacaggccctcgaatgtatgcgaagcgagggctgcaggcgggaaaacacaatgaaaaatgttggatctcggaaatatgccttcaattcactccagttgaaagcctttcccaaacactatcgacccccagaggggacgtacggcaaggttgaaacatag

SEQ ID NO: 49249 - DNA, 2934 bp, Artificial Sequence
  derived and/or modified sequence
atgacggctcgagaacactcccctcggcatggcgccagagcccgcgctatgcagcgtgcttccaccatcgatgtagctgctgacatgttaggcctctcattagcaggaaatatccaggatcccgacgaacctattctggaattttctctagcatgctccgaattgcatacaccaagcctcgaccggaagccaaactcctttgtggccgtttcagttactaccccaccccaggccttttggactaaacatgcacagacggaaatcatcgaaggaactaataacccaatctttctatccagtatcgcattctttcaagattctctcattaaccagatgactcaagttaagctcagtgtgtacgacgtgaaagataggtcacaaggtactatgtatctactaggtagtggtacattcatcgtaaaggacctcctgcaggaccggcatcatagactacacctcaccctccggagcgcggaatccgatcgagttgggaacatcacagtcatcggctggcagatggaggaaaaatctgatcagcgcccaccagtgacccgttcagtggatactgtcaatggacgaatggtcttgccagtagatgagtccttgaccgaagcacttggcattcggagcaaatatgcatctcttagaaaggatacattgctcaagtccgtgtttggaggagccatatgccggatgtaccgctttcctactactgacggaaatcatttgagaattctcgagcaaatggcagaaagcgtgctctcgttgcatgtgccccgacagtttgtgaaactcctgcttgaggaggatgccgcacgggtatgcgaattggaggaacttggcgagctatccccctgttgggaaagcctgagaagacaaattgtgactcagtaccagactatcatccttacgtatcaggagaatttgacagatctacatcagtaccggggaccatccttcaaggcctcttcgcttaaggcggataaaaaactagagttcgtgcccactaatttgcacatccagaggatgcgcgtgcaagatgacggaggatcagatcagaattacgacatcgtcacaatcggtgccccagctgctcattgccagggattcaagtcgggcggcctgagaaagaagctgcacaagttcgaagagaccaaaaaacacttcgaagaatgctgtacgtcttccggatgccagagcatcatttacatcccgcaagatgtcgtcagagcgaaggagataattgcccagattaataccttaaagacacaggtgtcatattatgctgaacgcctctcgcgtgctgctaaagaccgctccgctacaggtctcgaacggacccttgcaatcctcgccgacaaaacaagacagctggtgaccgtatgtgactgtaagctgctcgccaactccattcacggcttgaacgctgctagacccgattatatcgcatccaaagcaagcccaacctctaccgaagaggagcaggtgatgctccgtaacgatcaagacaccctcatggcccgctggacaggccgtaacagtcgcagttctctacaagttgactggcacgaagaggaatgggagaaggtttggttaaacgtggacaaatccttggaatgtatcatccagagagtggacaaattactacaaaaggagagattgcacggggaagggtgcgaggatgtgttcccatgtgccggtagttgtacttctaaaaagggcaatcctgatagccatgcatattggatcagacctgaagacccgttctgcgacgtcccatcatctccctgcccctcaacaatgcctagtactgcgtgtcacccccacctgacgactcattgcagccctcctcctgaagaaagctctcctggcgaatggtcagaggcactctatcccctcttaaccacattgaccgactgcgtagccatgatgagtgacaaggcaaaaaaggcaatggtatttctgctgatgcaggatagtgcacccacgatagccacatacctctcgctgcagtatagaagagacgtggtcttttgtcagacactcacagccctcatatgcgggttcatcatcaaattaagaaattgcctccacgatgatggcttcttgaggcaactgtatactattggtctgctggctcagttcgaatccctgctttctacgtacggtgaggagcttgcaatgttggaggatatgtctctcgggatcatggatttacgcaatgttacgttcaaggttacacaggccacctcgtccgcctccgctgatatgctgcccgtgatcactggaaacagagatggatttaacgtccgcgtgcccctacccgggccactgtttgacgcgctaccaagagagatacagtccgggatgctcctgcgtgtccagcccgtactttttaacgtgggcatcaacgaacagcagactttagccgaacgattcggcgacacatccctgcaggaggtgattaacgtcgagtccctggtacgcttaaactcttactttgagcagttcaaagaagtcctaccagaagattgtctccctcggtcaagatcacagacatgtctccctgaactactacggtttctgggtcagaatgtccacgctcgcaagaacaaaaacgtcgatatcctctggcaggcagccgaaatttgccgacggctaaacggtgtgagattcacttcatgcaagtcagctaaggataggacagcaatgtcggtgacccttgagcaatgcctaattctgcaacacgaacacggtatggcgccacaagtgttcacccaggccctcgagtgcatgaggagtgaaggatgcagaagagagaatacgatgaaaaatgtgggtagcagaaagtacgccttcaattcgctgcagctgaaagctttccctaagcactataggccacccgaagggacctatggtaaagtcgaaacttag

SEQ ID NO: 49250 - DNA, 2934 bp, Artificial Sequence
  derived and/or modified sequence
atgaccgccagagagcacagccccagacacggcgccagagccagagccatgcagagagccagcaccatcgacgtggccgccgacatgctgggcctgagcctggccggcaacatccaggaccccgacgagcccatcctggagttcagcctggcctgcagcgagctgcacacccccagcctggacagaaagcccaacagcttcgtggccgtgagcgtgaccacccccccccaggccttctggaccaagcacgcccagaccgagatcatcgagggcaccaacaaccccatcttcctgagcagcatcgccttcttccaggacagcctgatcaaccagatgacccaggtgaagctgagcgtgtacgacgtgaaggacagaagccagggcaccatgtacctgctgggcagcggcaccttcatcgtgaaggacctgctgcaggacagacaccacagactgcacctgaccctgagaagcgccgagagcgacagagtgggcaacatcaccgtgatcggctggcagatggaggagaagagcgaccagagaccccccgtgaccagaagcgtggacaccgtgaacggcagaatggtgctgcccgtggacgagagcctgaccgaggccctgggcatcagaagcaagtacgccagcctgagaaaggacaccctgctgaagagcgtgttcggcggcgccatctgcagaatgtacagattccccaccaccgacggcaaccacctgagaatcctggagcagatggccgagagcgtgctgagcctgcacgtgcccagacagttcgtgaagctgctgctggaggaggacgccgccagagtgtgcgagctggaggagctgggcgagctgagcccctgctgggagagcctgagaagacagatcgtgacccagtaccagaccatcatcctgacctaccaggagaacctgaccgacctgcaccagtacagaggccccagcttcaaggccagcagcctgaaggccgacaagaagctggagttcgtgcccaccaacctgcacatccagagaatgagagtgcaggacgacggcggcagcgaccagaactacgacatcgtgaccatcggcgcccccgccgcccactgccagggcttcaagagcggcggcctgagaaagaagctgcacaagttcgaggagaccaagaagcacttcgaggagtgctgcaccagcagcggctgccagagcatcatctacatcccccaggacgtggtgagagccaaggagatcatcgcccagatcaacaccctgaagacccaggtgagctactacgccgagagactgagcagagccgccaaggacagaagcgccaccggcctggagagaaccctggccatcctggccgacaagaccagacagctggtgaccgtgtgcgactgcaagctgctggccaacagcatccacggcctgaacgccgccagacccgactacatcgccagcaaggccagccccaccagcaccgaggaggagcaggtgatgctgagaaacgaccaggacaccctgatggccagatggaccggcagaaacagcagaagcagcctgcaggtggactggcacgaggaggagtgggagaaggtgtggctgaacgtggacaagagcctggagtgcatcatccagagagtggacaagctgctgcagaaggagagactgcacggcgagggctgcgaggacgtgttcccctgcgccggcagctgcaccagcaagaagggcaaccccgacagccacgcctactggatcagacccgaggaccccttctgcgacgtgcccagcagcccctgccccagcaccatgcccagcaccgcctgccacccccacctgaccacccactgcagccccccccccgaggagagcagccccggcgagtggagcgaggccctgtaccccctgctgaccaccctgaccgactgcgtggccatgatgagcgacaaggccaagaaggccatggtgttcctgctgatgcaggacagcgcccccaccatcgccacctacctgagcctgcagtacagaagagacgtggtgttctgccagaccctgaccgccctgatctgcggcttcatcatcaagctgagaaactgcctgcacgacgacggcttcctgagacagctgtacaccatcggcctgctggcccagttcgagagcctgctgagcacctacggcgaggagctggccatgctggaggacatgagcctgggcatcatggacctgagaaacgtgaccttcaaggtgacccaggccaccagcagcgccagcgccgacatgctgcccgtgatcaccggcaacagagacggcttcaacgtgagagtgcccctgcccggccccctgttcgacgccctgcccagagagatccagagcggcatgctgctgagagtgcagcccgtgctgttcaacgtgggcatcaacgagcagcagaccctggccgagagattcggcgacaccagcctgcaggaggtgatcaacgtggagagcctggtgagactgaacagctacttcgagcagttcaaggaggtgctgcccgaggactgcctgcccagaagcagaagccagacctgcctgcccgagctgctgagattcctgggccagaacgtgcacgccagaaagaacaagaacgtggacatcctgtggcaggccgccgagatctgcagaagactgaacggcgtgagattcaccagctgcaagagcgccaaggacagaaccgccatgagcgtgaccctggagcagtgcctgatcctgcagcacgagcacggcatggccccccaggtgttcacccaggccctggagtgcatgagaagcgagggctgcagaagagagaacaccatgaagaacgtgggcagcagaaagtacgccttcaacagcctgcagctgaaggccttccccaagcactacagaccccccgagggcacctacggcaaggtggagacctag

SEQ ID NO: 49251 - protein, 972 aa, Artificial Sequence
  derived and/or modified sequence
MTAREHSPRHGARARAMQRASTIDVAADMLGLSLAGNIQDPDEPILEFSLACSELHTPSLDRKPNSFVAVSVTTPPQAFWTKHAQTEIIEGTNNPIFLSSIAFFQDSLINQMTQVKLSVYDVKDRSQGTMYLLGSGTFIVKDLLQDRHHRLHLTLRSAESDRVGNITVIGWQMEEKSDQRPPVTRSVDTVNGRMVLPVDESLTEALGIRSKYASLRKDTLLKSVFGGAICRMYRFPTTDGNHLRILEQMAESVLSLHVPRQFVKLLLEEDAARVCELEELGELSPCWESLRRQIVTQYQTIILTYQENLTDLHQYRGPSFKASSLKADKKLEFVPTNLHIQRMRVQDDGGSDQNYDIVTIGAPAAHCQGFKSGGLRKKLHKFEETKKHTSSGCQSIIYIPQDVVRAKEIIAQINTLKTQVSYYAERLSRAAKDRSATGLERTLAILADKTRQLVTVCDCKLLANSIHGLNAARPDYIASKASPTSTEEEQVMLRNDQDTLMARWTGRNSRSSLQVDWHEEEWEKVWLNVDKSLECIIQRVDKLLQKERLHGEGCEDVFPCAGSCTSKKGNPDSHAYWIRPEDPFCDVPSSPCPSTMPSTACHPHLTTHCSPPPEESSPGEWSEALYPLLTTLTDCVAMMSDKAKKAMVFLLMQDSAPTIATYLSLQYRRDVVFCQTLTALICGFIIKLRNCLHDDGFLRQLYTIGLLAQFESLLSTYGEELAMLEDMSLGIMDLRNVTFKVTQATSSASADMLPVITGNRDGFNVRVPLPGPLFDALPREIQSGMLLRVQPVLFNVGINEQQTLAERFGDTSLQEVINVESLVRLNSYFEQFKEVLPEDCLPRSRSQTCLPELLRFLGQNVHARKNKNVDILWQAAEICRRLNGVRFTSCKSAKDRTAMSVTLEQCLILQHEHGMAPQVFTQALECMRSEGCRRENTMKNVGSRKYAFNSLQLKAFPKHYRPPEGTYGKVET

SEQ ID NO: 49252 - DNA, 2919 bp, Artificial Sequence
  derived and/or modified sequence
atgactgcgagggaacatagtccgcgccacggggctcgcgcgagagctatgcaacgcgcaagcactatcgatgttgcagcagacatgctgggtctgagcctcgcaggcaacatccaggaccctgacgagccaatcctcgaattttctttggcgtgcagcgaattgcatacacctagcctagaccgaaagccaaatagcttcgttgcagtgagtgtaactacccctccccaggccttttggaccaagcacgcccagaccgagattatcgaggggactaataatccaatttttctttctagcatcgctttttttcaggatagtcttatcaatcagatgactcaagtaaagttgagcgtgtacgacgtgaaggaccgatctcagggaactatgtacttgctgggttctggcacattcatagtgaaagacctgctccaggatcgccaccatagacttcacttaacactgagatctgccgagtcggaccgggtagggaacatcacagtcattggctggcagatggaggaaaaatcagatcaacgcccgcccgtgacccgcagtgttgacacagttaacggtcggatggttctgcctgtggacgaatctctgaccgaggccctgggcatccgaagtaagtacgcatccctacgcaaggacacactcttgaaaagtgtcttcggaggagccatttgtcgaatgtacaggtttcctaccacggatggcaatcacctgagaattctcgaacaaatggccgaaagcgtgctgtctctacacgtgccccgccagtttgttaaactcctgctggaagaagatgcagcccgcgtctgtgagctcgaggagttgggtgagctatcgccatgctgggagtcactgcgccgccagatagtcactcaatatcagactattattttgacgtaccaggaaaacttgactgacctacatcagtatagggggcccagcttcaaggcaagtagtctgaaggccgataagaaactggagttcgttcccacaaacctgcatatccaacgcatgcgtgttcaggacgatggcgggtccgaccaaaactatgatatcgtaacaataggagcgcccgctgcccactgccagggttttaaatctggaggtctgcgcaaaaaattgcacaaattcgaggagactaagaaacacacctctagtggttgtcagtctattatctacattccccaggacgtcgttagagcaaaagaaatcatcgcgcaaataaacaccctgaagacacaggtatcctactatgctgagcgcctcagccgcgcagctaaagaccgcagcgcgacgggtttggaaagaacactggctattttggccgataaaacacggcagctggttacggtgtgtgattgcaagctgctggccaactccattcatggcttgaacgcagcacgccccgattacatcgccagcaaggcttctcctacatcgaccgaagaagagcaggtgatgctcaggaatgatcaggatacacttatggcacgatggaccggtagaaatagtagatcttccctgcaggttgactggcatgaggaggaatgggaaaaagtatggctaaacgttgacaagtcacttgagtgcattatccagcgggtggataaattactgcagaaggaaaggcttcacggcgagggatgtgaagacgtgttcccctgcgcgggctcttgcaccagcaagaaaggcaatcccgactcccacgcctattggatacggcctgaagacccgttctgtgacgtgcccagcagcccttgtccttccacgatgccctccacggcgtgccatcctcatctcactacgcattgcagccccccaccagaagaatcctcacctggagagtggtcagaggccctctacccattgctgaccactttaacagactgtgtcgccatgatgagtgataaagctaagaaggctatggtttttctcctcatgcaggactcagccccgaccattgccacatatctgagcttgcaatatagaagggatgtggtgttctgtcaaaccttgacggctctgatctgtggctttattatcaagctaagaaattgcctgcacgatgacggatttctgcgccagttgtatactatcggtctgctggcacagtttgagagtctgttatccacatacggggaagagcttgcaatgctggaggacatgtcattgggcattatggacctgaggaacgtgacgttcaaggtgactcaagcaaccagcagcgcttctgcggatatgctgccagtgattacgggtaatcgagatgggttcaacgtaagagtgccgctgcccggccctttatttgacgcattaccacgcgaaattcagtctggcatgcttcttagagtgcagcccgtgttgttcaacgtgggcatcaatgagcagcagactctggcagagcggttcggggatacttccctccaagaagtaatcaacgtggagagtctggttcgcctgaactcatatttcgaacagtttaaggaggtgttaccagaagattgtctgcctaggtcccgatcgcagacatgcttgcctgagctactccggttcctagggcagaacgtgcacgcaaggaaaaacaagaacgtcgatattctgtggcaggcagcagaaatctgtcgtagactgaatggggtgcgctttacgtcatgcaagtccgccaaagatagaacagctatgagtgtgacacttgaacagtgtttgatactccaacacgagcatggtatggccccccaggtctttacccaggctcttgagtgtatgcggtccgaggggtgccgccgtgaaaacacgatgaaaaatgtgggctcccgcaagtatgcgttcaatagcctgcagctgaaggcattcccgaagcattatagaccacccgaaggtacatacgggaaggtggagacttag

SEQ ID NO: 49253 - DNA, 3365 bp, Artificial Sequence
  derived and/or modified sequence
gtctagagcggcggcggctggctagggctgcggcgcgcgtggagggttcgctgctggtttgccgccgggtcgggctccgtgggccggggcaggaggaccagcacctgaggccgggcccgcagcccgcgacttcacagccaggcggcggcgctgctgctgctgcggggctctggcgcgcagcccggcgggacagcggggcggctggcgccgggggccggggagcgccagatgatggatttggacatgcttctatgaagaaatgccacatggtccgagagcaaacatgtccaggctactgccactttagtggactagggctcggtgccagcacttcccgggtaatcaggcgtggtctgaccgaggatcaagaagcacatcatcaccaatgacatcatgacagcaagagagcacagccctcgccatggtgccagggcccgtgcaatgcagcgggcttccaccatcgacgtggcggccgacatgctgggcctctctctggcaggaaatatacaagacccagatgagcccattttagaatttagcttagcttgcagtgagctgcatactccatcgctagatcgaaagccaaatagttttgttgcggtgagtgtcaccacccctcctcaggcattctggacgaagcatgcacagacggagatcattgagggaaccaacaatcctatatttctaagcagtattgccttctttcaagactctcttatcaatcagatgacacaagtcaaactctccgtgtatgatgtcaaagatagatctcagggaacaatgtatttactgggctctggaacgttcattgtcaaagatctgctccaggacaggcatcataggttgcatttaacactaaggtctgcagagagtgaccgtgtaggtaacatcaccgtgattggctggcagatggaggagaagtcagaccaacggccccctgtgacccggtctgtggacactgtcaatgggaggatggttcttcctgtcgatgagagcttgacggaggcgttaggaatccgatccaaatacgcttcattgcgaaaggacactttgctgaaatcggtgttcggtggtgccatctgccgcatgtaccggtttccaaccactgatggtaaccatttgcggatcctggagcagatggcagagagcgtgctctccctgcacgtgccccggcagttcgtgaagctcctactagaggaagatgcagccagagtgtgtgagctggaggagctgggagagctgtccccttgctgggagagcctccggcgccaaattgtcacccagtaccagaccatcatcctcacataccaggagaacctgaccgacctccatcagtacagagggccctcgtttaaagcaagcagtttgaaagcagataaaaagttagaatttgttcccacaaacttgcacatacaaaggatgagagttcaagacgatggaggatcagatcagaactacgacatcgtcaccattggggcgccagcagcacactgccaaggttttaagtcaggaggtctccgcaaaaagctgcacaaatttgaagagaccaagaaacatacatcatctggctgccagtccataatctacataccccaggatgttgtcagagccaaggagatcatcgcccagatcaacaccctgaaaacccaagtgagttactacgcagagcggctgtcaagggcagccaaggacaggtctgccactggccttgagaggacactcgccatcttggcagacaagacacggcagctggtcacggtctgcgactgcaagctcctggccaactccatccatgggctgaacgctgcacggcctgactacattgcctccaaggcctctcccacttcgactgaggaggagcaggtgatgcttagaaatgaccaggacaccctcatggcccggtggacagggagaaacagccgatcttccctgcaggtggactggcacgaggaggagtgggagaaagtgtggctgaacgtggacaagagcctagagtgcatcattcagcgtgtggacaagctgctgcagaaggagcggctgcatggcgagggctgtgaggatgtcttcccctgtgcaggcagctgcaccagcaagaaaggtaacccggacagccacgcctactggatcagaccagaagaccccttctgtgatgtcccctcctcaccatgcccctccaccatgccctccactgcatgccatcctcatctgaccacacattgcagtccccctcctgaagagtccagcccaggtgaatggagtgaggccctttacccgctgctgaccactctcaccgactgcgtggccatgatgagtgacaaggccaagaaggccatggtattcctgctcatgcaggacagcgcgcccaccatagccacctacctgagcctgcagtaccgccgtgacgtggtcttctgccagacgctgaccgccctcatctgcggcttcatcattaagctgaggaactgcctgcatgacgacggcttcctgcgccagctctacaccatcgggctgctggcccagttcgagagcctgctgagcacctacggggaggagctggcaatgctggaggacatgagccttgggatcatggacttgaggaacgtgaccttcaaagtcactcaggccacttccagcgcctccgcagacatgctgcccgtcatcacaggaaatcgcgacgggtttaacgtgcgggtccctctgccgggcccgctgtttgacgccttgccccgggagatccagagtggcatgctgctgcgagtgcagcccgtcctcttcaacgtgggcatcaatgagcagcagacactggccgagaggtttggcgatacgtctttacaagaagtcatcaacgtggagagtttggtgcggttaaattcctactttgagcagtttaaggaagttttgcctgaggattgcctgcctcggtctcgcagtcagacgtgcctgccagagctgctgcggtttctgggtcagaacgtgcatgcccggaagaataagaacgtcgacattctctggcaagctgctgagatctgccgccgccttaatggggtccggttcaccagctgcaagagcgctaaggaccgtacagccatgtcggtgacactggagcagtgcctgatcctgcaacacgagcatggcatggccccgcaggtcttcacccaggccctggagtgcatgcgcagtgagggttgtcgaagagaaaatacaatgaagaatgttggaagtcgcaaatatgcatttaattccctgcagctgaaggctttccccaagcattacaggcctcccgaagggacttacggaaaagttgaaacgtgaacacacggtttcctctaattagctgttacataataaatgtgggtaccctctag

SEQ ID NO: 49254 - DNA, 2919 bp, Artificial Sequence
  derived and/or modified sequence
atgacagcccgggagcacagccccaggcatggagcccgggcccgggccatgcagagggccagcaccattgatgtggccgctgacatgctgggcctgagcctggccggcaacatccaggaccctgatgagcccatcctggagttcagcctggcctgcagcgagctgcacacccccagcctggacaggaagcccaacagctttgtggccgtgtctgtgaccaccccaccccaggccttctggaccaagcacgcccagacagagatcatcgagggcaccaacaaccccatcttcctgagcagcatcgccttcttccaggacagcctcatcaaccagatgacccaggtgaagctgtctgtgtatgatgtgaaggacaggagccagggcaccatgtacctgctgggcagcggcaccttcatcgtgaaggacctgctgcaggacagacaccaccggctgcacctgaccctgcggtctgctgagagtgacagagtgggcaacatcaccgtgattggctggcagatggaggagaagagtgaccagaggcctcctgtgaccaggtctgtggacacagtgaatggaaggatggtgctgcctgtggatgagagcctgacagaggccctgggcatccgcagcaaatatgccagcctgaggaaggacaccctgctgaagtctgtgtttggaggagccatctgcaggatgtaccgcttccccaccacagatggcaaccacctgcgcatcctggagcagatggccgagagcgtgctgagcctgcacgtgccccggcagtttgtgaagctgctgctggaggaggatgctgcccgggtgtgtgagctggaggagctgggggagctgagcccctgctgggagagcctgcggcggcagatcgtgacccagtaccagaccatcatcctgacctaccaggagaacctgacagacctgcaccagtaccggggccccagcttcaaggccagcagcctgaaggctgacaagaagctggagtttgtgcccaccaacctgcacatccagaggatgagggtgcaggatgatggcggcagtgaccagaactatgacatcgtgaccatcggggccccagctgcccactgccagggcttcaagagcggcggcctgaggaagaagctgcacaagtttgaggagaccaagaagcacaccagcagcggctgccagagcatcatctacatcccccaggatgtggtgcgggccaaggagatcatcgcccagatcaacaccctgaagacccaggtgtcctactatgcagagcggctgagccgggccgccaaggacagaagtgccaccggcctggagaggaccctggccatcctggccgacaagacccggcagctggtgacagtgtgtgactgcaagctgctggccaacagcatccacggcctgaatgctgcccggccagactacatcgccagcaaggccagccccaccagcacagaggaggagcaggtgatgctgagaaatgaccaggacaccctgatggcccgctggacaggaagaaacagccgcagcagcctgcaggtggactggcatgaggaggagtgggagaaggtgtggctgaatgtggacaagagcctggagtgcatcatccagagggtggacaagctgctgcagaaggagcggctgcacggggagggctgtgaagatgtgttcccctgtgccggcagctgcaccagcaagaagggcaacccagacagccacgcctactggatccggcctgaggaccccttctgtgatgtgcccagcagcccctgccccagcaccatgcccagcacagcctgccacccccacctgaccacccactgcagccccccacctgaggagagcagccctggagagtggagcgaggccctgtaccccctgctgaccaccctgacagactgtgtggccatgatgtctgacaaggccaagaaggccatggtgttcctgctgatgcaggacagcgcccccaccatcgccacctacctgagcctgcagtacagaagagatgtggtgttctgccagaccctgacagccctgatctgtggcttcatcatcaagctgaggaactgcctgcatgatgatggcttcctgcggcagctgtacaccatcggcctgctggcccagtttgagagcctgctgagcacctatggagaggagctggccatgctggaggacatgagcctgggcatcatggacctgagaaatgtgaccttcaaggtgacccaggccaccagcagcgccagcgctgacatgctgcccgtcatcactggaaacagagatggcttcaacgtgcgggtgcccctgcccggccccctgtttgatgccctgccccgggagatccagagcggcatgctgctgcgggtgcagcctgtgctcttcaacgtgggcatcaatgagcagcagaccctggccgagagatttggagacaccagcctgcaggaggtgatcaacgtggagagcctggtgcggctgaacagctactttgagcagttcaaggaggtgctgcctgaggactgcctgcccaggagccgcagccagacctgcctgcctgagctgctgcgcttcctgggccagaatgtgcacgccaggaagaacaagaatgtggacatcctgtggcaggccgctgagatctgccggcggctgaatggagtgcgcttcaccagctgcaagagcgccaaggacagaacagccatgtctgtgaccctggagcagtgcctgatcctgcagcatgaacatggcatggccccccaggtgttcacccaggccctggagtgcatgaggtctgagggctgcagaagagagaacaccatgaagaatgtgggcagcaggaaatatgccttcaacagcctgcagctgaaggccttccccaagcactaccggcccccagagggcacctacggcaaggtggagacctag

SEQ ID NO: 49255 - DNA, 2919 bp, Artificial Sequence
  derived and/or modified sequence
atgaccgcccgggagcacagcccccggcacggcgcccgggcccgggccatgcagcgagcaagcacaatcgacgtggctgccgacatgttgggcctttctcttgcaggtaacattcaggaccctgacgaaccaattctcgaattctccctagcctgctcagagttgcacaccccgagtttagataggaaacctaactctttcgtcgccgtcagcgttacaactcctcctcaggcgttctggaccaaacacgcacaaacggagatcatcgagggaaccaacaatccgatctttctatcatcaatcgcattcttccaggactcactgatcaaccagatgactcaagtgaagctgagcgtgtacgacgtcaaggatcggagtcagggcaccatgtacctgttaggctcagggactttcatcgtgaaggacctgctgcaggaccggcatcacagactccatttgactctgaggagcgcagaatcagaccgtgttggtaacataactgtgattgggtggcaaatggaagagaaatcagaccagcggccacccgtcactcgctccgttgacactgtgaatggtcgtatggtgctgccagtcgacgaaagtctgaccgaggctctgggtattaggtcaaagtacgcaagtctgcgcaaggataccctgctcaagagcgtcttcggaggagcaatttgccgcatgtaccgctttccaacaaccgatggcaatcacctgcgtatcctcgagcagatggctgagagcgtgctctctctgcacgtgcctcggcagttcgttaaactgctgctggaggaggacgcggctcgtgtctgcgaactcgaggagctcggagaattatctccctgctgggaaagtctccggagacagatcgtgacgcaatatcaaacgattattctgacataccaggaaaatctgactgatctccatcaatatcgcggaccctcctttaaagcgagctccttgaaggcggataagaagctggagtttgttcctacaaacttgcacattcagaggatgagggtgcaagatgatggcggctcggatcaaaattacgatattgtcacaatcggcgcgccggcagcccactgtcagggtttcaaatcgggagggctaaggaaaaagttgcacaaatttgaggaaactaaaaagcatacctcctccggttgtcagagcattatatatatcccccaggacgttgtcagggccaaggaaattattgctcagataaataccttaaagacccaagtcagctactacgccgagaggttgagtagggccgccaaggataggagcgccactgggctagaaagaacgttggccatcttagcagacaagaccaggcaacttgtaaccgtgtgtgactgcaagctgctcgcgaacagcatccatggcttgaacgctgccagacctgattacatagcttcaaaggcctcccccacatcaactgaggaggaacaagtgatgctgcgaaacgatcaagacaccctgatggccagatggacagggagaaatagccgctcttcactccaagtggactggcatgaggaagagtgggagaaggtatggttgaacgtggataaatctttagaatgtatcattcaacgtgtcgataagctgctccaaaaggaaaggctccatggggaaggctgcgaagacgtgttcccatgcgccgggagttgcacaagcaagaaaggcaatcccgactctcatgcttactggatacgccctgaggaccccttctgcgacgtcccaagttccccttgcccgtccacgatgccttcaacagcttgccacccccacctgaccacgcactgctcaccgcctcctgaagagtcctcaccaggggaatggagcgaggccctgtaccccctcctgacaaccctgactgactgtgtggcaatgatgtctgataaagcaaagaaggccatggtgtttttgctgatgcaggatagtgcccctaccattgccacatacctctccctgcagtacaggagggacgtcgtgttctgccagaccctgacggctttaatctgcggctttattattaaactcagaaattgcctgcacgacgacggcttcctgcgccagttgtacaccattggacttctggcccagtttgaaagtcttctctcgacatatggtgaggaactggccatgttggaggacatgagcttagggatcatggatttgcgtaatgtgacgttcaaggttacccaagcaacttcgtcggccagtgcagacatgctgcccgtgattactggtaaccgggatgggtttaacgtgcgggtgcccctgccaggaccactctttgacgcccttcccagagagatccaatcaggaatgctattacgcgtgcagcctgtcttgttcaatgtgggcattaacgaacagcaaacattagccgagcgattcggcgacacttccctccaggaggttattaacgtagaaagcttagtgcgattgaacagctacttcgaacagttcaaagaggtacttccagaggactgtctccccaggtctcggagccagacatgtcttcctgagctccttagattcctgggtcagaacgtgcatgctcggaagaataagaatgtagatattctgtggcaggcagccgaaatatgtcgtcgcctcaacggagtgcgcttcacatcatgcaagtcagccaaagaccggacagccatgagcgtgaccttggaacagtgtcttattctgcagcatgagcatggtatggcccctcaggtctttacccaggcgctagaatgtatgcgctcggaagggtgtcggcgcgaaaataccatgaagaacgtgggctctcgcaaatacgcatttaattcactgcaacttaaagcctttcccaagcattatcgaccgcctgagggaacctacggcaaagttgagacgtag

SEQ ID NO: 49256 - DNA, 2919 bp, Artificial Sequence
  derived and/or modified sequence
atgactgcgagagaacatagtcctcgacacggcgcaagagctcgggcaatgcagagggcctcaacaatagacgtggctgcagatatgctaggattatccctggccggaaatattcaggatccggacgagccaatcctcgaattctcactggcctgcagcgaacttcacactccaagtttggacaggaagccgaattctttcgtcgcagtcagcgtgacgacgccacctcaggccttttggaccaagcatgcccagactgagattattgaggggaccaacaacccgatttttttgtcttccatagccttctttcaggatagtctgattaaccagatgactcaagttaaactgagcgtctatgatgtgaaggatcggtcccaagggacgatgtacctgcttgggtctggcacttttattgtcaaggatctgttgcaggaccgccaccacaggctgcatctcacactccgaagtgcagaaagcgatagggtgggaaacatcaccgtgatcggttggcagatggaggaaaagtccgaccagcgcccacccgtgactaggagtgttgatacagtcaatgggcgtatggtactgccggtcgacgaatctctaaccgaagccctcggcatccgcagcaaatacgctagccttaggaaagacacactgttaaaaagtgtcttcggcggtgccatttgtcgtatgtacagatttccaaccacagatgggaaccacctccgcatcctcgagcagatggccgagtctgtgctctctctgcatgtgcctcggcagtttgttaagctactcctcgaggaagacgccgcacgagtctgcgagttggaggagctcggtgaactgagtccctgttgggagagccttaggcgacaaatcgtgacgcagtaccagacaattattctcacttatcaagaaaatttaaccgacctccatcaataccgcggtccttcctttaaagcctcttcgctcaaagccgacaagaagctagaattcgtgccgaccaatctgcatatccaacgcatgagggtacaagatgacgggggaagtgaccaaaactatgacatagtcactattggggctccagccgcacactgccaaggtttcaaaagcggtggcctgaggaagaaactgcataagtttgaagagacaaagaaacatacatcttcgggctgtcagtccatcatctatattccacaggatgtggtccgcgctaaagagataattgctcagataaacactctcaaaactcaggttagctattatgcggagcggctttcccgggcagccaaagacagaagcgctactgggctggagcggacactggcgatattagctgacaagacccgccagctggtgacggtctgtgactgtaaactcctggctaattccatacatggattgaatgcagctagacctgattatatcgcctcaaaggcttctcctacaagtaccgaggaggagcaggtaatgctcaggaacgaccaggacaccctgatggcacgctggaccgggagaaacagccgttctagcctgcaggtagattggcacgaggaggagtgggagaaggtttggctgaacgtggataaatctctggaatgtataattcagagagtggataagcttttacagaaagagagattacacggtgaagggtgtgaggacgtcttcccttgtgcagggagttgtactagcaagaagggaaaccccgatagtcatgcatattggattagacccgaagaccccttctgcgacgtgccaagtagtccttgtccatctactatgccttctaccgcttgtcacccacatctgactacacattgcagcccacctccggaggagagcagtcccggagaatggagtgaagccttataccccctcctaactaccctaacagactgtgtagccatgatgtccgataaagcgaagaaagcaatggtgttcctcctcatgcaggactccgcgcctaccatagctacttaccttagcttgcagtaccgcagggacgtggttttctgtcagactctcaccgctctcatctgtggttttattataaaactgagaaactgcctgcatgacgatggctttctgagacaactgtacacaattgggctcctcgcacaattcgaaagcctcctttccacctatggcgaagagctggccatgctcgaagacatgtctctgggcattatggacctgagaaacgtgacttttaaagtcacacaggcaacaagctcggccagcgcggacatgctgcccgttattaccggcaatagagatggcttcaacgtccgggtcccacttcccggaccactctttgatgcgctgcctcgcgagattcagtctggcatgctcctgcgtgtgcagccggtgctgtttaatgttggcatcaacgaacagcagaccttggcagaaaggttcggcgatacatccctgcaagaagtgatcaacgttgagtccctggtgcggctgaattcctacttcgagcagtttaaggaggtccttccggaagattgcctccctaggtctcggtcccagacctgcctgccggagctcctccgtttcctgggtcaaaacgtccacgcaagaaagaacaaaaatgtagatattctttggcaagccgctgaaatctgccgacgtctcaacggagtgcgatttacgagctgtaagtcagcaaaagacagaaccgcgatgtctgtcactctcgaacaatgtctaattcttcagcatgagcacgggatggctccccaggtgtttacacaggcattagagtgcatgcgtagcgaggggtgcagacgggagaacactatgaaaaacgtcggcagcaggaaatatgcattcaactccttgcaactcaaggctttccccaaacactaccggccacccgagggcacatatggcaaagtggagacatag

SEQ ID NO: 49257 - DNA, 2919 bp, Artificial Sequence
  derived and/or modified sequence
atgaccgccagagagcacagccccagacacggcgccagagccagagccatgcagagagccagcaccatcgacgtggccgccgacatgctgggcctgagcctggccggcaacatccaggaccccgacgagcccatcctggagttcagcctggcctgcagcgagctgcacacccccagcctggacagaaagcccaacagcttcgtggccgtgagcgtgaccacccccccccaggccttctggaccaagcacgcccagaccgagatcatcgagggcaccaacaaccccatcttcctgagcagcatcgccttcttccaggacagcctgatcaaccagatgacccaggtgaagctgagcgtgtacgacgtgaaggacagaagccagggcaccatgtacctgctgggcagcggcaccttcatcgtgaaggacctgctgcaggacagacaccacagactgcacctgaccctgagaagcgccgagagcgacagagtgggcaacatcaccgtgatcggctggcagatggaggagaagagcgaccagagaccccccgtgaccagaagcgtggacaccgtgaacggcagaatggtgctgcccgtggacgagagcctgaccgaggccctgggcatcagaagcaagtacgccagcctgagaaaggacaccctgctgaagagcgtgttcggcggcgccatctgcagaatgtacagattccccaccaccgacggcaaccacctgagaatcctggagcagatggccgagagcgtgctgagcctgcacgtgcccagacagttcgtgaagctgctgctggaggaggacgccgccagagtgtgcgagctggaggagctgggcgagctgagcccctgctgggagagcctgagaagacagatcgtgacccagtaccagaccatcatcctgacctaccaggagaacctgaccgacctgcaccagtacagaggccccagcttcaaggccagcagcctgaaggccgacaagaagctggagttcgtgcccaccaacctgcacatccagagaatgagagtgcaggacgacggcggcagcgaccagaactacgacatcgtgaccatcggcgcccccgccgcccactgccagggcttcaagagcggcggcctgagaaagaagctgcacaagttcgaggagaccaagaagcacaccagcagcggctgccagagcatcatctacatcccccaggacgtggtgagagccaaggagatcatcgcccagatcaacaccctgaagacccaggtgagctactacgccgagagactgagcagagccgccaaggacagaagcgccaccggcctggagagaaccctggccatcctggccgacaagaccagacagctggtgaccgtgtgcgactgcaagctgctggccaacagcatccacggcctgaacgccgccagacccgactacatcgccagcaaggccagccccaccagcaccgaggaggagcaggtgatgctgagaaacgaccaggacaccctgatggccagatggaccggcagaaacagcagaagcagcctgcaggtggactggcacgaggaggagtgggagaaggtgtggctgaacgtggacaagagcctggagtgcatcatccagagagtggacaagctgctgcagaaggagagactgcacggcgagggctgcgaggacgtgttcccctgcgccggcagctgcaccagcaagaagggcaaccccgacagccacgcctactggatcagacccgaggaccccttctgcgacgtgcccagcagcccctgccccagcaccatgcccagcaccgcctgccacccccacctgaccacccactgcagccccccccccgaggagagcagccccggcgagtggagcgaggccctgtaccccctgctgaccaccctgaccgactgcgtggccatgatgagcgacaaggccaagaaggccatggtgttcctgctgatgcaggacagcgcccccaccatcgccacctacctgagcctgcagtacagaagagacgtggtgttctgccagaccctgaccgccctgatctgcggcttcatcatcaagctgagaaactgcctgcacgacgacggcttcctgagacagctgtacaccatcggcctgctggcccagttcgagagcctgctgagcacctacggcgaggagctggccatgctggaggacatgagcctgggcatcatggacctgagaaacgtgaccttcaaggtgacccaggccaccagcagcgccagcgccgacatgctgcccgtgatcaccggcaacagagacggcttcaacgtgagagtgcccctgcccggccccctgttcgacgccctgcccagagagatccagagcggcatgctgctgagagtgcagcccgtgctgttcaacgtgggcatcaacgagcagcagaccctggccgagagattcggcgacaccagcctgcaggaggtgatcaacgtggagagcctggtgagactgaacagctacttcgagcagttcaaggaggtgctgcccgaggactgcctgcccagaagcagaagccagacctgcctgcccgagctgctgagattcctgggccagaacgtgcacgccagaaagaacaagaacgtggacatcctgtggcaggccgccgagatctgcagaagactgaacggcgtgagattcaccagctgcaagagcgccaaggacagaaccgccatgagcgtgaccctggagcagtgcctgatcctgcagcacgagcacggcatggccccccaggtgttcacccaggccctggagtgcatgagaagcgagggctgcagaagagagaacaccatgaagaacgtgggcagcagaaagtacgccttcaacagcctgcagctgaaggccttccccaagcactacagaccccccgagggcacctacggcaaggtggagacctag

SEQ ID NO: 49258 - protein, 235 aa, Artificial Sequence
  derived and/or modified sequence
MGMLAPGPLQGRRPRKGHKGQEDAVAPGCKASGRGSRVTHLLGYPTQNVSRSLRRKYAPPPCGGPEDVALAPCTAAAACEAGPSPVYVKVKSAEPADCAEGPVQCKNGLLVSSPHCEEPCAHSCAHPGLPPHLVHKLPLSYLQTQDTDAASRRINAPLAAGWSWLRLWLVTLASGVDFPQVSAWMRALPSPDCPGLRTTGEQMQKLLLKENKVKTRKSKRRSGEGSHLTTSILEQ

SEQ ID NO: 49259 - DNA, 708 bp, Artificial Sequence
  derived and/or modified sequence
atgggcatgctggcccccggccccctgcagggcagaagacccagaaagggccacaagggccaggaggacgccgtggcccccggctgcaaggccagcggcagaggcagcagagtgacccacctgctgggctaccccacccagaacgtgagcagaagcctgagaagaaagtacgccccccccccctgcggcggccccgaggacgtggccctggccccctgcaccgccgccgccgcctgcgaggccggccccagccccgtgtacgtgaaggtgaagagcgccgagcccgccgactgcgccgagggccccgtgcagtgcaagaacggcctgctggtgagcagcccccactgcgaggagccctgcgcccacagctgcgcccaccccggcctgcccccccacctggtgcacaagctgcccctgagctacctgcagacccaggacaccgacgccgccagcagaagaatcaacgcccccctggccgccggctggagctggctgagactgtggctggtgaccctggccagcggcgtggacttcccccaggtgagcgcctggatgagagccctgcccagccccgactgccccggcctgagaaccaccggcgagcagatgcagaagctgctgctgaaggagaacaaggtgaagaccagaaagagcaagagaagaagcggcgagggcagccacctgaccaccagcatcctggagcagtag

SEQ ID NO: 49260 - DNA, 708 bp, Artificial Sequence
  derived and/or modified sequence
atgggtatgctggccccgggcccgctccagggaagacgacccaggaagggtcacaaggggcaggaggacgccgtggctcccggctgtaaggcctctggcaggggcagcagagtgacccatttattaggctaccctacccagaatgtttcacgcagtctgcggcgtaagtatgctccacccccatgtggaggccctgaggatgtggcactggccccatgcaccgctgccgctgcctgtgaagccggcccgagccccgtttatgtaaaggtcaagtctgccgagccagctgattgtgcagagggccccgtacagtgtaaaaacggactcctggtatccagccctcattgtgaagagccttgtgctcacagctgcgcccatccaggtttgcctccccaccttgtacacaagttacccctgagttatcttcagactcaggacactgatgctgctagtaggcggattaatgcgcccttggctgccggatggagctggctgcggctgtggctggtcaccttagccagcggtgttgactttcctcaggtcagcgcttggatgcgtgccctgcccagccctgattgtcccggcctgcggacaaccggggaacagatgcagaagttgctacttaaggaaaacaaggtcaagactcgaaagtccaaacgacggagtggagagggctcacatttgaccacctctatccttgagcaatag

SEQ ID NO: 49261 - DNA, 708 bp, Artificial Sequence
  derived and/or modified sequence
atgggcatgctggcccctggccccctgcagggccggcggcccaggaagggccacaagggccaggaggatgctgtggcccctggctgcaaggccagcggccggggcagccgggtgacccacctgctgggctaccccacccagaatgtgagccgcagcctgcggaggaaatatgcccccccaccctgtggcggcccagaagatgtggccctggccccctgcacagctgctgctgcctgtgaggccggccccagccctgtgtatgtgaaggtgaagtctgctgagcctgctgactgtgccgagggccctgtgcagtgcaagaatggcctgctggtgagcagcccccactgtgaggagccctgtgcccacagctgtgcccaccctggcctgcccccccacctggtgcacaagctgcccctgagctacctgcagacccaggacacagatgctgccagccgccgcatcaatgcccccctggccgccggctggagctggctgcggctgtggctggtgaccctggccagcggcgtggacttcccccaggtgtctgcctggatgagggccctgcccagcccagactgccccggcctgcggaccactggagagcagatgcagaagctgctgctgaaggagaacaaggtgaagaccaggaagagcaagagaagaagtggagagggcagccacctgaccaccagcatcctggagcagtag

SEQ ID NO: 49262 - DNA, 708 bp, Artificial Sequence
  derived and/or modified sequence
atgggcatgctggcccccggccccctgcagggccggcggccccggaaaggacataagggtcaggaagatgcggtagctccggggtgtaaagccagcggtcgtggttctagagtgactcacttactcgggtaccctacacagaacgtctcccgcagcttacgccgtaagtacgctccccccccttgtgggggccccgaggacgttgcactggctccctgtacagcggctgctgcatgtgaggccgggccaagccctgtatacgttaaggttaaatcggcagaacccgccgattgtgccgagggcccagtgcaatgcaagaacgggctgctggtctcgagcccacattgtgaagagccctgcgcccatagttgtgctcaccccggtctccctccgcatttggtgcacaaattgcccctgtcttatcttcagactcaggacaccgacgcagcaagtcgccgaattaatgcccctctcgctgctggatggtcatggctgaggctgtggctagtaactctcgcttctggtgtagacttcccacaggtctcagcctggatgcgcgccttgccaagccctgattgtccaggacttcgtacgactggcgaacagatgcaaaagctgctgctgaaggaaaataaggttaaaactagaaagtctaagcgccggagtggagaaggatctcacctgacaaccagcatcttggaacaatag

SEQ ID NO: 49263 - DNA, 708 bp, Artificial Sequence
  derived and/or modified sequence
atgggtatgctggcccctggcccactccagggcaggagacctagaaagggacacaaagggcaggaggacgccgtggcgccaggctgtaaagcttccggacgcggtagtcgggtaacacacctactgggctacccgacccaaaatgtttccagatcattgaggagaaagtatgcccctcctccttgcgggggtcccgaggacgtggccttggcgccttgcactgcagcggctgcctgcgaggccggaccctccccagtctatgtaaaagtaaagtcagccgagcccgctgattgcgcagaaggccctgtccagtgcaagaacgggctcttggtttccagcccacattgcgaagaaccctgcgctcactcttgtgcccacccaggcctgccccctcacctggtgcataaactgcctctgtcctatttgcaaacccaagacactgatgccgcaagtcggagaatcaacgcaccccttgctgcgggatggagttggctgcgtctctggctggtgactctcgcaagcggtgtggatttccctcaggtgtctgcctggatgcgcgctctgccttcccctgactgccctgggctgcgcaccacaggggaacagatgcagaagctcctccttaaggagaacaaagtcaaaacaaggaaaagcaaaagaaggtcaggtgaaggatcacatcttacgacctccatcttggaacaatag

SEQ ID NO: 49264 - DNA, 2501 bp, Artificial Sequence
  derived and/or modified sequence
gaaaagcaccttcttctgggcctgcgaaacatcagaaagggattgcaggggcctggagggggctgcctgcagggctctccagatacgcgtggacaagccctgtctggaggatggggatgctggctccgggaccgctgcagggtcgccgacccaggaagggtcacaaaggacaagaggacgccgtggcgcccgggtgcaaggccagcgggcgcggcagccgcgtcacccacctcctggggtacccgacgcagaacgtcagccgctccctgcgccgcaagtacgcgcctcccccctgcggcggccccgaggacgtggccctggcgccctgcaccgccgccgccgcctgcgaagcgggcccctccccggtctacgtcaaggtcaagagcgcggagccggctgactgcgccgaggggccggtgcagtgcaagaacggcctcttggtctccagcccacactgtgaagagccttgtgcccacagctgtgcacatcctgggcttcctccacaccttgtccataaactgcccctcagctaccttcagacccaggatacagacgcagcctccagaagaataaatgctccattagcagctggctggagctggctgaggctctggctggtgactctggcctctggtgtagacttccctcaggtgagtgcatggatgagagctctaccttctcctgactgcccaggcctcaggacaacaggagaacagatgcaaaaactattgctcaaggaaaataaagtgaaaacgaggaaaagcaaaagaagatctggagagggctctcacctgaccacaagcatcctggagcaatgagtttcaggcaggaagactcatcctgagctgagctgcttttcttgaagttgtgcaagaacgtcctgttggctggggcaaattcagtatttcttttcctggccactgtgctggagcgtgaggaaagactctccaccctcactcccagatcctgcaggaggcgtgagagcggatggagatggtgaggatgtctattaatatggtgtttcctgcaaaacggtgcccatctcaaccatgggttgtcaaccatcctcggtgtctacaactgcaatttacctttgagggcccatgaactctgattacctgaaagtccttaggccagaaagagaaacccctgtcccccacctctcactttcacctatttctagaccttttcttacagcaatgccttggccctcaggaagcatcagatctcaaactgcagggtctggggctgaagctgatgctggcatgggtgactcagagttcctctattagttcaaatatgtaatatcttttagagcctaggactcaggctggaggcaattccttggtgccagttggttaatactttatgaatagtggtgggggagggaatgccttggactattaatgtccccatggatctggatcctggagaacttccagtgtcctggatggaatgttctgcttggctcatcttgcccagagaagagccaggatatgagaagatgggagagggaagggggaggtgtgaaacgtgctggtgcttcctgtcctcgtggtgtgatggctgcccaggctgctccttcgaggcaggacaggattcccatgggagatatgaggaccatggtgatttccaggcaccagttatgtcccagagcatcgtgtgcctgtgcagtggggttactgatagtccaggcatcagttcatattgtcctttatggcagatcctgcacaagggggttctctgtctctggacccactctgtcagcatggacatcctttttctttttccctggtaaggacatcagaaagaaagttacccctccagtgtttggagtcttggaatccttggcctgcctgcaggcctctgaatcctcagtgtgttagcccaaggtcaccttaggtaaaggaacatttctcctggtcttccaacaccctggaaagggaggctcttcaagaataggaaattcttcctagtatctaaccttggcctgcaactatgccatacatttaattgtagaaggtatggaaagttaggactgtggtggacccagttaaatcactggacagaagccatgaggcagagccagaaccagcttctggactccctgcatggagctttctactatcccaggttgttgggtcccttctcagtggccaaagatgctattttatgagccttgaggacatgacactaagtgaaaaaagcctggccaaagggccacatagtgtatagttctatttatatgaaatgtccaggaaagacaaaagcatagaggcagaaagcagactagtgctgtgggaggaatgggggatttgggaggtgatggctaaggggttatggggttttgggggaggtaatagaaatgttttaaaattggttgtgaaggtggatgcccaactctgcgaatacactaaaaggcatcgaattgtatactttaaataggtgaattgtatgctatgtgaattatatctcaataaaggtattttttccctgctgtt

SEQ ID NO: 49265 - DNA, 447 bp, Artificial Sequence
  derived and/or modified sequence
atgagttcagacttcccacattacaactttagaatgccaaacatcggatttcaaaatctgcccttgaacatctacatcgtcgtttttggaactgccattttcgttttcatcctatctctactgttctgttgctatctgatccgactgcgccaccaggctcataaggaattctacgcgtacaaacaggtcatcctcaaagagaaggtgaaggagctgaatctccatgaactctgcgcagtgtgcttagaggatttcaagccgcgcgatgagctgggaatctgtccttgtaagcatgcatttcacaggaagtgtctgattaagtggcttgaagtgagaaaagtatgtcccctttgcaatatgcctgtcctacagctcgcacagctgcatagcaaacaggacagggggccgccacagggccctctgcccggtgcagaaaacatcgtgtag

SEQ ID NO: 49266 - DNA, 447 bp, Artificial Sequence
  derived and/or modified sequence
atgtctagcgacttccctcactataatttcagaatgccgaacataggctttcagaatctcccactgaacatctacatcgttgtctttggcaccgcgatctttgtgttcatcctttccctcttattttgttgttacttgatcagattgcggcaccaagcccacaaagagttctacgcatataaacaggtcatcctgaaagaaaaggtgaaagagttgaatctgcatgagctctgtgcggtgtgtctggaggacttcaagccaagagatgaacttggaatatgcccgtgcaagcacgcattccaccgaaagtgtttgatcaaatggctggaggtccggaaggtctgccccttgtgtaacatgccagtccttcaactggctcagctgcactctaagcaagatagagggccaccccaaggtccactgcccggcgccgaaaacattgtctag

SEQ ID NO: 49267 - DNA, 447 bp, Artificial Sequence
  derived and/or modified sequence
atgagcagtgacttcccccactacaacttcaggatgcccaacatcggcttccagaacctgcccctgaacatctacatcgtggtgtttggaacagccatctttgtgttcatcctgagcctgctcttctgctgctacctgatccggctgcggcaccaggcccacaaggagttctacgcctacaagcaggtgatcctgaaggagaaggtgaaggagctgaacctgcacgagctgtgtgctgtgtgcctggaggacttcaagcccagagatgagctgggcatctgcccctgcaagcacgccttccacaggaaatgtctcatcaagtggctggaggtgaggaaggtgtgccccctgtgcaacatgcctgtgctgcagctggcccagctgcacagcaagcaggaccggggccccccccagggccccctgcccggggctgaaaatattgtgtag

SEQ ID NO: 49268 - DNA, 447 bp, Artificial Sequence
  derived and/or modified sequence
atgagcagcgacttcccccactacaacttccggatgcccaacatcggtttccagaatctccctttgaatatttatatagtggtgtttggcacagctatatttgtttttatcttgtcccttcttttctgctgctatctgattcgacttcgacaccaggcacataaggagttttacgcttacaaacaagtcatcctgaaggaaaaagtgaaggagttgaacctgcacgagttatgcgcagtgtgtctggaagactttaaaccccgcgacgaactaggcatctgcccttgtaagcacgcatttcataggaagtgtctgatcaagtggctcgaagttcggaaggtttgtcctctatgtaatatgcccgtgcttcagctggcacaactgcactccaagcaggaccgcggtcccccccagggacccctaccaggagctgaaaacatagtgtag

SEQ ID NO: 49269 - DNA, 447 bp, Artificial Sequence
  derived and/or modified sequence
atgagcagcgacttcccccactacaacttccggatgcccaacatcggcttccagaacctgccactgaacatttacatcgtggtctttggaactgcgatttttgtgtttatccttagcctcctgttctgctgttatctcatcagattacgccaccaagcccacaaggaattctatgcatacaaacaggtcatcctgaaggagaaagttaaggagctgaaccttcatgaactttgcgcagtgtgtcttgaagacttcaagccacgggacgagctggggatctgtccctgcaagcacgctttccatcgcaaatgtctcataaaatggctggaggtgagaaaagtctgtccgctgtgcaatatgcctgtgctgcaactggcgcaactccatagcaaacaagacagaggaccaccccagggaccactgccgggagccgagaatatagtgtag

SEQ ID NO: 49270 - DNA, 447 bp, Artificial Sequence
  derived and/or modified sequence
atgtcatcggacttccctcattacaattttaggatgcccaacattggttttcagaacctcccactcaatatatacatcgtggtgtttgggactgcaattttcgtatttatcctctctttgcttttctgttgctatttgataagactccgacatcaggcacacaaggagttctatgcttacaagcaggttatcctaaaggagaaagtcaaggagctgaacctccacgagctctgcgcagtatgcttagaagactttaaacctcgcgatgaactcggaatttgcccatgtaaacacgcctttcatcgtaagtgtctcatcaagtggctcgaggtcagaaaggtttgccctctttgcaacatgccagtcttgcaattagcccagctacactctaagcaagaccgcggtcctccgcaggggcctctgccaggcgcagagaatattgtgtag

SEQ ID NO: 49271 - DNA, 447 bp, Artificial Sequence
  derived and/or modified sequence
atgagctctgatttcccacattacaacttccgcatgcctaatatcggttttcagaatcttcccctaaacatttacatagtcgtctttgggactgcaatcttcgtgtttattctttccttgttgttctgctgttatcttattagacttcggcaccaagctcacaaggagttctacgcttacaaacaagtaatacttaaagagaaggtgaaggagttaaacctgcacgaactctgtgcggtctgcctggaggactttaaaccccgagacgaactggggatttgcccatgtaagcacgccttccaccggaagtgcctcatcaagtggctggaggtccgcaaagtgtgcccactgtgtaatatgccagtattgcagttagcacagttgcatagcaaacaggacagagggcctcctcagggccctctccccggagcagaaaatatcgtctag

SEQ ID NO: 49272 - DNA, 447 bp, Artificial Sequence
  derived and/or modified sequence
atgagcagcgacttcccccactacaacttcagaatgcccaacatcggcttccagaacctgcccctgaacatctacatcgtggtgttcggcaccgccatcttcgtgttcatcctgagcctgctgttctgctgctacctgatcagactgagacaccaggcccacaaggagttctacgcctacaagcaggtgatcctgaaggagaaggtgaaggagctgaacctgcacgagctgtgcgccgtgtgcctggaggacttcaagcccagagacgagctgggcatctgcccctgcaagcacgccttccacagaaagtgcctgatcaagtggctggaggtgagaaaggtgtgccccctgtgcaacatgcccgtgctgcagctggcccagctgcacagcaagcaggacagaggccccccccagggccccctgcccggcgccgagaacatcgtgtag

SEQ ID NO: 49273 - protein, 148 aa, Artificial Sequence
  derived and/or modified sequence
MSSDFPHYNFRMPNIGFQNLPLNIYIVVFGTAIFVFILSLLFCCYLIRLRHQAHKEFYAYKQVILKEKVKELNLHELCAVCLEDFKPRDELGICPCKHAFHRKCLIKWLEVRKVCPLCNMPVLQLAQLHSKQDRGPPQGPLPGAENIV

SEQ ID NO: 49274 - protein, 169 aa, Artificial Sequence
  derived and/or modified sequence
MLNKSGESRYPALFPVLGGSSMSSDFPHYNFRMPNIGFQNLPLNIYIVVFGTAIFVFILSLLFCCYLIRLRHQAHKEFYAYKQVILKEKVKELNLHELCAVCLEDFKPRDELGICPCKHAFHRKCLIKWLEVRKVCPLCNMPVLQLAQLHSKQDRGPPQGPLPGAENIV

SEQ ID NO: 49275 - DNA, 3374 bp, Artificial Sequence
  derived and/or modified sequence
gcggccgccgcccccgggctggggtttgggggaccgagccgctccgggttcgggatgctgaggagaccgcgggcccgcgccagcctcccacacacacacactctcccggcgcctcggccggccgggcgcggtgtgcaggggtgaggcggtgtctccaggctgaggagggacgcggaggagggtccggcgcggccccgggactggagggtgagtccctcacaaagggcggagcggggctgtcacctggagatcacggagggaagttcatccatgagctcggatttcccacattacaacttcaggatgcctaatattggattccagaatctgcctctcaacatatatattgtggtttttggtactgctatatttgtcttcatccttagtttactcttctgttgctacttgattaggctaagacatcaagcacacaaagaattttatgcctacaaacaggttatattaaaagagaaagtaaaagaattgaatttacatgagctctgtgcagtgtgcctagaagacttcaagcctcgagatgagttggggatttgcccatgtaagcacgccttccacagaaagtgccttattaagtggctggaggttcgtaaagtgtgtcccctgtgcaacatgccagttctacagctggcccagttgcacagtaagcaggaccgtggaccccctcaggggccccttcctggggcagagaacattgtatagcttaccgcaaggatcagactgttgctggacacgacgtctgtgtggagccaggaggaacacatgtggtgtctgtatggctgctctctacctaggacaccagctgccacttcttttgcctcatgaagaactcttgggccagccaaactgggaacctaggtgtctgggtcttgtgacaaccaaagcactttgacactaccccctgccgagagaagaggagtggatgagcctgcgggtttgcctcaagaaacttcatgagggtctcttactaactccattacactctctctcctggagcctcatctccatgtcaagcaggagggtaaagaagggaactaagagcaggtctttcaagccacacccccacctgcggatggatgggtttctctgtaggccatgcaggcctttgtcgcagcaaaccttcccagcagcccttgagccaagtaaaaccagcacaaccagccaccagtggttggtgaggcagtgcccacaaggctcatgttgtatgcctttgataaggccatcttggctttgagtagcagtgttcctcgtcacccatttccccctcaggattacaacacctgctatcaaatcatctaagctgaaaacatgagatgcgcttggaaaggcctagtcagaagccatttcctcttatcatttccctctcctatgcaccagtaaggcccgtccagagccccagcagggagtgggccctgagtccacactgtccctgagtgatccaggaggctgcccacatccccacatgtgcactgtggttccagtgtagctgctgtgagcccactgccactgcctcagaagggagccactgtgaacctctcgagtggctccaaagagcagtggctttttgagaatggcccatacttctggcccggctggatgaagggaatgccgaccctttggcctctccccctccttccatctcttctctctcttgccctatctctctttctacttcagaaaaaaaaaaaaaaaaaaaaaaaagcctgtcattcactttttaacactttatcccaaataagatccctgtgtaattctgaagctggtgatccacttggaattgtagatagtttcaggaagctcctgcagggctgtccaccgttggtgtgtgcctcagtatttggacttccgaaactgaaagtgaaagtgtctttataggagagaaacgcatgctgctctttggctctttctgtccaacttttctagaaatgactcaaagtccattaagatttgtgaatattgtataaattagctatggaaagtagcaggtcagatggaaaattcttttccacagccctgctctccgcctccctccatcttaggagcgcctgcctcaattcctcgtcaactgctttgctccactccatcccacaggtgtgagtgggggaagtttttcattaggaatacagtctgcgtgacatggagaatggatggagggagctttgctactctgctcttggcatgactccaggatttttttctggaatccaacctctgtcctcttaggagaaggaacctgtccttggttcagatggctgggcatgaggaggaaaatttccattagtgtagaacagtgctggacagaatccggtttggaaaattacaaatccagttggtcaaaataggccatttcctatgtgtgacctattcgtggtatgccaactggactgcttcctaaacaggacgaggaaagtgaggaatatttttatatgaaagccttagcctgtctggcacccatgaaaaaaactatttatgcactcctactttcaccgtctttttgcattctctatttgtagcacaacagagttgaatgccacaaaacaccccgtttatagtgagctgttttcagtgaccaatatcagaaggaggcttgcttctggactagcctcactaattgccagcagccaccattttccatggaatggccttgggacagatgtcacctctgttatggggctctaataggaaagagaatgttttttcccttcctatgatcaatactgcaaattattgctgctcacagcttttataggattctcccaactgaaagttgcaggctttttctgtccctgtgcatcagtactaacaaaagacagcctcaccaagtctgtatatttgaacagaggcaagttaattcatccccccgtgtcagagccacaggcatgttgagggggttgatacgtagcactggaccagggcgcaaagcccagatagttccagccatgagaggagagcacaagaatgctctgcactctgcactcagcaccaccttgggtctgctttgcccagatgagggaccactaacaaccttctcagcacatgtgaatgtggactggttttaaaatgcattcattctgctaggattgggctggaagctggaacagtgagagtactttttctgctcctagtcatctccctttctcagcgtgacatcctcctgcagcaagcctagtatcactagcagtagttcctgcgactcttagcaacacaacccgaatatttgctccctgcatctgggtcctccaccaggatgggcctgcgcatctgcattgctgtacagacaaacaggccttttaatttacatcctcctttaattctcattaaaatcgcagggtttttgtttgaaaaaaaaaaaaaaaaaa

SEQ ID NO: 49276 - DNA, 510 bp, Artificial Sequence
  derived and/or modified sequence
atgctaaacaagtccggagaatcccgctacccggcactttttcctgtgttaggaggctcctcaatgtctagtgactttccacattacaactttagaatgcctaatataggattccagaatttacccctgaatatatacatcgtggtgtttggaactgccatatttgtgttcatattgtcgctcctgttttgttgctatttgattcggcttcgacaccaggcccataaggagttttacgcttataaacaagtgatcttaaaggaaaaggtgaaagaactcaatcttcatgaactctgcgcagtgtgtctggaggactttaaaccccgagacgagctgggaatctgcccctgcaagcacgccttccacagaaaatgcctgatcaagtggctggaagtgagaaaggtgtgccccttgtgcaatatgcctgttttgcaacttgcccaactgcattcgaaacaagaccggggtcccccacagggtccccttccaggagccgagaatattgtgtag

SEQ ID NO: 49277 - DNA, 510 bp, Artificial Sequence
  derived and/or modified sequence
atgctgaacaagtccggcgaatctaggtatccagccctgttcccagtactggggggaagtagtatgagcagcgatttcccccattataatttcagaatgcccaatattggcttccaaaatctcccattgaacatttatattgtggtgttcggaactgcgattttcgtgttcatcttaagcctgctgttttgttgttacctgatcagattgcgacaccaagcccataaagaattttacgcttataaacaagtcattctcaaggagaaggttaaggagctgaacctgcacgagctgtgcgccgtgtgccttgaagactttaagcctagagacgaactgggaatttgtccatgtaagcacgctttccacagaaagtgcttgatcaagtggttagaggtgagaaaagtgtgtcctctgtgtaacatgccagtcttacaactggctcagctccactccaaacaggaccggggcccaccgcaggggcccctcccaggtgcagagaacattgtttag

SEQ ID NO: 49278 - DNA, 510 bp, Artificial Sequence
  derived and/or modified sequence
atgctgaacaagtctggagagagccgctacccagccctcttccctgtgctgggcggcagctccatgagcagtgacttcccccactacaacttcaggatgcccaacatcggcttccagaacctgcccctgaacatctacatcgtggtgtttggaacagccatctttgtgttcatcctgagcctgctcttctgctgctacctgatccggctgcggcaccaggcccacaaggagttctacgcctacaagcaggtgatcctgaaggagaaggtgaaggagctgaacctgcacgagctgtgtgctgtgtgcctggaggacttcaagcccagagatgagctgggcatctgcccctgcaagcacgccttccacaggaagtgcctgatcaagtggctggaggtgaggaaggtgtgccccctgtgcaacatgcctgtgctgcagctggcccagctgcacagcaagcaggaccggggccccccccagggccccctgcctggagctgagaacatcgtgtag

SEQ ID NO: 49279 - DNA, 510 bp, Artificial Sequence
  derived and/or modified sequence
atgctgaacaagagcggcgagagccggtaccccgccctgttccccgtgctgggaggcagttccatgtcaagcgatttcccccactacaactttcgcatgccaaatattggtttccagaatctgcctctcaacatctacattgtcgtgtttggaacggccatcttcgtcttcatcctgtcccttctgttctgttgctatctgatcagactcaggcatcaggctcacaaagaattctatgcctacaagcaggtcatattaaaagagaaggtcaaagaactgaacctccacgagctgtgcgcggtctgcctcgaagacttcaaaccccgggatgagctaggaatctgtccgtgtaaacatgcctttcaccgcaaatgtttaattaaatggctcgaagttcgcaaggtgtgtcctctctgcaacatgcccgttctacagctggcccagctgcatagcaagcaggaccgcggacccccccagggtccattaccaggtgccgaaaacatcgtctag

SEQ ID NO: 49280 - DNA, 510 bp, Artificial Sequence
  derived and/or modified sequence
atgctgaacaagagcggcgagagccggtaccccgccctgttccccgttttaggaggctctagcatgtcctccgactttcctcactataatttcaggatgcctaatataggtttccaaaatttgccactgaacatatatattgttgtatttgggacagctatcttcgtgtttattctgtcacttttgttctgttgttacctgattagactcagacatcaagctcataaggagttctatgcgtacaaacaggttatattgaaggagaaggtcaaggaattaaatctacacgagctgtgtgcagtgtgcctggaggatttcaagcccagagacgagcttgggatatgtccttgcaagcacgcatttcatcgcaagtgtctgattaaatggttggaagtgagaaaggtgtgtcccctgtgcaacatgcctgttctgcaacttgcacagctccattccaagcaggatcgcgggcctcctcaaggcccactgcccggtgctgaaaacatcgtatag

SEQ ID NO: 49281 - DNA, 510 bp, Artificial Sequence
  derived and/or modified sequence
atgctgaacaaatccggtgaatccagatatcccgcattattccccgtgcttgggggatcttcaatgtcctctgacttcccgcactacaattttcgcatgcccaacatagggtttcaaaatctgcccctcaacatctatattgtcgtctttggtactgccatttttgtctttatcctgtcgctcttattctgctgctacctgatccgtctgagacaccaggcccataaagaattttatgcctacaagcaagtgatcctgaaggaaaaggtcaaggagttgaacctgcatgagctttgtgctgtgtgccttgaggattttaaacccagggacgagttaggcatttgcccgtgcaagcacgcttttcatcgaaagtgtttaattaaatggctggaagtgcgcaaggtgtgtccgctgtgcaatatgcctgtccttcagctggcacaactccacagcaagcaagacagagggccaccacagggccctctgccaggtgcggaaaatattgtatag

SEQ ID NO: 49282 - DNA, 510 bp, Artificial Sequence
  derived and/or modified sequence
atgctcaacaagtcgggggaatcgcgctaccccgcacttttccccgtcctcggaggttccagcatgtcatccgacttccctcattacaactttcgcatgccgaatatcggcttccaaaacttgccgctgaatatctatatcgtggtgtttggaacggcaatctttgtgtttattctttcattgctgttttgctgctacctcattcgcctgcggcatcaggcccataaggagttctatgcctacaagcaggtcatcctgaaggaaaaggttaaggaactcaaccttcacgagctttgcgctgtatgtctggaagattttaagcctcgggacgaactcggcatttgcccctgcaaacacgctttccaccgaaaatgtctgattaagtggttagaggttcgcaaggtatgccccctatgcaacatgcccgtgctgcaactcgcccaattacactccaagcaggaccgaggaccccctcagggccctctcccaggcgcagagaacatcgtgtag

SEQ ID NO: 49283 - DNA, 3341 bp, Artificial Sequence
  derived and/or modified sequence
ctggggtttgggggaccgagccgctccgggttcgggatgctgaggagaccgcgggcccgcgccagcctcccacacacacacactctcccggcgcctcggccggccgggcgcggtgtgcaggggtgaggcggtgtctccaggctgaggagggacgcggaggagggtccggcgcggccccgggactggagggtgagtccctcacaaagggcggagcggggctgtcacctggagatcacggagggaagttcatccatgagctcggatttcccacattacaacttcaggatgcctaatattggattccagaatctgcctctcaacatatatattgtggtttttggtactgctatatttgtcttcatccttagtttactcttctgttgctacttgattaggctaagacatcaagcacacaaagaattttatgcctacaaacaggttatattaaaagagaaagtaaaagaattgaatttacatgagctctgtgcagtgtgcctagaagacttcaagcctcgagatgagttggggatttgcccatgtaagcacgccttccacagaaagtgccttattaagtggctggaggttcgtaaagtgtgtcccctgtgcaacatgccagttctacagctggcccagttgcacagtaagcaggaccgtggaccccctcaggggccccttcctggggcagagaacattgtatagcttaccgcaaggatcagactgttgctggacacgacgtctgtgtggagccaggaggaacacatgtggtgtctgtatggctgctctctacctaggacaccagctgccacttcttttgcctcatgaagaactcttgggccagccaaactgggaacctaggtgtctgggtcttgtgacaaccaaagcactttgacactaccccctgccgagagaagaggagtggatgagcctgcgggtttgcctcaagaaacttcatgagggtctcttactaactccattacactctctctcctggagcctcatctccatgtcaagcaggagggtaaagaagggaactaagagcaggtctttcaagccacacccccacctgcggatggatgggtttctctgtaggccatgcaggcctttgtcgcagcaaaccttcccagcagcccttgagccaagtaaaaccagcacaaccagccaccagtggttggtgaggcagtgcccacaaggctcatgttgtatgcctttgataaggccatcttggctttgagtagcagtgttcctcgtcacccatttccccctcaggattacaacacctgctatcaaatcatctaagctgaaaacatgagatgcgcttggaaaggcctagtcagaagccatttcctcttatcatttccctctcctatgcaccagtaaggcccgtccagagccccagcagggagtgggccctgagtccacactgtccctgagtgatccaggaggctgcccacatccccacatgtgcactgtggttccagtgtagctgctgtgagcccactgccactgcctcagaagggagccactgtgaacctctcgagtggctccaaagagcagtggctttttgagaatggcccatacttctggcccggctggatgaagggaatgccgaccctttggcctctccccctccttccatctcttctctctcttgccctatctctctttctacttcagaaaaaaaaaaaaaaaaaaaaaaaagcctgtcattcactttttaacactttatcccaaataagatccctgtgtaattctgaagctggtgatccacttggaattgtagatagtttcaggaagctcctgcagggctgtccaccgttggtgtgtgcctcagtatttggacttccgaaactgaaagtgaaagtgtctttataggagagaaacgcatgctgctctttggctctttctgtccaacttttctagaaatgactcaaagtccattaagatttgtgaatattgtataaattagctatggaaagtagcaggtcagatggaaaattcttttccacagccctgctctccgcctccctccatcttaggagcgcctgcctcaattcctcgtcaactgctttgctccactccatcccacaggtgtgagtgggggaagtttttcattaggaatacagtctgcgtgacatggagaatggatggagggagctttgctactctgctcttggcatgactccaggatttttttctggaatccaacctctgtcctcttaggagaaggaacctgtccttggttcagatggctgggcatgaggaggaaaatttccattagtgtagaacagtgctggacagaatccggtttggaaaattacaaatccagttggtcaaaataggccatttcctatgtgtgacctattcgtggtatgccaactggactgcttcctaaacaggacgaggaaagtgaggaatatttttatatgaaagccttagcctgtctggcacccatgaaaaaaactatttatgcactcctactttcaccgtctttttgcattctctatttgtagcacaacagagttgaatgccacaaaacaccccgtttatagtgagctgttttcagtgaccaatatcagaaggaggcttgcttctggactagcctcactaattgccagcagccaccattttccatggaatggccttgggacagatgtcacctctgttatggggctctaataggaaagagaatgttttttcccttcctatgatcaatactgcaaattattgctgctcacagcttttataggattctcccaactgaaagttgcaggctttttctgtccctgtgcatcagtactaacaaaagacagcctcaccaagtctgtatatttgaacagaggcaagttaattcatccccccgtgtcagagccacaggcatgttgagggggttgatacgtagcactggaccagggcgcaaagcccagatagttccagccatgagaggagagcacaagaatgctctgcactctgcactcagcaccaccttgggtctgctttgcccagatgagggaccactaacaaccttctcagcacatgtgaatgtggactggttttaaaatgcattcattctgctaggattgggctggaagctggaacagtgagagtactttttctgctcctagtcatctccctttctcagcgtgacatcctcctgcagcaagcctagtatcactagcagtagttcctgcgactcttagcaacacaacccgaatatttgctccctgcatctgggtcctccaccaggatgggcctgcgcatctgcattgctgtacagacaaacaggccttttaatttacatcctcctttaattctcattaaaatcgcagggtttttgtttgaaa

SEQ ID NO: 49284 - DNA, 3149 bp, Artificial Sequence
  derived and/or modified sequence
atgttgaataagagtggtgagagcagatatcctgccttgttcccggtcttagggggttcatccatgagctcggatttcccacattacaacttcaggatgcctaatattggattccagaatctgcctctcaacatatatattgtggtttttggtactgctatatttgtcttcatccttagtttactcttctgttgctacttgattaggctaagacatcaagcacacaaagaattttatgcctacaaacaggttatattaaaagagaaagtaaaagaattgaatttacatgagctctgtgcagtgtgcctagaagacttcaagcctcgagatgagttggggatttgcccatgtaagcacgccttccacagaaagtgccttattaagtggctggaggttcgtaaagtgtgtcccctgtgcaacatgccagttctacagctggcccagttgcacagtaagcaggaccgtggaccccctcaggggccccttcctggggcagagaacattgtatagcttaccgcaaggatcagactgttgctggacacgacgtctgtgtggagccaggaggaacacatgtggtgtctgtatggctgctctctacctaggacaccagctgccacttcttttgcctcatgaagaactcttgggccagccaaactgggaacctaggtgtctgggtcttgtgacaaccaaagcactttgacactaccccctgccgagagaagaggagtggatgagcctgcgggtttgcctcaagaaacttcatgagggtctcttactaactccattacactctctctcctggagcctcatctccatgtcaagcaggagggtaaagaagggaactaagagcaggtctttcaagccacacccccacctgcggatggatgggtttctctgtaggccatgcaggcctttgtcgcagcaaaccttcccagcagcccttgagccaagtaaaaccagcacaaccagccaccagtggttggtgaggcagtgcccacaaggctcatgttgtatgcctttgataaggccatcttggctttgagtagcagtgttcctcgtcacccatttccccctcaggattacaacacctgctatcaaatcatctaagctgaaaacatgagatgcgcttggaaaggcctagtcagaagccatttcctcttatcatttccctctcctatgcaccagtaaggcccgtccagagccccagcagggagtgggccctgagtccacactgtccctgagtgatccaggaggctgcccacatccccacatgtgcactgtggttccagtgtagctgctgtgagcccactgccactgcctcagaagggagccactgtgaacctctcgagtggctccaaagagcagtggctttttgagaatggcccatacttctggcccggctggatgaagggaatgccgaccctttggcctctccccctccttccatctcttctctctcttgccctatctctctttctacttcagaaaaaaaaaaaaaaaaaaaaaaaagcctgtcattcactttttaacactttatcccaaataagatccctgtgtaattctgaagctggtgatccacttggaattgtagatagtttcaggaagctcctgcagggctgtccaccgttggtgtgtgcctcagtatttggacttccgaaactgaaagtgaaagtgtctttataggagagaaacgcatgctgctctttggctctttctgtccaacttttctagaaatgactcaaagtccattaagatttgtgaatattgtataaattagctatggaaagtagcaggtcagatggaaaattcttttccacagccctgctctccgcctccctccatcttaggagcgcctgcctcaattcctcgtcaactgctttgctccactccatcccacaggtgtgagtgggggaagtttttcattaggaatacagtctgcgtgacatggagaatggatggagggagctttgctactctgctcttggcatgactccaggatttttttctggaatccaacctctgtcctcttaggagaaggaacctgtccttggttcagatggctgggcatgaggaggaaaatttccattagtgtagaacagtgctggacagaatccggtttggaaaattacaaatccagttggtcaaaataggccatttcctatgtgtgacctattcgtggtatgccaactggactgcttcctaaacaggacgaggaaagtgaggaatatttttatatgaaagccttagcctgtctggcacccatgaaaaaaactatttatgcactcctactttcaccgtctttttgcattctctatttgtagcacaacagagttgaatgccacaaaacaccccgtttatagtgagctgttttcagtgaccaatatcagaaggaggcttgcttctggactagcctcactaattgccagcagccaccattttccatggaatggccttgggacagatgtcacctctgttatggggctctaataggaaagagaatgttttttcccttcctatgatcaatactgcaaattattgctgctcacagcttttataggattctcccaactgaaagttgcaggctttttctgtccctgtgcatcagtactaacaaaagacagcctcaccaagtctgtatatttgaacagaggcaagttaattcatccccccgtgtcagagccacaggcatgttgagggggttgatacgtagcactggaccagggcgcaaagcccagatagttccagccatgagaggagagcacaagaatgctctgcactctgcactcagcaccaccttgggtctgctttgcccagatgagggaccactaacaaccttctcagcacatgtgaatgtggactggttttaaaatgcattcattctgctaggattgggctggaagctggaacagtgagagtactttttctgctcctagtcatctccctttctcagcgtgacatcctcctgcagcaagcctagtatcactagcagtagttcctgcgactcttagcaacacaacccgaatatttgctccctgcatctgggtcctccaccaggatgggcctgcgcatctgcattgctgtacagacaaacaggccttttaatttacatcctcctttaattctcattaaaatcgcagggtttttgtttg

SEQ ID NO: 49285 - DNA, 3295 bp, Artificial Sequence
  derived and/or modified sequence
ggccgccgggcgcagtcagccgccgccacctccgccgcgctctgtccggacggacgctcgccgcccgcagcctgccgcccgccgcagggcgctgacggtcccgcacgtctgccgctgccaccggcgcgcccgaaacttccagcactatgttgaataagagtggtgagagcagatatcctgccttgttcccggtcttagggggttcatccatgagctcggatttcccacattacaacttcaggatgcctaatattggattccagaatctgcctctcaacatatatattgtggtttttggtactgctatatttgtcttcatccttagtttactcttctgttgctacttgattaggctaagacatcaagcacacaaagaattttatgcctacaaacaggttatattaaaagagaaagtaaaagaattgaatttacatgagctctgtgcagtgtgcctagaagacttcaagcctcgagatgagttggggatttgcccatgtaagcacgccttccacagaaagtgccttattaagtggctggaggttcgtaaagtgtgtcccctgtgcaacatgccagttctacagctggcccagttgcacagtaagcaggaccgtggaccccctcaggggccccttcctggggcagagaacattgtatagcttaccgcaaggatcagactgttgctggacacgacgtctgtgtggagccaggaggaacacatgtggtgtctgtatggctgctctctacctaggacaccagctgccacttcttttgcctcatgaagaactcttgggccagccaaactgggaacctaggtgtctgggtcttgtgacaaccaaagcactttgacactaccccctgccgagagaagaggagtggatgagcctgcgggtttgcctcaagaaacttcatgagggtctcttactaactccattacactctctctcctggagcctcatctccatgtcaagcaggagggtaaagaagggaactaagagcaggtctttcaagccacacccccacctgcggatggatgggtttctctgtaggccatgcaggcctttgtcgcagcaaaccttcccagcagcccttgagccaagtaaaaccagcacaaccagccaccagtggttggtgaggcagtgcccacaaggctcatgttgtatgcctttgataaggccatcttggctttgagtagcagtgttcctcgtcacccatttccccctcaggattacaacacctgctatcaaatcatctaagctgaaaacatgagatgcgcttggaaaggcctagtcagaagccatttcctcttatcatttccctctcctatgcaccagtaaggcccgtccagagccccagcagggagtgggccctgagtccacactgtccctgagtgatccaggaggctgcccacatccccacatgtgcactgtggttccagtgtagctgctgtgagcccactgccactgcctcagaagggagccactgtgaacctctcgagtggctccaaagagcagtggctttttgagaatggcccatacttctggcccggctggatgaagggaatgccgaccctttggcctctccccctccttccatctcttctctctcttgccctatctctctttctacttcagaaaaaaaaaaaaaaaaaaaaaaaagcctgtcattcactttttaacactttatcccaaataagatccctgtgtaattctgaagctggtgatccacttggaattgtagatagtttcaggaagctcctgcagggctgtccaccgttggtgtgtgcctcagtatttggacttccgaaactgaaagtgaaagtgtctttataggagagaaacgcatgctgctctttggctctttctgtccaacttttctagaaatgactcaaagtccattaagatttgtgaatattgtataaattagctatggaaagtagcaggtcagatggaaaattcttttccacagccctgctctccgcctccctccatcttaggagcgcctgcctcaattcctcgtcaactgctttgctccactccatcccacaggtgtgagtgggggaagtttttcattaggaatacagtctgcgtgacatggagaatggatggagggagctttgctactctgctcttggcatgactccaggatttttttctggaatccaacctctgtcctcttaggagaaggaacctgtccttggttcagatggctgggcatgaggaggaaaatttccattagtgtagaacagtgctggacagaatccggtttggaaaattacaaatccagttggtcaaaataggccatttcctatgtgtgacctattcgtggtatgccaactggactgcttcctaaacaggacgaggaaagtgaggaatatttttatatgaaagccttagcctgtctggcacccatgaaaaaaactatttatgcactcctactttcaccgtctttttgcattctctatttgtagcacaacagagttgaatgccacaaaacaccccgtttatagtgagctgttttcagtgaccaatatcagaaggaggcttgcttctggactagcctcactaattgccagcagccaccattttccatggaatggccttgggacagatgtcacctctgttatggggctctaataggaaagagaatgttttttcccttcctatgatcaatactgcaaattattgctgctcacagcttttataggattctcccaactgaaagttgcaggctttttctgtccctgtgcatcagtactaacaaaagacagcctcaccaagtctgtatatttgaacagaggcaagttaattcatccccccgtgtcagagccacaggcatgttgagggggttgatacgtagcactggaccagggcgcaaagcccagatagttccagccatgagaggagagcacaagaatgctctgcactctgcactcagcaccaccttgggtctgctttgcccagatgagggaccactaacaaccttctcagcacatgtgaatgtggactggttttaaaatgcattcattctgctaggattgggctggaagctggaacagtgagagtactttttctgctcctagtcatctccctttctcagcgtgacatcctcctgcagcaagcctagtatcactagcagtagttcctgcgactcttagcaacacaacccgaatatttgctccctgcatctgggtcctccaccaggatgggcctgcgcatctgcattgctgtacagacaaacaggccttttaatttacatcctcctttaattctcattaaaatcgcagggtttttgtttg

SEQ ID NO: 49286 - DNA, 510 bp, Artificial Sequence
  derived and/or modified sequence
atgctgaacaagagcggcgagagcagataccccgccctgttccccgtgctgggcggcagcagcatgagcagcgacttcccccactacaacttcagaatgcccaacatcggcttccagaacctgcccctgaacatctacatcgtggtgttcggcaccgccatcttcgtgttcatcctgagcctgctgttctgctgctacctgatcagactgagacaccaggcccacaaggagttctacgcctacaagcaggtgatcctgaaggagaaggtgaaggagctgaacctgcacgagctgtgcgccgtgtgcctggaggacttcaagcccagagacgagctgggcatctgcccctgcaagcacgccttccacagaaagtgcctgatcaagtggctggaggtgagaaaggtgtgccccctgtgcaacatgcccgtgctgcagctggcccagctgcacagcaagcaggacagaggccccccccagggccccctgcccggcgccgagaacatcgtgtag

SEQ ID NO: 49287 - protein, 1125 aa, Artificial Sequence
  derived and/or modified sequence
MVLAAAMSQDADPSGPEQPDRVACSVPGARASPAPSGPRGMQQPPPPPQPPPPPQAGLPQIIQNAAKLLDKNPFSVSNPNPLLPSPASLQLAQLQAQLTLHRLKLAQTAVTNNTAAATVLNQVLSKVAMSQPLFNQLRHPSVITGPHGHAGVPQHAAAIPSTRFPSNAIAFSPPSQTRGPGPSMNLPNQPPSAMVMHPFTGVMPQTPGQPAVILGIGKTGPAPATAGFYEYGKASSGQTYGPETDGQPGFLPSSASTSGSVTYEGHYSHTGQDGQAAFSKDFYGPNSQGSHVASGFPAEQAGGLKSEVGPLLQGTNSQWESPHGFSGQSKPDLTAGPMWPPPHNQPYELYDPEEPTSDRTPPSFGGRLNNSKQGFIGAGRRAKEDQALLSVRPLQAHELNDFHGVAPLHLPHICSICDKKVFDLKDWELHVKGKLHAQKCLVFSENAGIRCILGSAEGTLCASPNSTAVYNPAGNEDYASNLGTSYVPIPARSFTQSSPTFPLASVGTTFAQRKGAGRVVHICNLPEGSCTENDVINLGLPFGKVTNYILMKSTNQAFLEMAYTEAAQAMVQYYQEKSAVINGEKLLIRMSKRYKELQLKKPGKAVAAIIQDIHSQRERDMFREADRYGPERPRSRSPVSRSLSPRSHTPSFTSCSSSHSPPGPSRADWGNGRDSWEHSPYARREEERDPAPWRDNGDDKRDRMDPWAHDRKHHPRQLDKAELDERPEGGRPHREKYPRSGSPNLPHSVSSYKSREDGYYRKEPKAKWDKYLKQQQDAPGRSRRKDEARLRESRHPHPDDSGKEDGLGPKVTRAPEGAKAKQNEKNKTKRTDRDQEGADDRKENTMAENEAGKEEQEGMEESPQSVGRQEKEAEFSDPENTRTKKEQDWESESEAEGESWYPTNMEELVTVDEVGEEEDFIVEPDIPELEEIVPIDQKDKICPETCLCVTTTLDLDLAQDFPKEGVKAVGNGAAEISLKSPRELPSASTSCPSDMDVEMPGLNLDAERKPAESETGLSLEDSDCYEKEAKGVESSDVHPAPTVQQMSSPKPAEERARQPSPFVDDCKTRGTPEDGACEGSPLEEKASPPIETDLQNQACQGSDSDTRLVSGYSLTPLEKTPGTWK

SEQ ID NO: 49288 - protein, 1227 aa, Artificial Sequence
  derived and/or modified sequence
MVLAAAMSQDADPSGPEQPDRVACSVPGARASPAPSGPRGMQQPPPPPQPPPPPQAGLPQIIQNAAKLLDKNPFSVSNPNPLLPSPASLQLAQLQAQLTLHRLKLAQTAVTNNTAAATVLNQVLSKVAMSQPLFNQLRHPSVITGPHGHAGVPQHAAAIPSTRFPSNAIAFSPPSQTRGPGPSMNLPNQPPSAMVMHPFTGVMPQTPGQPAVILGIGKTGPAPATAGFYEYGKASSGQTYGPETDGQPGFLPSSASTSGSVTYEGHYSHTGQDGQAAFSKDFYGPNSQGSHVASGFPAEQAGGLKSEVGPLLQGTNSQWESPHGFSGQSKPDLTAGPMWPPPHNQPYELYDPEEPTSDRTPPSFGGRLNNSKQGFIGAGRRAKEDQALLSVRPLQAHELNDFHGVAPLHLPHICSICDKKVFDLKDWELHVKGKLHAQKCLVFSENAGIRCILGSAEGTLCASPNSTAVYNPAGNEDYASNLGTSYVPIPARSFTQSSPTFPLASVGTTFAQRKGAGRVVHICNLPEGSCTENDVINLGLPFGKVTNYILMKSTNQAFLEMAYTEAAQAMVQYYQEKSAVINGEKLLIRMSKRYKELQLKKPGKAVAAIIQDIHSQRERDMFREADRYGPERPRSRSPVSRSLSPRSHTPSFTSCSSSHSPPGPSRADWGNGRDSWEHSPYARREEERDPAPWRDNGDDKRDRMDPWAHDRKHHPRQLDKAELDERPEGGRPHREKYPRSGSPNLPHSVSSYKSREDGYYRKEPKAKWDKYLKQQQDAPGRSRRKDEARLRESRHPHPDDSGKEDGLGPKVTRAPEGAKAKQNEKNKTKRTDRDQEGADDRKENTMAENEAGKEEQEGMEESPQSVGRQEKEAEFSDPENTRTKKEQDWESESEAEGESWYPTNMEELVTVDEVGEEEDFIVEPDIPELEEIVPIDQKDKICPETCLCVTTTLDLDLAQDFPKEGVKAVGNGAAEISLKSPRELPSASTSCPSDMDVEMPGLNLDAERKPAESETGLSLEDSDCYEKEAKGVESSDVHPAPTVQQMSSPKPAEERARQPSPFVDDCKTRGTPEDGACEGSPLEEKASPPIETDLQNQACQEVLTPENSRYVEMKSLEVRSPEYTEVELKQPLSLPSWEPEDVFSELSIPLGVEFVVPRTGFYCKLCGLFYTSEETAKMSHCRSAVHYRNLQKYLSQLAEEGLKETEGADSPRPEDSGIVPRFERKKL

SEQ ID NO: 49289 - DNA, 7271 bp, Artificial Sequence
  derived and/or modified sequence
ccgggaccgcccctcccttgagctctctcgccgcgatcccgggcgggtctcgccccgcatggtgctggcagcagccatgagccaggacgcggaccccagcggtccggagcagccggacagagttgcctgcagtgtgcctggtgcccgggcgtccccggcaccctccggcccgcgagggatgcagcagccgccgccgccgccccagccaccgcccccgccccaagccggcctaccccagatcatccaaaatgccgccaagctcctggacaagaacccattctcggtcagtaacccgaaccctctgcttccttcacctgccagtctccagctggctcaactgcaggcccagctcaccctccaccggctgaagctggcacagacagctgtcaccaacaacactgcagccgccacagtcctgaaccaagtcctctccaaagtggccatgtcccagcctctcttcaatcaactgaggcatccgtctgtgatcactggcccccacggccatgctggggttccccaacatgctgcagccatacccagtacccggtttccctctaatgcaattgccttttcaccccccagccagacacgaggccccggaccctccatgaaccttcccaaccagccacccagtgccatggtgatgcatcctttcactggggtaatgcctcagacccctggccagccagcagtcatcttgggcattggcaagactgggcctgctccagctacagcaggattctatgagtatggcaaagccagctctggccagacatatggccctgaaacagatggtcagcctggcttcctgccatcctcggcctcaacctcgggcagtgtgacctatgaagggcactacagccacacagggcaggatggtcaagctgccttttccaaagatttttacggacccaactcccaaggttcacatgtggccagcggatttccagctgagcaggctgggggcctgaaaagtgaggtcgggccactgctgcagggcacaaacagccaatgggagagcccccatggattctcgggccaaagcaagcctgatctcacagcaggtcccatgtggcctccaccccacaaccagccctatgagctgtacgaccccgaggaaccaacctcagacaggacacctccttccttcgggggtcggcttaacaacagcaaacagggttttatcggtgctgggcggagggccaaggaggaccaggcgttgctatctgtgcggcccctgcaggctcatgagctgaacgactttcacggtgtggcccccctccacttgccgcatatctgtagcatctgtgacaagaaggtgtttgatttgaaggactgggagctgcatgtgaaagggaagctgcacgctcagaaatgcctggtcttctctgaaaatgctggcatccggtgtatacttggttcggcagagggaacattgtgtgcttctcccaacagcacagctgtttataaccctgctgggaatgaagattatgcctcaaatcttggaacatcatacgtgcccattccagcaaggtcattcactcagtcaagccccacatttcctttggcttctgtggggacaacttttgcacagcggaaaggggctggccgtgtggtgcacatctgcaatctccctgaaggaagctgcactgagaatgacgtcattaacctggggctgccctttggaaaggtcactaattacatcctcatgaagtcgactaatcaggcctttttagagatggcttacacagaagctgcacaggccatggtccagtattatcaagaaaaatctgctgtgatcaatggtgagaagttgctcattcggatgtccaagagatacaaggaattgcagctcaagaaacccgggaaggccgtggctgccatcatccaggacatccattcccagagggagagggacatgttccgggaagcagacagatatggcccagaaaggccgcggtctcgtagtccggtgagccggtcactctccccgaggtcccacactcccagcttcacctcctgcagctcttcccacagccctccgggcccctcccgggctgactggggcaatggccgggactcctgggagcactctccctatgccaggagggaggaagagcgagacccggctccctggagggacaacggagatgacaagagggacaggatggacccctgggcacatgatcgcaaacaccacccccggcaactggacaaggctgagttggacgagcgaccagaaggagggaggccccaccgggagaagtacccgagatctgggtctcccaacctgccccactctgtgtccagctacaaaagccgtgaagacggctactaccggaaagagcccaaagccaagtgggacaagtatctgaagcagcagcaggatgcccccgggaggtccaggaggaaagacgaggccaggctgcgggaaagcagacacccccatccggatgactcaggcaaggaagatgggctggggccaaaggtcactagggcccctgagggcgccaaggccaagcagaatgagaaaaataaaaccaagagaactgatagagaccaagaaggagctgatgatagaaaagaaaacacaatggcagagaatgaggctggaaaagaggaacaggagggcatggaagaaagccctcaatcagtgggcagacaggagaaagaagcagagttctctgatccggaaaacacaaggacaaagaaggaacaagattgggagagtgaaagtgaggcagagggggagagctggtatcccactaacatggaggagctggtgacagtggacgaggttggggaagaagaagattttatcgtggaaccagacatcccagagctggaagaaattgtgcccattgaccagaaagacaaaatttgcccagaaacatgtctgtgtgtgacaaccaccttagacttagacctggcccaggatttccccaaggaaggagtcaaggccgtagggaatggggctgcagaaatcagcctcaagtcacccagagaactgccctctgcttccacaagctgtcccagtgacatggacgtggaaatgcctggcctaaatctggatgctgagcggaagccagctgaaagtgagacaggcctctccctggaggattcagattgctacgagaaggaggcaaagggagtggagagctcagatgttcatccagcccctacagtccagcaaatgtcttcccctaagccagcagaggagagggcccggcagccaagcccatttgtggatgattgcaagaccagggggacccccgaagatggggcttgtgaaggcagccccctggaggagaaagccagcccccccatcgaaactgacctccaaaaccaagcttgccaagggtctgacagtgatacaagacttgtttcaggatattctctcactccattggagaaaactccaggtacgtggaaatgaaatctctggaggtgaggtcaccagagtacactgaagtggaactgaaacagcccctttctttgccctcttgggaaccagaggatgtgttcagtgaacttagcattcctctaggggtggagttcgtggttcccaggactggcttttattgcaagctgtgtgggctgttctacacgagcgaggagacagcaaagatgagccactgccgcagcgctgtccactacaggaacttacagaaatatttgtcccagctggccgaggagggcctcaaggagaccgagggggcagatagcccgaggccagaggacagcggaatcgtgccacgcttcgaaaggaaaaagctctgatgcttctgcttctgctgctactgctgctgctgcaaggttggaaaggagagcttgctgaagtggggccttcctgattctggggacaggactaaagcctgagaggaaggaaaaccaagcagggcacattgcttgggcttgttcccagagactcagtgaaatgcccctgatatgtctccaggagcaagtcacccaggtgtgtccagcccactgagggtcaccaactctctccctgctgactcttgtttctctcaatctttcaattcgtttttctctcttttcctcttgttctttctctccctccctccttatgtgccaaggatcgtttccttttcacaaaacccaacttctcagggattttcacagtgtttaaattcttggtaggatataacaggtcaggcctagctgagtcaggcaaggaaaaggtttaatggaaactcctgggtcaggcgaacccctgcagtgagtctacagcagtatctctgcctggtgtcccatgtatcccctgcatgaggagctgagtcaggtctgcagtcctggtgaggggacatcacggacaatctgttggcagagctgggagggtcttcattaacctcttcctccaactgggccacccttttgaaaagcccctgtttttaataactgtttcatcctctcagttattctagaaatctgccagacttatgccttaaagtaaaattaaatgaattttagagaagatgaaaagagcccttcattttggaagctctgataagtttcctccaaacttattcccctcctcttgatttcaggagatgtcagggtttttctattctggacaatgaatttggtacagagtcactgtaattaaatataaaaacagaagcatcttcctccagctaaagcagcagttggcgcgggcttaggttgaatgctggcctctctgcaaagcacagctttggctcgagaggcacagctccaggctgtggaaaacagagttgtcttgggggttaaatgagcttatttaagtcaaggaaacatcatctgtccttgattcagccttggtgcctgcactctggggtacaaccacctcacagtaggatggtttttaaatggccccccagttgggggagaagctaaggaaagagaaggctgcagatccaaagagtggcattgaagtttgctgggtgtctgtaggtggaccctttccagctgggcagatagttgagggctccctgggtttgactgtatgtgcagactttgataccaaaatgttatgaaaagtcgtgattcccgctgctctttctggtactggagggtgggtaccttcaggctgtggggtctctagcctgatattccattgaaagggtgtgggataaaggtgctgggggaaatgaggctctgccacagccatagagaggccctcgggcagttaagaagggagcctggagctgttttcatgagcagagatactctcctgaaagcacccttcatagcttagcccaggaaaaataaaacaaggaagacaggtcactctcccctaggcagttcctgttgtttctgttcctgaccttgggcaggcagactgagaagggactgtgtagggttttgttttgttttttttcattttcctttttatggcatgtgagagcatactgtacattctgtcctctgtactaatggaggaagggcagagagattagttcaaggctaacattttatatcaggtaactgaggcacacaaagggaacaaatgaagaacataaaatgatcagtgtaaacctgaaagcacgcagtcattggcaagggacaggctcatgggagctggtgagagagagcagttaaggcaagcaccaggggaaagcagaccaacttgaacagatgtgatgcggagaggttggaagaagcaagaaacctgaactcatcatcaggctattaaataaaatttataggaggctgttggtttggactgagctcctgcaataggcccaacagaccaaaacaaaagggagtcactcatgttgaagttctgtcttccaggaaatcaggagagagagagagagaaagaatagccaaatccccaaacaggccagttttaaccagcatgatgaagtgtccttggttttaacctttataaggaaagcagctttgagatgaccagtctggtttttgttctttgtgtctgctttcctcagcccttttctgtctataaagccaacctcctccgctcagctcatgggaacactcattctattttatagaatgacatgttgcccaattctagaatcaaaaataaaggccaactaagatcttcaaagtaaatttgttgtaattttatcttttgagaagaccatatgggggctgctgaaaagttggtatctcaaataaagtctgaagatcacggctcagcccagattgttcccctggccaactccacaggtttgaacctggcattctggacaccagctatgcctcctccatttctcagaaaacctttgatcttgtgtgtctttcttcctactgaagggaattgtgggggcagttctttggccttcttgctgaactttgctggaaatagcccacaatttttatcagaggttagaactgtacattatcagagagactggacactttatcccctagcaaagtgggagaagattttaccagctcattccactccaccctggccttcccccaccccccatccccagcagcatttccatggaaatccagatggtcgtgtagtgttatggctctcttgtgatagactggccttcatattggagagctagggagagcccctgggagggagagagataaggcgctatctgccttcaatcagaaccttcggtttaaaatcatctaagagtctatacttgtgtgtacatacgtatttatttttatttatttttatacaattccattggcatggtccttcaccgaccctatgatttgcactttttatttctatgtgtgccacacacaatgcagtattaatggcaaccaggtaaatattgatttattttttaaagcttttcttcagtgttttgtcaaccatttcaaagtgtctcccaaaaaaggatgctgaagagcaattgctcccttaagcaacagattcatatttaccctgggttaatacaacaaaaggcctgtataattgtcttttcattgttaacacccaaaatagcatctatctagacagtatccccaaagaatttggaaaatctgatggtgtgagcagcagccgttagtatcagggtttcccattcttggacagtccgaggctgtgacctgttagataattagattatacttgaactggaccagagtttgttttttgaatttatgagaaaaaccaaaacactaagttaagtttgaacttgtaaagtattgaaatttgttgagtgtcctataaattgtcactacttttcctgatctgtataactgactgcaaagtgtttgtttttacaaaagagaaaagaaaagatttttaataaagagaatttgaaagctgt

SEQ ID NO: 49290 - DNA, 7233 bp, Artificial Sequence
  derived and/or modified sequence
ccgggaccgcccctcccttgagctctctcgccgcgatcccgggcgggtctcgccccgcatggtgctggcagcagccatgagccaggacgcggaccccagcggtccggagcagccggacagagttgcctgcagtgtgcctggtgcccgggcgtccccggcaccctccggcccgcgagggatgcagcagccgccgccgccgccccagccaccgcccccgccccaagccggcctaccccagatcatccaaaatgccgccaagctcctggacaagaacccattctcggtcagtaacccgaaccctctgcttccttcacctgccagtctccagctggctcaactgcaggcccagctcaccctccaccggctgaagctggcacagacagctgtcaccaacaacactgcagccgccacagtcctgaaccaagtcctctccaaagtggccatgtcccagcctctcttcaatcaactgaggcatccgtctgtgatcactggcccccacggccatgctggggttccccaacatgctgcagccatacccagtacccggtttccctctaatgcaattgccttttcaccccccagccagacacgaggccccggaccctccatgaaccttcccaaccagccacccagtgccatggtgatgcatcctttcactggggtaatgcctcagacccctggccagccagcagtcatcttgggcattggcaagactgggcctgctccagctacagcaggattctatgagtatggcaaagccagctctggccagacatatggccctgaaacagatggtcagcctggcttcctgccatcctcggcctcaacctcgggcagtgtgacctatgaagggcactacagccacacagggcaggatggtcaagctgccttttccaaagatttttacggacccaactcccaaggttcacatgtggccagcggatttccagctgagcaggctgggggcctgaaaagtgaggtcgggccactgctgcagggcacaaacagccaatgggagagcccccatggattctcgggccaaagcaagcctgatctcacagcaggtcccatgtggcctccaccccacaaccagccctatgagctgtacgaccccgaggaaccaacctcagacaggacacctccttccttcgggggtcggcttaacaacagcaaacagggttttatcggtgctgggcggagggccaaggaggaccaggcgttgctatctgtgcggcccctgcaggctcatgagctgaacgactttcacggtgtggcccccctccacttgccgcatatctgtagcatctgtgacaagaaggtgtttgatttgaaggactgggagctgcatgtgaaagggaagctgcacgctcagaaatgcctggtcttctctgaaaatgctggcatccggtgtatacttggttcggcagagggaacattgtgtgcttctcccaacagcacagctgtttataaccctgctgggaatgaagattatgcctcaaatcttggaacatcatacgtgcccattccagcaaggtcattcactcagtcaagccccacatttcctttggcttctgtggggacaacttttgcacagcggaaaggggctggccgtgtggtgcacatctgcaatctccctgaaggaagctgcactgagaatgacgtcattaacctggggctgccctttggaaaggtcactaattacatcctcatgaagtcgactaatcaggcctttttagagatggcttacacagaagctgcacaggccatggtccagtattatcaagaaaaatctgctgtgatcaatggtgagaagttgctcattcggatgtccaagagatacaaggaattgcagctcaagaaacccgggaaggccgtggctgccatcatccaggacatccattcccagagggagagggacatgttccgggaagcagacagatatggcccagaaaggccgcggtctcgtagtccggtgagccggtcactctccccgaggtcccacactcccagcttcacctcctgcagctcttcccacagccctccgggcccctcccgggctgactggggcaatggccgggactcctgggagcactctccctatgccaggagggaggaagagcgagacccggctccctggagggacaacggagatgacaagagggacaggatggacccctgggcacatgatcgcaaacaccacccccggcaactggacaaggctgagttggacgagcgaccagaaggagggaggccccaccgggagaagtacccgagatctgggtctcccaacctgccccactctgtgtccagctacaaaagccgtgaagacggctactaccggaaagagcccaaagccaagtgggacaagtatctgaagcagcagcaggatgcccccgggaggtccaggaggaaagacgaggccaggctgcgggaaagcagacacccccatccggatgactcaggcaaggaagatgggctggggccaaaggtcactagggcccctgagggcgccaaggccaagcagaatgagaaaaataaaaccaagagaactgatagagaccaagaaggagctgatgatagaaaagaaaacacaatggcagagaatgaggctggaaaagaggaacaggagggcatggaagaaagccctcaatcagtgggcagacaggagaaagaagcagagttctctgatccggaaaacacaaggacaaagaaggaacaagattgggagagtgaaagtgaggcagagggggagagctggtatcccactaacatggaggagctggtgacagtggacgaggttggggaagaagaagattttatcgtggaaccagacatcccagagctggaagaaattgtgcccattgaccagaaagacaaaatttgcccagaaacatgtctgtgtgtgacaaccaccttagacttagacctggcccaggatttccccaaggaaggagtcaaggccgtagggaatggggctgcagaaatcagcctcaagtcacccagagaactgccctctgcttccacaagctgtcccagtgacatggacgtggaaatgcctggcctaaatctggatgctgagcggaagccagctgaaagtgagacaggcctctccctggaggattcagattgctacgagaaggaggcaaagggagtggagagctcagatgttcatccagcccctacagtccagcaaatgtcttcccctaagccagcagaggagagggcccggcagccaagcccatttgtggatgattgcaagaccagggggacccccgaagatggggcttgtgaaggcagccccctggaggagaaagccagcccccccatcgaaactgacctccaaaaccaagcttgccaagaagtgttgaccccggaaaactccaggtacgtggaaatgaaatctctggaggtgaggtcaccagagtacactgaagtggaactgaaacagcccctttctttgccctcttgggaaccagaggatgtgttcagtgaacttagcattcctctaggggtggagttcgtggttcccaggactggcttttattgcaagctgtgtgggctgttctacacgagcgaggagacagcaaagatgagccactgccgcagcgctgtccactacaggaacttacagaaatatttgtcccagctggccgaggagggcctcaaggagaccgagggggcagatagcccgaggccagaggacagcggaatcgtgccacgcttcgaaaggaaaaagctctgatgcttctgcttctgctgctactgctgctgctgcaaggttggaaaggagagcttgctgaagtggggccttcctgattctggggacaggactaaagcctgagaggaaggaaaaccaagcagggcacattgcttgggcttgttcccagagactcagtgaaatgcccctgatatgtctccaggagcaagtcacccaggtgtgtccagcccactgagggtcaccaactctctccctgctgactcttgtttctctcaatctttcaattcgtttttctctcttttcctcttgttctttctctccctccctccttatgtgccaaggatcgtttccttttcacaaaacccaacttctcagggattttcacagtgtttaaattcttggtaggatataacaggtcaggcctagctgagtcaggcaaggaaaaggtttaatggaaactcctgggtcaggcgaacccctgcagtgagtctacagcagtatctctgcctggtgtcccatgtatcccctgcatgaggagctgagtcaggtctgcagtcctggtgaggggacatcacggacaatctgttggcagagctgggagggtcttcattaacctcttcctccaactgggccacccttttgaaaagcccctgtttttaataactgtttcatcctctcagttattctagaaatctgccagacttatgccttaaagtaaaattaaatgaattttagagaagatgaaaagagcccttcattttggaagctctgataagtttcctccaaacttattcccctcctcttgatttcaggagatgtcagggtttttctattctggacaatgaatttggtacagagtcactgtaattaaatataaaaacagaagcatcttcctccagctaaagcagcagttggcgcgggcttaggttgaatgctggcctctctgcaaagcacagctttggctcgagaggcacagctccaggctgtggaaaacagagttgtcttgggggttaaatgagcttatttaagtcaaggaaacatcatctgtccttgattcagccttggtgcctgcactctggggtacaaccacctcacagtaggatggtttttaaatggccccccagttgggggagaagctaaggaaagagaaggctgcagatccaaagagtggcattgaagtttgctgggtgtctgtaggtggaccctttccagctgggcagatagttgagggctccctgggtttgactgtatgtgcagactttgataccaaaatgttatgaaaagtcgtgattcccgctgctctttctggtactggagggtgggtaccttcaggctgtggggtctctagcctgatattccattgaaagggtgtgggataaaggtgctgggggaaatgaggctctgccacagccatagagaggccctcgggcagttaagaagggagcctggagctgttttcatgagcagagatactctcctgaaagcacccttcatagcttagcccaggaaaaataaaacaaggaagacaggtcactctcccctaggcagttcctgttgtttctgttcctgaccttgggcaggcagactgagaagggactgtgtagggttttgttttgttttttttcattttcctttttatggcatgtgagagcatactgtacattctgtcctctgtactaatggaggaagggcagagagattagttcaaggctaacattttatatcaggtaactgaggcacacaaagggaacaaatgaagaacataaaatgatcagtgtaaacctgaaagcacgcagtcattggcaagggacaggctcatgggagctggtgagagagagcagttaaggcaagcaccaggggaaagcagaccaacttgaacagatgtgatgcggagaggttggaagaagcaagaaacctgaactcatcatcaggctattaaataaaatttataggaggctgttggtttggactgagctcctgcaataggcccaacagaccaaaacaaaagggagtcactcatgttgaagttctgtcttccaggaaatcaggagagagagagagagaaagaatagccaaatccccaaacaggccagttttaaccagcatgatgaagtgtccttggttttaacctttataaggaaagcagctttgagatgaccagtctggtttttgttctttgtgtctgctttcctcagcccttttctgtctataaagccaacctcctccgctcagctcatgggaacactcattctattttatagaatgacatgttgcccaattctagaatcaaaaataaaggccaactaagatcttcaaagtaaatttgttgtaattttatcttttgagaagaccatatgggggctgctgaaaagttggtatctcaaataaagtctgaagatcacggctcagcccagattgttcccctggccaactccacaggtttgaacctggcattctggacaccagctatgcctcctccatttctcagaaaacctttgatcttgtgtgtctttcttcctactgaagggaattgtgggggcagttctttggccttcttgctgaactttgctggaaatagcccacaatttttatcagaggttagaactgtacattatcagagagactggacactttatcccctagcaaagtgggagaagattttaccagctcattccactccaccctggccttcccccaccccccatccccagcagcatttccatggaaatccagatggtcgtgtagtgttatggctctcttgtgatagactggccttcatattggagagctagggagagcccctgggagggagagagataaggcgctatctgccttcaatcagaaccttcggtttaaaatcatctaagagtctatacttgtgtgtacatacgtatttatttttatttatttttatacaattccattggcatggtccttcaccgaccctatgatttgcactttttatttctatgtgtgccacacacaatgcagtattaatggcaaccaggtaaatattgatttattttttaaagcttttcttcagtgttttgtcaaccatttcaaagtgtctcccaaaaaaggatgctgaagagcaattgctcccttaagcaacagattcatatttaccctgggttaatacaacaaaaggcctgtataattgtcttttcattgttaacacccaaaatagcatctatctagacagtatccccaaagaatttggaaaatctgatggtgtgagcagcagccgttagtatcagggtttcccattcttggacagtccgaggctgtgacctgttagataattagattatacttgaactggaccagagtttgttttttgaatttatgagaaaaaccaaaacactaagttaagtttgaacttgtaaagtattgaaatttgttgagtgtcctataaattgtcactacttttcctgatctgtataactgactgcaaagtgtttgtttttacaaaagagaaaagaaaagatttttaataaagagaatttgaaagctgt

SEQ ID NO: 49291 - DNA, 3684 bp, Artificial Sequence
  derived and/or modified sequence
atggtgctagcggctgccatgtcgcaggacgcagatcctagcggacccgaacagcccgaccgcgtggcctgttccgtgcctggagccagggcatctcctgccccttccggaccgagaggtatgcagcagccaccacctcccccccagcctcccccacctccgcaggccgggttaccccagatcatccagaatgccgccaaactcttggataaaaacccctttagcgtttccaatcctaatcctctgttgccttctcccgcctcacttcagctggcccagttgcaagctcagctcacactgcatcggttgaagctggctcagactgccgtgacgaataacaccgccgctgcgaccgtgcttaaccaagtgttatcaaaggtggctatgtcgcagcctttgtttaatcagctgagacatcccagcgtgattacagggccccacggtcacgctggggtccctcagcacgccgcagccatcccatccacccgctttccctcaaatgctatcgcctttagtccaccctcacagaccaggggtccggggccttccatgaacttaccaaaccaaccgcctagtgctatggtcatgcaccccttcacaggtgtaatgccgcaaacacctgggcaaccagcagtgatactcgggattggcaaaacgggcccagctcccgctaccgcagggttctatgaatacggaaaggcctcatctggccaaacctacgggcctgaaactgatggccagcccggatttctgccttcttcggcgtctacctcaggcagtgtaacctatgaagggcactattcacacaccgggcaggatgggcaggccgccttttccaaagacttctatggccctaactcccagggatcacacgttgccagcggctttccagcagagcaggcaggaggactgaagagcgaagtgggtccactgctgcagggcacaaattcccagtgggagtccccacatgggttcagcggccagtccaaaccagatcttaccgcaggtccaatgtggccccccccccataatcagccatacgaactgtacgaccctgaagagccaacgtccgatcgtacacctcctagctttgggggccgacttaataactcaaaacagggttttatcggagcgggccgacgagctaaagaggaccaggccttgctgtctgttcggccccttcaggcccacgaactaaatgacttccatggcgtcgccccgctccaccttccacacatttgttccatttgcgacaaaaaggtgtttgacctgaaagattgggagctccacgtcaaaggcaaattacacgcacagaaatgtctagtcttcagtgagaacgctggcatacgatgcatcctagggtctgccgaggggacgctgtgcgccagcccaaatagtacagcagtctacaatcccgctggtaacgaagattatgcctccaatctcggtacgtcctacgtacccattcctgcacggtccttcacccagtccagtcctacattcccactggctagtgttgggaccaccttcgcccagaggaagggcgccggaagggtggttcatatttgcaatttgccagaaggatcgtgcacggagaacgatgtaatcaacttgggactccctttcgggaaggtaactaattacatccttatgaaaagtactaatcaggcctttttagaaatggcgtacaccgaggctgcccaggcaatggtacagtattatcaagagaagagtgctgttataaacggagagaagctgctgattcggatgtccaagcgttataaagagctgcaactgaaaaaacctgggaaggcagtagcggctatcatacaggatatccattctcagcgcgagagagacatgttcagagaagccgacagatatggcccagagaggccccggagtcgctcccctgttagcagatctttgtcaccgcggagtcatactccttccttcacatcctgttcttcctctcattccccacccggaccatctagggctgattggggcaatggaagagacagctgggaacattctccttacgctcgtagggaggaggaacgcgatcctgcaccttggagagataacggcgacgataaacgagataggatggacccttgggcccatgatagaaaacatcacccccgccagctcgacaaagcagagttggacgaacgccccgaggggggccgcccacacagggaaaagtacccccggtccggctcccctaatctccctcattcagtgtcatcctacaaatcccgcgaggacggctactacagaaaagagcctaaagcaaaatgggataagtacttgaagcagcagcaggatgcaccaggacgtagccgcaggaaggacgaggcacggctgagagaatctcgccacccccacccagatgactctggcaaggaggatggtctcggccccaaagtgactagagcgcctgaaggcgcgaaggccaagcagaatgaaaagaataagacaaaacgcaccgatcgcgatcaggaaggcgctgacgatcgaaaggaaaacaccatggctgagaatgaagccggcaaggaggagcaagagggaatggaagaatcccctcagagtgtggggcggcaggaaaaggaggccgagttctctgaccctgagaacacccgcaccaagaaggaacaggattgggagagcgaatctgaagccgagggcgaaagttggtatccaacaaatatggaggaactggtgaccgtcgacgaagtgggggaggaggaggattttatcgtcgagccagacatcccagagttagaagaaatcgtgcccatagatcagaaggataaaatctgtcctgagacctgtttgtgcgtgaccaccacactggatcttgacctcgcacaagacttccccaaagaaggtgttaaggccgttggaaacggagctgcagagatcagcctgaagagtcctagagaactcccttctgcctccacatcctgccctagcgatatggatgtggagatgcctggcctgaacctcgatgctgagcggaagcctgctgaaagcgaaacagggctgagcctcgaagattccgactgctatgagaaagaagctaagggcgtcgaaagctctgatgtgcatccggcaccaaccgtccagcagatgtcatccccaaaaccggctgaagaacgtgcccggcagccttcaccttttgttgacgattgcaaaacccgcgggacgcccgaagatggggcttgcgaaggtagcccgcttgaggagaaggcgagtcctcctatcgaaacggacctgcagaatcaggcgtgccaggaggtgctgacaccagagaattccaggtacgtagagatgaagagtttagaggtccgcagcccagaatatacggaggttgagttgaagcagcccctgtcccttccttcttgggagccggaggatgtgttttcggagctgagtatacccctcggggtcgagttcgtcgtaccgcggacgggtttctattgcaagttgtgtgggctgttttacaccagcgaggagacggcaaaaatgtcccactgccgatcagcagtgcactatcgtaatctgcaaaagtacctgagccagcttgcggaggaaggcctcaaagagaccgagggtgctgattcacccaggcctgaggacagcggtatcgtgcccaggttcgagagaaagaagctgtag

SEQ ID NO: 49292 - DNA, 3378 bp, Artificial Sequence
  derived and/or modified sequence
atggtcctagcagctgccatgagtcaagacgctgatcctagcgggccagagcaacctgaccgcgttgcctgcagtgttcccggcgctcgagctagtcctgcgccctccggccctaggggaatgcagcagccaccccctcccccccagcccccaccacctccccaagctgggctgcctcagattattcagaacgccgccaaactgctggacaaaaacccctttagcgtgtctaatccgaacccgttgctgccttcccccgcatctctccaacttgcccagcttcaggcccaactgaccctacacaggcttaaactcgctcagacagctgtcactaataacaccgccgccgccactgtgttgaaccaagttctttccaaagtggccatgtctcaacccctctttaaccaactcaggcatccgtccgtgattacaggtcctcacggccatgctggggtcccccagcatgcggccgccatcccttctactagatttcccagcaacgctatcgccttcagccctccctcacagaccagggggcctggcccgtctatgaatttaccaaaccagccaccttctgccatggtcatgcatcccttcacaggagttatgccacagacccctggccagccagccgtcatcctcggcatcggaaaaaccggcccagcgccggcgaccgcagggttctacgaatatggaaaagcatctagcgggcaaacctatggccccgagaccgacggccagcccgggtttctgccaagctctgccagcacaagtggctctgtgacctacgaggggcactattctcacaccggacaggatgggcaggccgcctttagcaaagatttctatgggccaaattctcaggggagtcatgtggcttctgggtttcctgctgagcaggccggcggactgaaatcggaggtggggcccctgttgcagggaacaaactcgcagtgggaaagtccccacggatttagtggtcagtccaaacccgaccttaccgccggacctatgtggccaccaccccataaccaaccctatgagctatatgaccctgaagaacctacctcagatcgtacacctccatcttttggcggtaggctgaacaactccaagcaaggctttataggtgctgggaggagagctaaagaagaccaggccctcctctctgtgagacctcttcaagctcacgagcttaatgattttcacggagtggccccgcttcatttaccacatatatgtagtatatgtgataagaaagtatttgatttgaaggactgggagctgcatgtcaagggcaagttacacgcacagaagtgcctcgtcttctccgagaacgccggaataagatgcatcctggggtctgcggagggaaccctgtgcgcatccccaaatagcacagccgtgtacaatcctgctggcaacgaggactatgccagcaacctggggacatcctacgtaccaattcccgctaggagcttcactcaatcgtcgcccaccttcccactagcgagtgtcgggacaacatttgcacagcgaaagggcgctggccgcgtcgtacacatttgcaacctgccagaaggctcctgtacagaaaatgatgtgattaacctgggactgccatttggtaaggttacaaattacatcctcatgaaatctactaatcaggcatttttggagatggcctatacagaggctgcccaggccatggtgcagtactatcaggagaagagtgccgtgattaatggcgagaaactgttgatcagaatgagtaagcggtacaaagaactgcagttaaaaaaacccggcaaggccgtggccgccatcattcaagacatacatagtcagcgagaaagggacatgttccgagaggccgatcgttatggtccggaacgaccccgctcgcggagtccggtcagcaggagcctctcccctaggagtcatactccttcctttaccagctgcagctcttcccatagccccccgggaccatcaagagctgattggggaaatggccgggactcctgggagcacagtccttacgccaggagggaggaggagagagacccggctccttggagagacaacggagatgataaacgggatcgaatggatccatgggctcacgatcgcaagcaccaccctcgccagttagacaaagccgaactagacgagaggcccgaagggggacggccacatagggaaaaataccctcgctcagggtcccctaacctccctcactccgtgagctcatataagagccgcgaggacggctactaccggaaagagccaaaggctaaatgggacaagtatctgaagcagcagcaagatgcgcccggaagaagtcgtaggaaggacgaggccagactgagggagtctagacacccccacccagacgattctggaaaagaagatggcctggggcctaaggtgacacgcgctccagaaggagcgaaggcaaagcagaatgagaagaataaaaccaagaggacagaccgcgatcaggaaggcgcagatgatcggaaagagaatacgatggctgaaaacgaagctggtaaagaggagcaggagggaatggaagagtcgccccagagcgtggggcgtcaagaaaaggaagccgaattcagcgacccggaaaacacacgaacaaaaaaagagcaggactgggaaagcgagagtgaggcagagggcgagtcatggtatcctaccaatatggaagagctggtgacagtggacgaagttggtgaggaggaggattttatagtagagccagacatcccggaattggaagaaatcgtccctattgaccagaaggataaaatttgtcctgagacttgcttatgcgtcactacaacactcgatttggatctggcccaggattttcctaaggagggagtcaaagccgtggggaacggagcagctgaaatcagcctgaaatcgccgcgggaacttccctctgcatctacttcatgccctagcgacatggacgttgaaatgcccggcctgaatctggatgcagaaaggaagccggccgaatctgaaaccggtctgagtttggaggatagcgactgttacgagaaagaagccaaaggcgtggaatcgagtgacgtccaccccgcccccacggtccaacagatgagcagccccaagccagccgaagaacgtgcgcgccagcctagccccttcgtggatgactgcaagacgcggggtacgccagaggatggcgcatgtgagggatcaccactggaggagaaggccagcccgcccatcgaaaccgatctccaaaatcaagcttgtcagggttccgacagtgatacccgcctggtgtccggctacagtctcaccccgctagaaaagacacccggcacttggaagtag

SEQ ID NO: 49293 - DNA, 3684 bp, Artificial Sequence
  derived and/or modified sequence
atggtgctggccgccgccatgagccaggatgctgaccccagcggccctgagcagcctgacagagtggcctgcagcgtgcctggggcccgggccagccctgcccccagcggcccccggggcatgcagcagcccccacctccaccccagcccccacctccaccccaggccggcctgccccagatcatccagaatgctgccaagctgctggacaagaaccccttctctgtgagcaaccccaaccccctgctgcccagccctgccagcctgcagctggcccagctgcaggcccagctgaccctgcaccggctgaagctggcccagacagctgtgaccaacaacacagctgctgccaccgtgctgaaccaggtgctgagcaaggtggccatgagccagcccctcttcaaccagctgcggcaccccagcgtcatcaccggcccccacggccacgccggcgtgccccagcacgccgccgccatccccagcacccgcttccccagcaatgccatcgccttcagcccccccagccagacccggggccctggccccagcatgaacctgcccaaccagccccccagcgccatggtgatgcaccccttcaccggggtgatgccccagaccccaggccagcctgctgtgatcctgggcatcggcaagacaggccctgccccagccacagctggcttctatgaatatggcaaggccagcagcggccagacctacggccctgagacagatggccagcccggcttcctgcccagcagcgccagcaccagcggctctgtgacctatgagggccactacagccacacaggccaggacggccaggccgccttcagcaaggacttctacggccccaacagccagggcagccacgtggccagcggcttccctgctgagcaggccggcggcctgaagtctgaggtgggccccctgctgcagggcaccaacagccagtgggagagcccccacggcttcagcggccagagcaagccagacctgacagctggccccatgtggcccccaccccacaaccagccctatgagctgtatgaccctgaggagcccaccagtgacaggaccccacccagctttggaggccgcctgaacaacagcaagcagggcttcatcggggccggccggcgggccaaggaggaccaggccctgctgtctgtgcggcccctgcaggcccacgagctgaatgacttccatggagtggcccccctgcacctgccccacatctgcagcatctgtgacaagaaggtgtttgacctgaaggactgggagctgcacgtgaagggcaagctgcacgcccagaagtgcctggtgttttctgaaaatgccggcatccgctgcatcctgggcagcgctgagggcaccctgtgtgccagccccaacagcacagctgtgtacaacccagctggaaatgaagattatgccagcaacctgggcaccagctatgtgcccatcccagcccgctccttcacccagagcagccccaccttccccctggcctctgtgggcaccacctttgcccagaggaagggggccggccgggtggtgcacatctgcaacctgcctgagggcagctgcacagaaaatgatgtgatcaacctgggcctgccctttgggaaggtgaccaactacatcctgatgaagagcaccaaccaggccttcctggagatggcctacacagaggccgcccaggccatggtgcagtactaccaggagaagtctgctgtgatcaacggggagaagctgctgatccgcatgagcaagcgctacaaggagctgcagctgaagaagccaggcaaggctgtggccgccatcatccaggacatccacagccagcgggagcgggacatgttccgggaggccgacagatatggccctgagcggcccaggagccgcagccctgtgagccgcagcctgagccccaggagccacacccccagcttcaccagctgcagcagcagccacagccccccaggccccagcagagctgactggggcaatggccgggacagctgggagcacagcccctatgcccggcgggaggaggagcgggaccctgccccctggagggacaatggagatgacaagagggacaggatggacccctgggcccatgacaggaagcaccacccccggcagctggacaaggccgagctggatgagaggcctgagggcggccggccccaccgggagaagtaccccaggagcggcagccccaacctgccccacagcgtgtcctcctacaagagccgggaggatggctactacaggaaggagcccaaggccaagtgggacaagtacctgaagcagcagcaggatgcccctggccgcagcaggaggaaggatgaggcccggctgcgggagagccgccacccccacccagatgattctgggaaggaggatggcctgggccccaaggtgacccgggcccctgagggcgccaaggccaagcagaatgagaagaacaagaccaagaggacagaccgggaccaggagggcgcagatgacagaaaagaaaacaccatggccgagaatgaagctgggaaggaggagcaggagggcatggaggagagcccccagagcgtgggccggcaggagaaggaggccgagttcagtgaccctgagaacaccaggaccaagaaggagcaggactgggagagcgagagcgaggccgagggggagagctggtaccccaccaacatggaggagctggtgacagtggatgaggtgggggaggaggaggacttcatcgtggagccagacatccctgagctggaggagatcgtgcccatcgaccagaaggacaagatctgcccagagacctgcctgtgtgtgaccaccaccctggacctggacctggcccaggacttccccaaggagggcgtgaaggctgtgggcaatggagctgctgagatcagcctgaagagcccccgggagctgcccagcgccagcaccagctgccccagcgacatggatgtggagatgcctggcctgaacctggatgctgagaggaagccagctgagagcgagaccggcctgagcctggaggacagcgactgctatgagaaggaggccaagggcgtggagagcagtgatgtgcacccagcccccaccgtgcagcagatgagcagccccaagccagctgaggagcgggcccggcagcccagcccctttgtggatgactgcaagacccggggcaccccagaagatggagcctgtgagggcagccccctggaggagaaggccagcccccccatcgagacagacctgcagaaccaggcctgccaggaggtgctgaccccagagaacagccgctacgtggagatgaagagcctggaggtgcgcagccctgagtacacagaggtggagctgaagcagcccctgagcctgcccagctgggagccagaagatgtgttcagcgagctgagcatccccctgggcgtggagtttgtggtgcccaggacaggcttctactgcaagctgtgtggcctcttctacaccagcgaggagacagccaagatgagccactgccgctctgctgtgcactacagaaacctgcagaagtacctgagccagctggccgaggagggcctgaaggagacagaaggagctgacagccccaggcctgaggacagcggcatcgtgcccaggtttgagaggaagaagctgtag

SEQ ID NO: 49294 - DNA, 3378 bp, Artificial Sequence
  derived and/or modified sequence
atggtgctggccgccgccatgagccaggatgctgaccccagcggccctgagcagcctgacagagtggcctgcagcgtgcctggggcccgggccagccctgcccccagcggcccccggggcatgcagcagcccccacctccaccccagcccccacctccaccccaggccggcctgccccagatcatccagaatgctgccaagctgctggacaagaaccccttctctgtgagcaaccccaaccccctgctgcccagccctgccagcctgcagctggcccagctgcaggcccagctgaccctgcaccggctgaagctggcccagacagctgtgaccaacaacacagctgctgccaccgtgctgaaccaggtgctgagcaaggtggccatgagccagcccctcttcaaccagctgcggcaccccagcgtcatcaccggcccccacggccacgccggcgtgccccagcacgccgccgccatccccagcacccgcttccccagcaatgccatcgccttcagcccccccagccagacccggggccctggccccagcatgaacctgcccaaccagccccccagcgccatggtgatgcaccccttcaccggggtgatgccccagaccccaggccagcctgctgtgatcctgggcatcggcaagacaggccctgccccagccacagctggcttctatgaatatggcaaggccagcagcggccagacctacggccctgagacagatggccagcccggcttcctgcccagcagcgccagcaccagcggctctgtgacctatgagggccactacagccacacaggccaggacggccaggccgccttcagcaaggacttctacggccccaacagccagggcagccacgtggccagcggcttccctgctgagcaggccggcggcctgaagtctgaggtgggccccctgctgcagggcaccaacagccagtgggagagcccccacggcttcagcggccagagcaagccagacctgacagctggccccatgtggcccccaccccacaaccagccctatgagctgtatgaccctgaggagcccaccagtgacaggaccccacccagctttggaggccgcctgaacaacagcaagcagggcttcatcggggccggccggcgggccaaggaggaccaggccctgctgtctgtgcggcccctgcaggcccacgagctgaatgacttccatggagtggcccccctgcacctgccccacatctgcagcatctgtgacaagaaggtgtttgacctgaaggactgggagctgcacgtgaagggcaagctgcacgcccagaagtgcctggtgttttctgaaaatgccggcatccgctgcatcctgggcagcgctgagggcaccctgtgtgccagccccaacagcacagctgtgtacaacccagctggaaatgaagattatgccagcaacctgggcaccagctatgtgcccatcccagcccgctccttcacccagagcagccccaccttccccctggcctctgtgggcaccacctttgcccagaggaagggggccggccgggtggtgcacatctgcaacctgcctgagggcagctgcacagaaaatgatgtgatcaacctgggcctgccctttgggaaggtgaccaactacatcctgatgaagagcaccaaccaggccttcctggagatggcctacacagaggccgcccaggccatggtgcagtactaccaggagaagtctgctgtgatcaacggggagaagctgctgatccgcatgagcaagcgctacaaggagctgcagctgaagaagccaggcaaggctgtggccgccatcatccaggacatccacagccagcgggagcgggacatgttccgggaggccgacagatatggccctgagcggcccaggagccgcagccctgtgagccgcagcctgagccccaggagccacacccccagcttcaccagctgcagcagcagccacagccccccaggccccagcagagctgactggggcaatggccgggacagctgggagcacagcccctatgcccggcgggaggaggagcgggaccctgccccctggagggacaatggagatgacaagagggacaggatggacccctgggcccatgacaggaagcaccacccccggcagctggacaaggccgagctggatgagaggcctgagggcggccggccccaccgggagaagtaccccaggagcggcagccccaacctgccccacagcgtgtcctcctacaagagccgggaggatggctactacaggaaggagcccaaggccaagtgggacaagtacctgaagcagcagcaggatgcccctggccgcagcaggaggaaggatgaggcccggctgcgggagagccgccacccccacccagatgattctgggaaggaggatggcctgggccccaaggtgacccgggcccctgagggcgccaaggccaagcagaatgagaagaacaagaccaagaggacagaccgggaccaggagggcgcagatgacagaaaagaaaacaccatggccgagaatgaagctgggaaggaggagcaggagggcatggaggagagcccccagagcgtgggccggcaggagaaggaggccgagttcagtgaccctgagaacaccaggaccaagaaggagcaggactgggagagcgagagcgaggccgagggggagagctggtaccccaccaacatggaggagctggtgacagtggatgaggtgggggaggaggaggacttcatcgtggagccagacatccctgagctggaggagatcgtgcccatcgaccagaaggacaagatctgcccagagacctgcctgtgtgtgaccaccaccctggacctggacctggcccaggacttccccaaggagggcgtgaaggctgtgggcaatggagctgctgagatcagcctgaagagcccccgggagctgcccagcgccagcaccagctgccccagcgacatggatgtggagatgcctggcctgaacctggatgctgagaggaagccagctgagagcgagaccggcctgagcctggaggacagcgactgctatgagaaggaggccaagggcgtggagagcagtgatgtgcacccagcccccaccgtgcagcagatgagcagccccaagccagctgaggagcgggcccggcagcccagcccctttgtggatgactgcaagacccggggcaccccagaagatggagcctgtgagggcagccccctggaggagaaggccagcccccccatcgagacagacctgcagaaccaggcctgccagggcagtgacagcgacacccggctggtgtctggctacagcctgacccccctggagaagaccccaggcacctggaagtag

SEQ ID NO: 49295 - DNA, 3684 bp, Artificial Sequence
  derived and/or modified sequence
atggtgctggccgccgccatgagccaggacgccgaccccagcggccctgaacagcctgatcgtgtggcttgttccgtgcccggggcacgggctagccccgctccttctggtccaagggggatgcaacaaccacctccacccccacaaccacctcccccaccccaggcgggactacctcagataattcagaacgccgctaagcttcttgacaaaaacccattctcggtgagcaatccaaaccctctcctcccgtcacctgcctcgcttcaattagctcagctgcaggcgcagcttacattgcaccggcttaagctggcacagaccgctgttacaaacaatacagctgccgcaacggttctgaatcaggttctaagcaaagtggcaatgagccagccactgtttaatcaactccgtcacccatctgtgattaccggtccccatggacacgccggggttccccagcacgctgcagccatcccgtctacccgctttcctagtaacgccatcgctttctccccgccatcgcagacaaggggtccgggaccttcgatgaatttgcctaatcaacccccgtccgctatggtgatgcatcctttcaccggcgtgatgcctcaaacccctggccagccagccgtgatcctcggcatcggtaagactggccccgccccagctacagctggattttatgaatacggcaaagcctcttctggccaaacatacggccctgagaccgatggtcagcccggctttctacctagcagtgcctctacttccggctcggtgacatatgaaggtcactactctcatactggacaagatggtcaggctgctttttcaaaggacttttatggccctaatagccaagggagccacgtcgcctcagggttccccgcggagcaggccggtggactcaagtccgaagtaggcccgttgctgcaagggactaattcccagtgggagtccccacatgggtttagtgggcagagcaagccagacttaactgctggtcctatgtggccccccccccacaaccagccatatgaactttatgaccctgaagaacccacaagcgacaggacacctccatcctttgggggcaggctcaataattccaagcaagggttcatcggtgcgggtagacgcgctaaagaagaccaagccctgttgagtgttcggcccctgcaggcacacgaacttaacgattttcatggagtggccccccttcatttgcctcatatctgttccatttgcgacaagaaagtgtttgaccttaaagattgggaattgcacgtcaaaggaaagctgcacgcacagaaatgtcttgtcttcagtgagaacgccggcatccggtgtattctggggtcagccgagggcaccctttgcgcatcccctaatagcaccgctgtgtataatccggccgggaacgaagactacgcgtctaacttagggaccagctatgtgccaattcccgctagaagcttcactcaatcttcacctacattccccttggcgagtgtgggaacaacatttgctcaacgaaaaggtgccgggagggtcgttcacatctgcaatctacctgaagggtcttgcaccgaaaatgacgttataaatctcggcctgccattcggaaaagtcacgaactacattctgatgaaaagtaccaatcaggcttttctggaaatggcctacaccgaggcagcacaagcgatggtccaatattatcaggagaagagcgctgtgatcaacggggagaaactcctgattcggatgagtaagcgctataaagagctacagctgaagaaacccggcaaggcagtcgccgcaattattcaggacatacacagtcagagagaacgcgacatgtttcgagaggctgatcgctacgggcccgagcgaccgagaagccgaagtcccgtgagccggagtctgtctcccagatcccacacaccatccttcacatcatgcagttcatctcactccccacctgggcccagccgggccgattggggaaacgggcgggatagctgggagcactcaccctacgcccgacgggaggaagagcgcgatccagccccttggcgggacaatggggacgataaaagagatcgaatggatccatgggcacatgacagaaaacatcaccctcgtcaattagacaaagccgaactggatgaacgccccgaaggggggcgcccccatcgagagaagtaccctagaagcggcagtccaaatctccctcactccgtgtccagttataaaagccgcgaagatgggtattatcggaaagaacccaaagctaagtgggacaaatacctgaagcagcagcaggatgcccccggacgcagtcgtcggaaggatgaggcgcgactacgagaaagccgccatcctcacccagatgattctggaaaggaggacgggttaggcccaaaggtgacacgggctccagagggcgcaaaagccaagcagaacgaaaagaacaaaactaaacgtactgacagagatcaggagggagccgacgacagaaaggagaacacgatggcagaaaatgaagccggaaaagaggagcaggagggaatggaggagtcccctcagtctgtgggcaggcaagaaaaagaggcggaattcagcgatcccgagaacacaaggacaaagaaagagcaagattgggaatcagaaagtgaggccgagggagagagctggtaccccacaaacatggaggagttagtaaccgtcgatgaggtaggtgaagaagaagactttattgtggaaccagacatccctgaattggaggagatcgtgccaatcgatcagaaagataagatctgcccagagacttgtctctgtgttactactacactcgatctcgacttggcccaggatttccctaaggagggagtcaaggccgtgggtaacggcgccgcggaaatttccctgaaatccccccgggagttgccttcagccagtacttcatgcccttcagatatggatgtggaaatgcccggccttaatctagatgctgagcgaaagcctgcagagtccgagacaggactgtctctggaggacagcgattgctacgagaaagaggccaagggcgtggagtcatccgatgttcaccctgcacccaccgtgcagcagatgagcagtcctaaacccgctgaagagcgagcccgacaaccgagccccttcgtagatgactgtaaaacacgtggcacccctgaggacggtgcttgtgaggggtctccactcgaggagaaggcctctcctccaatcgagactgacctgcagaaccaagcctgccaagaggtcctgactcccgaaaactcacggtatgttgagatgaaatcccttgaagttcgctctccagagtataccgaagtggaattgaaacaacctctgtctctcccaagctgggaaccagaagatgtcttctcagagctctcaatcccccttggagttgagttcgtcgtgccccggactggcttctattgcaagctgtgcggactgttctatacttcagaagagaccgctaaaatgagccactgcaggtcggccgtgcactatcggaacctccaaaaatacctgtctcagcttgctgaggaagggttaaaggagaccgagggggccgattccccgcgccccgaagactccggaattgtgcctcgtttcgaacgaaagaagttatag

SEQ ID NO: 49296 - DNA, 3378 bp, Artificial Sequence
  derived and/or modified sequence
atggtgctggccgccgccatgagccaggacgccgaccccagcggcccggagcagcccgatcgtgttgcgtgcagcgtgcccggagccagagcttccccagctccatcaggacccagggggatgcagcagcctccgcctcccccacagccaccacctccaccacaagcaggattaccacagatcatacagaacgccgctaaactgctcgataaaaacccattcagcgtttccaatcccaacccgcttcttccgagcccggctagcctccagttggcacagctgcaagcccagcttactctccacaggctcaaacttgcccagactgcagtgactaataataccgctgcagctaccgtcctgaatcaagtgttatcaaaagttgccatgtctcagccgctgtttaatcagctgaggcacccttccgtgatcacagggccccatggtcatgcgggggttccccagcatgctgcggccatcccgtccacccgatttccatctaacgccatcgccttctcacccccatcacagacccgaggtcccggcccatccatgaatcttcccaaccagcctccctctgctatggtgatgcatcccttcaccggtgtaatgcctcagaccccaggtcaacctgccgtcatcctcggcatagggaaaactggacctgcccccgcaaccgctggtttttacgagtatgggaaagcatctagcggacagacctatggtcccgagacagacggacaacctggctttcttcccagcagcgccagcacaagtgggtctgttacctatgaggggcattactcacacactgggcaggacggccaggcggcctttagtaaggatttttacggccccaactcccaaggaagtcatgtggcatctgggtttcccgctgagcaggctggtggcctaaaatccgaggtcgggccattgctgcagggcaccaattcacagtgggagagcccacatggcttttccggccagagtaagcctgatcttacagctggaccaatgtggcccccccctcacaatcaaccatatgagttatacgatccggaggagcccacttcggacaggaccccaccctcattcggaggccgactcaataactccaaacaggggtttatcggagcagggagacgggcaaaagaagaccaggctttacttagcgtcagaccgctacaagcccatgagctcaacgactttcacggcgtagcccctctccacttgccacatatctgttctatctgtgacaagaaagtgttcgatctcaaagactgggaactccacgtgaagggaaagctccacgcacagaagtgtctggtattcagcgaaaatgccgggatacgctgtatcctgggtagcgcagagggaacactctgcgcgtcccccaactctacagcagtatacaacccggccggtaacgaagattacgcctcaaacctggggacaagttacgtcccaatcccggctcgctctttcactcagtcctcccctacttttcctctggcctccgtgggcaccactttcgcccaaaggaaaggggctggacgggttgtccatatctgtaacctgcctgaaggttcctgcactgaaaatgacgtgatcaacttgggattaccattcggtaaggtaaccaactacattctgatgaagagcactaaccaggcttttctggagatggcttacacagaggctgcgcaggccatggtccagtattaccaggagaagagcgccgtaattaacggtgagaaactactgataaggatgtcaaaacggtacaaagagttgcagctcaaaaaacccgggaaagcagtggctgccatcatccaggatatccactcacagagggagcgcgatatgttcagagaggcggaccgctacggccctgagagacctcgatcaaggtctcccgttagtcggtcattgtctccacggtcgcataccccaagttttacatcgtgcagcagttcccactcccctcctggcccttccagggcagattgggggaacgggcgggactcatgggagcactctccatatgcccggagagaagaagagagggacccggcaccttggagagataacggcgatgacaaacgcgacaggatggacccatgggcacatgaccggaaacaccatcccagacagcttgataaggccgagttggatgagagaccggagggaggaagacctcatagagagaagtacccaagatccgggtctccaaacctcccccactccgtctcctcctacaaaagtagagaggatgggtattatcgcaaagagccgaaagctaaatgggataaatacctcaagcagcagcaggacgcccctggccggtctaggcgcaaagatgaggctcgccttcgggaatcccggcaccctcatccagacgactctggaaaagaggacggactcggacctaaggtgacacgggctccagaaggtgccaaggcaaagcaaaatgaaaaaaacaagactaagaggaccgacagagaccaagagggggccgatgataggaaagaaaacaccatggccgaaaatgaagctgggaaagaggagcaggagggtatggaagaaagcccccaaagtgtcggacggcaggaaaaggaggctgagttctccgatcccgaaaataccaggacaaagaaagagcaagattgggagtccgagtccgaggctgagggggaaagctggtaccccacgaatatggaggaactggtgaccgttgacgaggtcggcgaagaggaagactttatcgtcgagccagacatccccgagctggaggagattgtacccatcgaccaaaaggacaaaatttgccccgagacctgcctctgtgtcacaaccacactagaccttgatttagctcaggacttcccgaaagaaggcgtgaaagccgtaggtaatggcgccgctgagatttctctgaagtctcccagggagcttcctagtgcttccacctcctgtccctccgacatggatgtggagatgcccggcctaaatttggacgctgaacgtaagccagccgagtccgagaccggcctgtcccttgaggacagcgattgttatgagaaggaggcgaaaggagtcgagtccagcgatgtgcatcccgctccaaccgtacagcagatgtcaagtcccaagcctgccgaggaaagggctagacagcctagcccgttcgttgatgactgtaaaacacgcggcaccccagaagacggagcttgcgagggtagtccactggaggaaaaggctagtccgcccatcgaaaccgacctgcagaatcaagcctgtcaaggttcagacagtgatacccgcctggtttcaggttacagcctcacccctctcgagaaaactcccggtacatggaaatag

SEQ ID NO: 49297 - DNA, 3684 bp, Artificial Sequence
  derived and/or modified sequence
atggtgctggcagccgctatgtctcaagatgccgacccttctggacccgaacagccggatcgcgtcgcttgtagcgtgcccggtgcacgggcatcgccagcccctagtggcccaaggggcatgcagcaacctccccctcccccacagccccctcctcctccccaggctggactacctcagatcattcagaatgctgccaagttgttagacaaaaaccctttcagcgtgagtaatccaaacccactgctgccatcacccgctagcttgcagctggctcagcttcaggcccaattgacactacatcgcctaaaactggcgcagactgcggtgacaaacaataccgccgcagcaactgtcttaaaccaagtgctgagcaaagttgctatgagtcagcctttatttaatcagctgcggcacccctccgtgatcaccgggccacatggacacgcgggagtccctcagcatgctgcagcaatcccaagtaccagattcccgtccaatgctattgccttttctcctcccagtcagactcggggtcccggaccctccatgaatctaccgaaccagcccccttccgccatggtgatgcatccctttacaggcgtgatgcctcaaacgcctggccagcctgcggtgattctcggcatcggaaagaccggccctgcaccagctaccgccggattttacgaatacggaaaagcctctagcggccagacttacggcccagagacggacggtcagccaggatttctcccttcttccgccagcacctctggttctgtgacctacgagggccattactctcatacaggacaagacggccaggcagcttttagtaaagacttttacggcccaaatagtcaaggaagccatgtagccagtggtttcccagcggaacaggctggcggactcaagagcgaggtaggccctctgctgcagggcacaaatagccaatgggagtccccacatggattctccggccaatccaagcccgacctgacagcaggaccaatgtggccaccaccccacaatcagccttatgaactctacgaccccgaggagccaaccagcgatcgaactcccccaagtttcggaggcaggctgaacaacagtaaacaggggtttatcggtgcagggcgtagagctaaggaagatcaggctctcctcagcgtccgacccttgcaggctcatgaactgaacgattttcacggtgtggcccctttacatctaccccacatctgctctatctgtgacaagaaggtcttcgatttaaaagactgggaactccacgtgaaagggaagctacacgctcaaaagtgtctggttttcagtgaaaatgcaggcattcggtgcatcttgggctctgccgaggggactctatgtgccagcccaaatagtactgcagtttacaacccggctggaaatgaagactacgcctccaacctgggcaccagctatgtgcctatcccggcaagaagctttacacagagtagccctacgtttccacttgcttcagtcggcacaacgttcgcacagcgtaagggcgcaggacgggtggtgcacatttgtaatttgcccgaggggagttgcactgaaaacgatgtcattaacctgggcctgcccttcggcaaggtgactaactacatacttatgaagtccaccaatcaggcctttctggaaatggcctataccgaagccgcacaggctatggtgcaatattatcaggaaaagagtgctgtaataaacggggaaaagctcctgattcgtatgtctaaacggtacaaagaactgcagctaaaaaagcccggtaaggcagtagcagctataattcaggatatccacagtcagagagagcgtgatatgtttagagaggctgaccgttacggcccagagaggccacggtctcggagtcctgtgtcacgtagcttaagccctcggagccacacgccgtcattcacatcttgtagctcatcccacagtccccctgggccttcaagggcagactggggaaatggacgagactcttgggagcacagtccttacgcacggagggaggaggagcgggatcccgcaccctggcgcgataacggggatgacaagcgcgatcgcatggatccctgggctcatgacagaaaacatcaccccaggcaactcgataaggcagaactcgacgaacggcctgaggggggtaggccgcacagagagaaatatcctcgctccgggtcccctaacctgccccattcagtatcttcatataaaagtcgcgaggatgggtactaccgcaaggagcccaaggccaaatgggacaaatatttgaagcaacagcaggacgctccgggtcggagccggagaaaggacgaggcaaggctgcgagagtcccgccaccctcacccagacgactctggaaaagaggacggactgggtcccaaagtgacccgcgctcccgagggcgcaaaggccaagcagaacgaaaaaaacaagactaagagaacagaccgagaccaagaaggggcagatgaccggaaggagaatacgatggcggagaatgaggctgggaaagaggaacaagagggtatggaagaatcaccccagtcagtcggcagacaggaaaaggaagcagagttcagcgaccccgagaacacccggacaaaaaaggagcaggactgggaatccgagtccgaagcagaaggagagagttggtatcctaccaacatggaagaacttgttaccgtcgacgaggtgggcgaggaagaggatttcatcgttgaacctgatatccccgagctcgaggaaattgtgcctatcgatcagaaagataaaatttgccctgaaacgtgtctttgcgtcacaactactctggatttagatctggcccaggatttcccaaaagagggcgtcaaagctgtggggaatggcgctgcagagattagcctgaaaagccctcgcgaactgccttcagcaagtacgtcttgcccctcagatatggacgtcgagatgccaggcttgaatctcgacgccgagaggaaacctgcggaatctgagacaggattgtctctcgaggacagtgattgttatgaaaaggaggcaaaaggagtggaatcaagcgatgtccacccagcccctactgtgcaacagatgagctctcctaaaccggctgaggaacgagctagacagccaagcccattcgtggacgattgtaaaacacgcggtactcccgaggacggcgcttgcgaggggtctcctctagaagaaaaagcgtcccctcctatcgaaactgacctgcagaaccaggcatgccaggaagttctgacccctgagaattcacgttatgtggagatgaagtcgctcgaagtgcgatcaccggagtacaccgaagtagagcttaagcagcccctcagccttccatcttgggagccggaggatgttttctctgaactctcgatccctttgggtgtggagtttgtcgtccccaggactggcttttattgcaaactgtgtggacttttttacacatctgaggagaccgcgaaaatgtcccactgtcgttccgcggttcactacagaaacctacagaaatacctatctcaactggctgaggaaggcctcaaggagactgagggagctgactcaccaagaccggaggacagcgggattgtgcccagatttgagcgaaaaaaactgtag

SEQ ID NO: 49298 - DNA, 3378 bp, Artificial Sequence
  derived and/or modified sequence
atggtattggccgcagcgatgtctcaggatgcggatccaagtggcccagaacagccagatagagtggcttgctctgtgcccggagcacgggcttcaccagctccctctgggccaaggggaatgcaacagccccctcctcctccacagccaccaccgccaccacaggctggcctgccccaaatcatccagaacgccgctaagctgctggacaagaatcccttctccgtttctaacccaaaccccctgttaccgagccccgctagcctgcagctggcacagcttcaggcccaactgaccctgcatagactaaaactcgcccaaacagccgttacaaacaacactgcagcggcaacagtactgaaccaggtgctctccaaagtggcgatgtcccagcccctgttcaaccaactccgacacccttcagtgataacagggcctcacggtcatgccggtgtgccccagcatgcggcagccataccgtctactcgatttcctagtaacgcaatagctttttcaccccctagccaaaccagaggccctggtccctcgatgaacctgccaaatcagcctcccagcgccatggttatgcaccctttcactggagtgatgcctcagacccctggacagccggcagtcatcctggggatcgggaagacaggtcctgcgcctgcaacagcaggcttttatgaatacggaaaagcctcttccggacaaacttatggacctgagaccgatggtcagcctggctttcttcctagcagcgctagcacaagtggttccgtgacgtacgaagggcattactcgcacacgggtcaggacggtcaggccgcattctcaaaagacttttatggacccaactcacagggatctcatgttgcctcaggattccctgccgaacaagctggcggactgaaatctgaagtgggacccctccttcaaggcaccaactcccagtgggaaagcccacacggcttcagtggtcagagcaagcccgacctgaccgcaggcccaatgtggcctcctccacacaatcaaccctacgagttatatgatccagaagaaccaacatctgatcggactcccccatctttcggcggaagattaaataatagtaagcaaggattcatcggtgccggtcgcagagccaaagaagatcaggccctgctgtctgtacgccctctgcaagctcacgagctgaatgacttccatggagtggccccactacacttaccacatatctgttcaatttgcgacaaaaaagtgttcgacctcaaagactgggaactgcacgtgaagggcaaactgcacgcacaaaagtgtctcgtgttctccgagaacgcgggaatcaggtgtattttggggagcgcagaagggacgttatgtgcaagcccaaattctacagcagtttacaatccagccggaaatgaggactacgcctccaacctgggtacctcttacgttcctattcccgcacgctcctttacgcagagctctcccacgtttcccctggccagtgttggcaccacgttcgcccagcggaaaggtgccggaagagtcgtccacatctgtaacctgcccgaaggttcgtgcaccgaaaatgacgttatcaatctaggcttgccttttgggaaggttacgaattatatcttgatgaagagtaccaatcaggcattcctagaaatggcctatacggaggctgctcaagccatggtgcagtactatcaggaaaaaagcgctgtgatcaacggcgaaaaactcctaattcgcatgtctaagcggtacaaggagcttcagctgaaaaagcccggaaaggccgtggcagcgataattcaagacattcattcccaaagggaaagggatatgttccgggaggccgacagatatggcccagagaggccacgcagtcggagtccagtgtctcgttctctaagccccagatcacatacacccagtttcacctcctgttcctctagtcatagtccacctggtccatctagggctgactgggggaatggccgagactcctgggaacatagcccttacgccaggcgtgaggaagaacgagaccctgcaccctggcgcgataatggcgatgataaacgtgataggatggacccatgggctcacgaccggaaacatcaccctaggcagttggataaggccgagctggatgaacggccagaaggcggaaggccacatcgtgagaagtacccccgtagtgggtcacctaacttgccacactccgtaagctcctacaaaagccgggaggacggatactacaggaaggaaccgaaggccaagtgggacaaatacctcaagcagcagcaggacgctcctggacggagtcgccgtaaggatgaagcacgccttagggagagtcggcacccacaccctgatgacagtgggaaggaggacgggttaggtcccaaagtgaccagagccccagaaggtgctaaagccaagcaaaacgaaaagaataagaccaaacgtaccgaccgggatcaagagggcgcagatgaccggaaggaaaacactatggctgaaaatgaggctgggaaggaagaacaagagggcatggaggagagcccccagagtgtcggcagacaggagaaggaggccgagttctcagaccctgagaacacacgaactaaaaaagagcaggactgggagagtgaaagcgaggcagaaggggagtcatggtaccccacaaacatggaggaactggtgactgtggatgaggtgggagaggaggaggacttcatcgtcgagccagacatccccgaactggaggaaatcgtgccaatcgaccagaaagacaagatttgccccgaaacgtgcctttgcgtcaccacaacattagacctggatctggcacaggatttcccaaaagagggggtcaaggctgttggcaacggggcagctgagatttccctgaaatccccccgagaactgccgagcgcctccacgagttgtccatccgacatggatgtggaaatgcccggactgaacctggacgcagagcgcaaaccagccgaatcggagaccggtctgtctctcgaagatagtgattgctacgagaaggaggctaagggggtggaatcgtccgatgtgcacccagcccctacagtgcagcagatgtctagcccaaagccagccgaggagagagccaggcagccctctccgttcgtggatgactgcaagacccgagggacccccgaggatggcgcttgcgaggggagcccgcttgaagaaaaggcttctccacccatcgaaaccgacctgcagaaccaagcctgtcaggggtcagactctgatacacgcctggtatcggggtattcactgactcctcttgagaagacacccggaacgtggaaatag

SEQ ID NO: 49299 - DNA, 3684 bp, Artificial Sequence
  derived and/or modified sequence
atggtgctggccgccgccatgagccaggacgccgaccccagcggccccgagcagcccgacagagtggcctgcagcgtgcccggcgccagagccagccccgcccccagcggccccagaggcatgcagcagccccccccccccccccagccccccccccccccccaggccggcctgccccagatcatccagaacgccgccaagctgctggacaagaaccccttcagcgtgagcaaccccaaccccctgctgcccagccccgccagcctgcagctggcccagctgcaggcccagctgaccctgcacagactgaagctggcccagaccgccgtgaccaacaacaccgccgccgccaccgtgctgaaccaggtgctgagcaaggtggccatgagccagcccctgttcaaccagctgagacaccccagcgtgatcaccggcccccacggccacgccggcgtgccccagcacgccgccgccatccccagcaccagattccccagcaacgccatcgccttcagcccccccagccagaccagaggccccggccccagcatgaacctgcccaaccagccccccagcgccatggtgatgcaccccttcaccggcgtgatgccccagacccccggccagcccgccgtgatcctgggcatcggcaagaccggccccgcccccgccaccgccggcttctacgagtacggcaaggccagcagcggccagacctacggccccgagaccgacggccagcccggcttcctgcccagcagcgccagcaccagcggcagcgtgacctacgagggccactacagccacaccggccaggacggccaggccgccttcagcaaggacttctacggccccaacagccagggcagccacgtggccagcggcttccccgccgagcaggccggcggcctgaagagcgaggtgggccccctgctgcagggcaccaacagccagtgggagagcccccacggcttcagcggccagagcaagcccgacctgaccgccggccccatgtggccccccccccacaaccagccctacgagctgtacgaccccgaggagcccaccagcgacagaaccccccccagcttcggcggcagactgaacaacagcaagcagggcttcatcggcgccggcagaagagccaaggaggaccaggccctgctgagcgtgagacccctgcaggcccacgagctgaacgacttccacggcgtggcccccctgcacctgccccacatctgcagcatctgcgacaagaaggtgttcgacctgaaggactgggagctgcacgtgaagggcaagctgcacgcccagaagtgcctggtgttcagcgagaacgccggcatcagatgcatcctgggcagcgccgagggcaccctgtgcgccagccccaacagcaccgccgtgtacaaccccgccggcaacgaggactacgccagcaacctgggcaccagctacgtgcccatccccgccagaagcttcacccagagcagccccaccttccccctggccagcgtgggcaccaccttcgcccagagaaagggcgccggcagagtggtgcacatctgcaacctgcccgagggcagctgcaccgagaacgacgtgatcaacctgggcctgcccttcggcaaggtgaccaactacatcctgatgaagagcaccaaccaggccttcctggagatggcctacaccgaggccgcccaggccatggtgcagtactaccaggagaagagcgccgtgatcaacggcgagaagctgctgatcagaatgagcaagagatacaaggagctgcagctgaagaagcccggcaaggccgtggccgccatcatccaggacatccacagccagagagagagagacatgttcagagaggccgacagatacggccccgagagacccagaagcagaagccccgtgagcagaagcctgagccccagaagccacacccccagcttcaccagctgcagcagcagccacagcccccccggccccagcagagccgactggggcaacggcagagacagctgggagcacagcccctacgccagaagagaggaggagagagaccccgccccctggagagacaacggcgacgacaagagagacagaatggacccctgggcccacgacagaaagcaccaccccagacagctggacaaggccgagctggacgagagacccgagggcggcagaccccacagagagaagtaccccagaagcggcagccccaacctgccccacagcgtgagcagctacaagagcagagaggacggctactacagaaaggagcccaaggccaagtgggacaagtacctgaagcagcagcaggacgcccccggcagaagcagaagaaaggacgaggccagactgagagagagcagacacccccaccccgacgacagcggcaaggaggacggcctgggccccaaggtgaccagagcccccgagggcgccaaggccaagcagaacgagaagaacaagaccaagagaaccgacagagaccaggagggcgccgacgacagaaaggagaacaccatggccgagaacgaggccggcaaggaggagcaggagggcatggaggagagcccccagagcgtgggcagacaggagaaggaggccgagttcagcgaccccgagaacaccagaaccaagaaggagcaggactgggagagcgagagcgaggccgagggcgagagctggtaccccaccaacatggaggagctggtgaccgtggacgaggtgggcgaggaggaggacttcatcgtggagcccgacatccccgagctggaggagatcgtgcccatcgaccagaaggacaagatctgccccgagacctgcctgtgcgtgaccaccaccctggacctggacctggcccaggacttccccaaggagggcgtgaaggccgtgggcaacggcgccgccgagatcagcctgaagagccccagagagctgcccagcgccagcaccagctgccccagcgacatggacgtggagatgcccggcctgaacctggacgccgagagaaagcccgccgagagcgagaccggcctgagcctggaggacagcgactgctacgagaaggaggccaagggcgtggagagcagcgacgtgcaccccgcccccaccgtgcagcagatgagcagccccaagcccgccgaggagagagccagacagcccagccccttcgtggacgactgcaagaccagaggcacccccgaggacggcgcctgcgagggcagccccctggaggagaaggccagcccccccatcgagaccgacctgcagaaccaggcctgccaggaggtgctgacccccgagaacagcagatacgtggagatgaagagcctggaggtgagaagccccgagtacaccgaggtggagctgaagcagcccctgagcctgcccagctgggagcccgaggacgtgttcagcgagctgagcatccccctgggcgtggagttcgtggtgcccagaaccggcttctactgcaagctgtgcggcctgttctacaccagcgaggagaccgccaagatgagccactgcagaagcgccgtgcactacagaaacctgcagaagtacctgagccagctggccgaggagggcctgaaggagaccgagggcgccgacagccccagacccgaggacagcggcatcgtgcccagattcgagagaaagaagctgtag

SEQ ID NO: 49300 - DNA, 3378 bp, Artificial Sequence
  derived and/or modified sequence
atggtgctggccgccgccatgagccaggacgccgaccccagcggccccgagcagcccgacagagtggcctgcagcgtgcccggcgccagagccagccccgcccccagcggccccagaggcatgcagcagccccccccccccccccagccccccccccccccccaggccggcctgccccagatcatccagaacgccgccaagctgctggacaagaaccccttcagcgtgagcaaccccaaccccctgctgcccagccccgccagcctgcagctggcccagctgcaggcccagctgaccctgcacagactgaagctggcccagaccgccgtgaccaacaacaccgccgccgccaccgtgctgaaccaggtgctgagcaaggtggccatgagccagcccctgttcaaccagctgagacaccccagcgtgatcaccggcccccacggccacgccggcgtgccccagcacgccgccgccatccccagcaccagattccccagcaacgccatcgccttcagcccccccagccagaccagaggccccggccccagcatgaacctgcccaaccagccccccagcgccatggtgatgcaccccttcaccggcgtgatgccccagacccccggccagcccgccgtgatcctgggcatcggcaagaccggccccgcccccgccaccgccggcttctacgagtacggcaaggccagcagcggccagacctacggccccgagaccgacggccagcccggcttcctgcccagcagcgccagcaccagcggcagcgtgacctacgagggccactacagccacaccggccaggacggccaggccgccttcagcaaggacttctacggccccaacagccagggcagccacgtggccagcggcttccccgccgagcaggccggcggcctgaagagcgaggtgggccccctgctgcagggcaccaacagccagtgggagagcccccacggcttcagcggccagagcaagcccgacctgaccgccggccccatgtggccccccccccacaaccagccctacgagctgtacgaccccgaggagcccaccagcgacagaaccccccccagcttcggcggcagactgaacaacagcaagcagggcttcatcggcgccggcagaagagccaaggaggaccaggccctgctgagcgtgagacccctgcaggcccacgagctgaacgacttccacggcgtggcccccctgcacctgccccacatctgcagcatctgcgacaagaaggtgttcgacctgaaggactgggagctgcacgtgaagggcaagctgcacgcccagaagtgcctggtgttcagcgagaacgccggcatcagatgcatcctgggcagcgccgagggcaccctgtgcgccagccccaacagcaccgccgtgtacaaccccgccggcaacgaggactacgccagcaacctgggcaccagctacgtgcccatccccgccagaagcttcacccagagcagccccaccttccccctggccagcgtgggcaccaccttcgcccagagaaagggcgccggcagagtggtgcacatctgcaacctgcccgagggcagctgcaccgagaacgacgtgatcaacctgggcctgcccttcggcaaggtgaccaactacatcctgatgaagagcaccaaccaggccttcctggagatggcctacaccgaggccgcccaggccatggtgcagtactaccaggagaagagcgccgtgatcaacggcgagaagctgctgatcagaatgagcaagagatacaaggagctgcagctgaagaagcccggcaaggccgtggccgccatcatccaggacatccacagccagagagagagagacatgttcagagaggccgacagatacggccccgagagacccagaagcagaagccccgtgagcagaagcctgagccccagaagccacacccccagcttcaccagctgcagcagcagccacagcccccccggccccagcagagccgactggggcaacggcagagacagctgggagcacagcccctacgccagaagagaggaggagagagaccccgccccctggagagacaacggcgacgacaagagagacagaatggacccctgggcccacgacagaaagcaccaccccagacagctggacaaggccgagctggacgagagacccgagggcggcagaccccacagagagaagtaccccagaagcggcagccccaacctgccccacagcgtgagcagctacaagagcagagaggacggctactacagaaaggagcccaaggccaagtgggacaagtacctgaagcagcagcaggacgcccccggcagaagcagaagaaaggacgaggccagactgagagagagcagacacccccaccccgacgacagcggcaaggaggacggcctgggccccaaggtgaccagagcccccgagggcgccaaggccaagcagaacgagaagaacaagaccaagagaaccgacagagaccaggagggcgccgacgacagaaaggagaacaccatggccgagaacgaggccggcaaggaggagcaggagggcatggaggagagcccccagagcgtgggcagacaggagaaggaggccgagttcagcgaccccgagaacaccagaaccaagaaggagcaggactgggagagcgagagcgaggccgagggcgagagctggtaccccaccaacatggaggagctggtgaccgtggacgaggtgggcgaggaggaggacttcatcgtggagcccgacatccccgagctggaggagatcgtgcccatcgaccagaaggacaagatctgccccgagacctgcctgtgcgtgaccaccaccctggacctggacctggcccaggacttccccaaggagggcgtgaaggccgtgggcaacggcgccgccgagatcagcctgaagagccccagagagctgcccagcgccagcaccagctgccccagcgacatggacgtggagatgcccggcctgaacctggacgccgagagaaagcccgccgagagcgagaccggcctgagcctggaggacagcgactgctacgagaaggaggccaagggcgtggagagcagcgacgtgcaccccgcccccaccgtgcagcagatgagcagccccaagcccgccgaggagagagccagacagcccagccccttcgtggacgactgcaagaccagaggcacccccgaggacggcgcctgcgagggcagccccctggaggagaaggccagcccccccatcgagaccgacctgcagaaccaggcctgccagggcagcgacagcgacaccagactggtgagcggctacagcctgacccccctggagaagacccccggcacctggaagtag

SEQ ID NO: 49301 - protein, 1135 aa, Artificial Sequence
  derived and/or modified sequence
MADLSLADALTEPSPDIEGEIKRDFIATLEAEAFDDVVGETVGKTDYIPLLDVDEKTGNSESKKKPCSETSQIEDTPSSKPTLLANGGHGVEGSDTTGSPTEFLEEKMAYQEYPNSQNWPEDTNFCFQPEQVVDPIQTDPFKMYHDDDLADLVFPSSATADTSIFAGQNDPLKDSYGMSPCNTAVVPQGWSVEALNSPHSESFVSPEAVAEPPQPTAVPLELAKEIEMASEERPPAQALEIMMGLKTTDMAPSKETEMALAKDMALATKTEVALAKDMESPTKLDVTLAKDMQPSMESDMALVKDMELPTEKEVALVKDVRWPTETDVSSAKNVVLPTETEVAPAKDVTLLKETERASPIKMDLAPSKDMGPPKENKKETERASPIKMDLAPSKDMGPPKENKIVPAKDLVLLSEIEVAQANDIISSTEISSAEKVALSSETEVALARDMTLPPETNVILTKDKALPLEAEVAPVKDMAQLPETEIAPAKDVAPSTVKEVGLLKDMSPLSETEMALGKDVTPPPETEVVLIKNVCLPPEMEVALTEDQVPALKTEAPLAKDGVLTLANNVTPAKDVPPLSETEATPVPIKDMEIAQTQKGISEDSHLESLQDVGQSAAPTFMISPETVTGTGKKCSLPAEEDSVLEKLGERKPCNSQPSELSSETSGIARPEEGRPVVSGTGNDITTPPNKELPPSPEKKTKPLATTQPAKTSTSKAKTQPTSLPKQPAPTTIGGLNKKPMSLASGLVPAAPPKRPAVASARPSILPSKDVKPKPIADAKAPEKRASPSKPASAPASRSGSKSTQTVAKTTTAAAVASTGPSSRSPSTLLPKKPTAIKTEGKPAEVKKMTAKSVPADLSRPKSTSTSSMKKTTTLSGTAPAAGVVPSRVKATPMPSRPSTTPFIDKKPTSAKPSSTTPRLSRLATNTSAPDLKNVRSKVGSTENIKHQPGGGRAKVEKKTEAAATTRKPESNAVTKTAGPIASAQKQPAGKVQIVSKKVSYSHIQSKCGSKDNIKHVPGGGNVQIQNKKVDISKVSSKCGSKANIKHKPGGGDVKIESQKLNFKEKAQAKVGSLDNVGHLPAGGAVKIETYRLTFRANARARTDHGADIVSRPPHFPGGPNSGSRVLGPLSRAVH

SEQ ID NO: 49302 - DNA, 3408 bp, Artificial Sequence
  derived and/or modified sequence
atggccgacttgtcgctggctgatgcgttgaccgagccctcccctgacatcgagggggaaattaagagagattttatcgcaacactcgaggctgaggctttcgatgatgtggtcggggagaccgtcggaaagaccgactatatcccccttcttgatgtggatgaaaaaacaggaaacagcgagtctaaaaagaagccatgctcagaaacaagccagatagaagacacacccagctccaagccaaccctcctcgccaacggtgggcatggagtggagggctcggacacaaccgggtccccaacagagtttctagaggaaaagatggcatatcaagaataccctaatagtcagaactggccagaagatactaatttttgctttcaacccgagcaagtggtcgatcctatccaaaccgacccctttaaaatgtatcatgacgacgacctggcagacctcgtgtttcctagttcagcgacggctgacacctccatcttcgcgggccaaaacgacccactaaaagactcttacggcatgtcaccttgcaacactgccgtggtgccacagggttggtcggtcgaagctttgaattctcctcacagcgaatcctttgtgtcacccgaggccgtggccgagcccccgcagccgactgcagtaccactggagctggctaaagaaatcgagatggccagcgaagagcgcccaccggcacaggctctcgaaataatgatgggtcttaagacaactgatatggctccttccaaggaaaccgagatggccctggccaaagatatggccttagccactaaaacggaagtggcccttgcaaaagatatggaatctcccactaagttggacgtgacgctggccaaggatatgcagccatccatggagtctgacatggcacttgtgaaggatatggagttgcccacagaaaaggaggtcgcgctggtgaaggatgtacgctggcccacagaaactgatgtctccagcgccaagaacgtggtacttccaactgagaccgaagtggcccctgctaaggatgtgactcttcttaaggagaccgagcgagcttctcccattaagatggacctggccccctcaaaggacatggggccccctaaggagaacaaaaaagagaccgagcgtgccagcccaatcaaaatggaccttgcacccagtaaagacatggggccccccaaggagaataagatcgtgccagcaaaagacctcgttctgttgtctgaaatcgaagtggcacaagcaaatgacattattagcagtaccgaaataagctctgcagagaaggttgccctgagctctgagacagaagtggcactggctagggacatgaccttgccacccgaaactaatgtgatcctgaccaaagacaaagctttgccgctcgaggcagaggtcgctcctgtcaaggacatggcccagttgccagagaccgagattgccccggccaaggatgttgcgccttcaactgttaaggaggtcgggctgctgaaagacatgtccccattgtcagagacagagatggccttaggaaaggacgtgaccccaccaccagagaccgaggtagttttaattaagaatgtgtgccttccacccgaaatggaggtggctcttacagaggatcaggtaccggctctgaagaccgaggcgcctctggccaaagatggtgtgcttaccctggcaaataatgtgacgccagcgaaggatgtccctccactttcagagacagaagctaccccagtgcctataaaggacatggaaatcgcccaaacccaaaagggcatttcggaggactcacatctagaatcacttcaggatgtgggccagagcgcagcgccaacctttatgatctcaccagaaaccgtgaccggaacgggcaaaaaatgctcactccctgccgaggaggatagtgtcttggagaaactgggagagagaaaaccttgtaattcacagccaagtgaactgagttctgagacttccggaatcgcccggcccgaagaaggccgaccagtcgtatctggaaccggtaatgatattacgacacctcccaataaggaactcccacctagccccgagaagaaaaccaagcccctggccaccacccagcccgcaaaaacgtctacgtctaaggccaagactcagccgacgtcactgcctaagcagccagctcctaccaccatagggggcctcaacaagaaacccatgtcgctggcttccggacttgtccccgcggccccccctaagaggcctgcagtggcaagcgccaggcctagtatcctgccctcaaaggatgtgaaacccaaacccatcgcggatgcaaaggcgccggaaaagcgagccagtccttcaaaacccgcgtcagctccggcctcacgctctggaagcaaaagtacccagacggtggccaagaccacaaccgcggcagctgtcgctagcaccggccccagctcgagaagcccatccacattactccccaagaagcctaccgccattaaaactgaaggtaagcctgcggaagtgaaaaagatgacagccaagtccgtgccagctgatctcagtagacccaagagcacttccactagttccatgaagaagacaaccacactgtccggcactgctccggctgccggagtcgtcccatccagagtgaaagctactcctatgccctcccgcccgagtacaacgccatttattgataaaaagcccacctctgcaaaacccagcagtactacacctaggctgtcgagactggccactaatacctctgctccagacctaaaaaacgtgcgctcaaaggtggggtccactgaaaacatcaagcatcagcctggaggcgggcgtgctaaggtggagaagaaaaccgaggccgccgccacaactcggaagcccgaatcaaacgcagttaccaagacagccgggcctatcgcatcagcgcagaaacagccagccggcaaggttcagatcgtgagtaaaaaagttagctatagccacattcaaagcaagtgcggctcaaaggataatattaaacatgttcctgggggcggaaacgtgcaaattcagaacaagaaggtcgacatctcgaaggtgagttcaaagtgtggctctaaagctaacatcaagcacaaacctggaggaggcgatgttaaaattgaatctcagaagctgaacttcaaagaaaaggcccaggcgaaagtcggcagcttagacaatgtgggacaccttcctgcggggggtgctgtgaagatcgagacgtaccgcttgaccttccgggcaaatgcgcgggcaaggacggatcacggcgccgacatagtcagcaggcctcctcactttcctggcggccccaacagtgggtcccgagtgctgggtcccctttcccgagccgtacactag

SEQ ID NO: 49303 - DNA, 3408 bp, Artificial Sequence
  derived and/or modified sequence
atggctgacctgagcctggctgatgccctgacagagcccagcccagacattgaaggagagatcaagagggacttcatcgccaccctggaggccgaggcctttgatgatgtggtgggggagaccgtgggcaagacagactacatccccctgctggatgtggatgagaagacaggcaacagcgagagcaagaagaagccctgcagcgagaccagccagatcgaggacacccccagcagcaagcccaccctgctggccaacggcggccatggagtggagggcagtgacaccaccggcagccccacagagttcctggaggagaagatggcctaccaggagtaccccaacagccagaactggccagaggacaccaacttctgcttccagcctgagcaggtggtggaccccatccagacagaccccttcaagatgtaccatgatgatgacctggccgacctggtgttccccagcagcgccacagctgacaccagcatctttgctggccagaatgaccccctgaaggacagctatggcatgagcccctgcaacacagctgtggtgccccagggctggagcgtggaggccctgaacagcccccacagcgagagctttgtgtccccagaggccgtggccgagcccccccagcccacagctgtgcccctggagctggccaaggagattgagatggccagcgaggagcggcccccagcccaggccctggagatcatgatgggcctgaagaccacagacatggcccccagcaaggagacagagatggccctggccaaggacatggccctggccaccaagacagaggtggccctggccaaggacatggagagccccaccaagctggatgtgaccctggccaaggacatgcagcccagcatggagagtgacatggccctggtgaaggacatggagctgcccacagagaaggaggtggccctggtgaaggatgtgcgctggcccacagaaacagatgtgagcagcgccaagaatgtggtgctgcccacagaaacagaggtggccccagccaaggatgtgaccctgctgaaggagacagagcgggccagccccatcaagatggacctggcccccagcaaggacatgggcccccccaaggagaacaagaaggagacagagcgggccagccccatcaagatggacctggcccccagcaaggacatgggcccccccaaggagaacaagatcgtgcctgccaaggacctggtgctgctgtctgaaattgaggtggcccaggccaatgacatcatcagcagcacagagatcagcagcgctgagaaggtggccctgagcagcgagacagaggtggccctggcccgggacatgaccctgcccccagagaccaacgtcatcctgaccaaggacaaggccctgcccctggaggccgaggtggcccctgtgaaggacatggcccagctgcctgagacagagatcgccccagccaaggatgtggcccccagcacagtgaaggaggtgggcctgctgaaggacatgagccccctgtctgaaacagagatggccctgggcaaggatgtgaccccacctcctgagacagaggtggtgctgatcaagaatgtgtgcctgcccccagagatggaggtggccctgacagaggaccaggtgcctgccctgaagacagaggcccccctggccaaggatggagtgctgaccctggccaacaacgtgaccccagccaaggatgtgccccccctgtctgaaacagaggccacccctgtgcccatcaaggacatggagatcgcccagacccagaagggcatcagcgaggacagccacctggagagcctgcaggatgtgggccagagcgctgcccccaccttcatgatcagccctgagaccgtgactggaacaggcaagaagtgcagcctgcctgcagaagaagattctgtgctggagaagctgggggagaggaagccctgcaacagccagcccagcgagctgagcagcgagaccagcggcatcgcccggcctgaggagggccggcctgtggtgtctggaactggaaatgacatcaccaccccacccaacaaggagctgccccccagccctgagaagaagaccaagcccctggccaccacccagcctgccaagaccagcaccagcaaggccaagacccagcccaccagcctgcccaagcagcctgcccccaccaccatcggcggcctgaacaagaagcccatgagcctggccagcggcctggtgcctgctgccccacccaagaggcctgctgtggccagcgcccggcccagcatcctgcccagcaaggatgtgaagcccaagcccatcgcagatgccaaggcccctgagaagagggccagccccagcaagccagccagcgccccagccagccgcagcggcagcaagagcacccagacagtggccaagaccaccacagctgctgctgtggccagcacaggccccagcagccgcagccccagcaccctgctgcccaagaagcccacagccatcaagacagagggcaagccagctgaggtgaagaagatgacagccaagtctgtgcctgctgacctgagccggcccaagagcaccagcaccagctccatgaagaagaccaccaccctgagcggcacagccccagctgctggggtggtgcccagccgggtgaaggccacccccatgcccagccggcccagcaccacccccttcatcgacaagaagcccaccagcgccaagcccagcagcaccaccccccggctgagccggctggccaccaacaccagcgccccagacctgaagaatgtgcgcagcaaggtgggcagcacagagaacatcaagcaccagcccggcggcggccgggccaaggtggagaagaagacagaggccgccgccaccaccaggaagccagagagcaatgctgtgaccaagacagctggccccatcgccagcgcccagaagcagcctgctgggaaggtgcagatcgtgtccaagaaggtgtcctacagccacatccagagcaaatgtggcagcaaggacaacatcaagcacgtgcctgggggcggcaatgtgcagatccagaacaagaaggtggacatcagcaaggtgagcagcaaatgtggcagcaaggccaacatcaagcacaagccaggcggcggagatgtgaagattgagagccagaagctgaacttcaaggagaaggcccaggccaaggtgggcagcctggacaacgtgggccacctgcctgctgggggcgctgtgaagattgagacctaccgcctgaccttccgggccaatgcccgggccaggacagaccatggagctgacatcgtgtccaggcctccccacttccctgggggccccaacagcggcagccgggtgctgggccccctgagcagagctgtgcactag

SEQ ID NO: 49304 - DNA, 5590 bp, Artificial Sequence
  derived and/or modified sequence
ctcctcacggctcttcccggcgctctcctggctcccttctgccccagctccgtctcggcggcggcgggcagttgcagtggtgcagaatggctgacctcagtcttgcagatgcattaacagaaccatctccagacattgagggagagataaagcgggacttcattgccacactagaggcagaggcctttgatgatgttgtgggagaaactgttggaaaaacagactatattcctctcctggatgttgatgagaaaaccgggaactcagagtcaaagaagaaaccgtgctcagaaactagccagattgaagatactccatcttctaaaccaacactcctagccaatggtggtcatggagtagaagggagcgatactacagggtctccaactgaattccttgaagagaaaatggcctaccaggaatacccaaatagccagaactggccagaagataccaacttttgtttccaacctgagcaagtggtcgatcctatccagactgatccctttaagatgtaccatgatgatgacctggcagatttggtctttccctccagtgcgacagctgatacttcaatatttgcaggacaaaatgatcccttgaaagacagttacggtatgtctccctgcaacacagctgttgtacctcaggggtggtctgtggaagccttaaactctccacactcagagtcctttgtttccccagaggctgttgcagaacctcctcagccaacggcagttcccttagagctagccaaggagatagaaatggcatcagaagagaggccaccagcacaagcattggaaataatgatgggactgaagactactgacatggcaccatctaaagaaacagagatggccctcgccaaggacatggcactagctacaaaaaccgaggtggcattggctaaagatatggaatcacccaccaaattagatgtgacactggccaaggacatgcagccatccatggaatcagatatggccctagtcaaggacatggaactacccacagaaaaagaagtggccctggttaaggatgtcagatggcccacagaaacagatgtatcttcagccaagaatgtggtactgcccacagaaacagaggtagccccagccaaggatgtgacactgttgaaagaaacagagagggcatctcctataaaaatggacttagccccttccaaggacatgggaccacccaaagaaaacaagaaagaaacagagagggcatctcctataaaaatggacttggctccttccaaggacatgggaccacccaaagaaaacaagatagtcccagccaaggatttggtattactctcagaaatagaggtggcacaggctaatgacattatatcatccacagaaatatcctctgctgagaaggtggctttgtcctcagaaacagaggtagccctggccagggacatgacactgcccccggaaaccaacgtgatcttgaccaaggataaagcactacctttagaagcagaggtggccccagtcaaggacatggctcaactcccagaaacagaaatagccccggccaaggatgtggctccgtccacagtaaaagaagtgggcttgttgaaggacatgtctccactatcagaaacagaaatggctctgggcaaggatgtgactccacctccagaaacagaagtagttctcatcaagaacgtatgtctgcctccagaaatggaggtggccctgactgaggatcaggtcccagccctcaaaacagaagcacccctggctaaggatggggttctgaccctggccaacaatgtgactccagccaaagatgttccaccactctcagaaacagaggcaacaccagttccaattaaagacatggaaattgcacaaacacaaaaaggaataagtgaggattcccatttagaatctctgcaggatgtggggcagtcagctgcacctactttcatgatttcaccagaaaccgtcacaggaacggggaaaaagtgcagcttgccggccgaggaggattctgtgttagaaaaactaggggaaaggaaaccatgcaacagtcaaccttctgagctttcttcagagacctcaggaatagccaggccagaagaaggaaggcctgtggtgagtgggacaggaaatgacatcaccaccccaccgaacaaggagctcccaccaagcccagagaagaaaacaaagcctttggccaccactcaacctgcaaagacttcaacatcgaaagccaaaacacagcccacttctctccctaagcagccagctcccaccaccattggtgggttgaataaaaaacccatgagccttgcttcaggcttagtgccagctgccccacccaaacgccctgccgtcgcctctgccaggccttccatcttaccttcaaaagacgtgaagccaaagcccattgcagatgcaaaggctcctgagaagcgggcctcaccatccaagccagcttctgccccagcctccagatctgggtccaagagcactcagactgttgcaaaaaccacaacagctgctgctgttgcctcaactggcccaagcagtaggagcccctccacgctcctgcccaagaagcccactgccattaagactgagggaaaacctgcagaagtcaagaagatgactgcaaagtctgtaccagctgacttgagtcgcccaaagagcacctccaccagttccatgaagaaaaccaccactctcagtgggacagcccccgctgcaggggtggttcccagccgagtcaaggccacacccatgccctcccggccctccacaactcctttcatagacaagaagcccacctcggccaaacccagctccaccaccccccggctcagccgcctggccaccaatacttctgctcctgatctgaagaatgtccgctccaaggttggctccacggaaaacatcaagcatcagcctggaggaggccgggccaaagtagagaaaaaaacagaggcagctgctacaacccgaaagcctgaatctaatgcagtcactaaaacagccggcccaattgcaagtgcacagaaacaacctgcggggaaagtccagatagtctccaaaaaagtgagctacagccatattcagtccaagtgtggttccaaggacaatattaagcatgtccctggaggtggtaatgttcagattcagaacaagaaagtggacatctctaaggtctcctccaagtgtgggtctaaggctaacatcaagcacaagcctggtggaggagatgtcaagattgaaagtcagaagttgaacttcaaggagaaggcccaggccaaggtgggatccctcgataatgtgggccacctacctgcaggaggtgctgtgaagattgagacctacaggctgacgttccgggcaaatgccagggcccgcaccgaccacggggccgacattgtctcccgccccccacacttccctggcggccccaactcgggctcccgggtccttggccccctttcccgggctgtccactagaccagtgagcgcttgggcgccgtgctgggcagcccgctaggctcgccttccctcctgctttgcgtgcccggggcagcagcagccctgccccacacctcctctcactccccagcctgggcccatctccctgctttggtcttgccccatcactgcgccactgctccgtggaggaggttgggagggggttggggtggttgaggctaagttgggatctaggagaggagaaccagattctatcctcatctttttttggttctttggtccaaacccaaaagaaactgacatgccctcccttctccctggatctacctggagggaagagtggaggtggattccgagtggtgacaggacgctgaccgtggagcttaagccactgcctctccctctggtcccacaaatgggcgcccccccctccccatgcaggtggtgtcgggcccttcttgctgccctgccccaagttgggggtcagtgctgcctgtccccatgcttaacatacccgcctagctgctgtcacatttttcttgttttgtccttttatttttttctaataacctaaaaactggcaaaatagttctgcaggttgaagccatgtctacatgaaagtcctcagtaagtgttagagggaacagggcggagatatccttatgccacccccgctggaggatgtgggcagcttagggccctggaggcggtgcggcagggaagaggggtgcagaggctgtggctggtgagccggtcaggcacacaaggggcccttggagcgtggactggttggttttgccattttgttgtgtgtatgctgcttttcttttctaaccaagaggctggttttggcatctctgtcccattccctgggatctggtggtcagccctaggataaaaagccagggctggagaacaagaaagggccaggagatggaattccttcaggccggcacccacaccctaggacatgtaagccctcatgtccaagggagcctcatgcagatagtaggaaatcaggtctggaaatttaaaaataaaaggcatgagactaaggctatctgcttcccttatgccctgactggagaggggagggaggagaggcaaggcccacagagggcatcccagctaggccttgggatggctgcagtgaggagaaatcccgggaactgtattgacacaaagattcttattgcacttgtattttttgtattaaagtttgcatggtttctaataaaggattcaaacataagtttgtagtgaaatggcctgggagattccaagggcttctctggagggggattggctgcagtgtagatttgcctctgaggaggctgccccagacttggcctcctcatgccccctcctgacctctgcccttctctggtcctggcatccctggagaaggtaggggtcttgacctaagtttagatttgatctccatgtgcagggaggctgtcctgggcctgacaggtcctccccctttctgaggtagcagtgccttgtggaggtttgacaccatgtccctagctccccaagcacacaccaggaaactgcaggggctcacggaggaagtgctgcctgggccagggggaccagctttcctccgtagagaccatgtgcagaacacttctgctgtgccaagaacatgagggagccagtgttttgtcagcaggaagaaagggcctgctgggatgaaagtgggaaggaaacagggttgcgtagtcaggagacacctcaggggcaacagcacaggcccagagtacctgctgcctccactgcgtctgtcctggggtcatgaggatgctgaggttgacgacaggttccaggtcctttcactcctttggccaaaggttgggggtaggtggcccaagtggcgtgctctctaggtagacaacaggagtggtcagagttccctcaaaggatcctccactccagagcacctgagaaggccgggaccagaggccctgtgtgatgtgtactccgcagctgtttggggtgggacatttctgtacttctcgatttgcttatggctcagccattacctgtgtcagtccatgattctgttgtaacagttttaagagtaaataaataaagctgcctgatgtcccatc

SEQ ID NO: 49305 - DNA, 3408 bp, Artificial Sequence
  derived and/or modified sequence
atggccgacctgagcctggccgacgccctgaccgagcccagccccgacattgagggcgagattaagcgcgactttatcgccaccctggaggccgaagcctttgacgacgtggtgggcgagacggttgggaagaccgattacatcccgttgctggatgtggacgagaagacgggaaattcggagtcgaaaaagaagccatgctcagaaacgtcacagattgaagacacgccgagtagcaaacccacgttattggccaacggcgggcacggtgtggagggcagcgacaccactgggagcccaactgaatttcttgaggagaagatggcttaccaggagtatcctaactcacagaattggccggaagataccaacttttgctttcagccggagcaagtggtggaccccattcagactgatcccttcaaaatgtaccatgatgacgatctcgcggacttggtcttcccttcctcagccactgctgacacgtccatcttcgctggacaaaatgacccactcaaagattcttacgggatgagcccatgtaacactgccgtcgtccctcagggttggtctgttgaggcgctaaattcaccccactccgagtcttttgtgtcccctgaagccgtcgccgagcctcctcaacccacagccgtgccccttgaactcgcgaaagagattgagatggcttctgaggagcgccccccagcacaggcactcgaaataatgatggggctgaagaccaccgacatggccccatccaaggaaaccgagatggctcttgccaaggacatggccctcgccacgaagaccgaggtggctctggcgaaagacatggaatcacccactaaactggatgtaacccttgctaaggacatgcagccctcaatggaatccgacatggccctggtcaaggatatggagctcccaaccgagaaggaagttgcactagtaaaggacgtacgatggcctaccgaaaccgacgtcagtagtgccaagaatgttgtgcttcccaccgaaacagaagtagcccctgccaaagacgtgactctgctgaaggagacagagcgggccagcccgattaagatggacctggccccatctaaagacatgggaccacctaaagagaataagaaagagacagaaagagcttctcccataaagatggatctggccccctccaaggacatgggtcctcccaaggagaacaaaatagtgcctgccaaggacctggtgctgctgtctgaaatcgaagttgcccaagctaatgatattatatcaagcactgagatctctagcgccgagaaggtggccctgagcagcgagaccgaagtggctctcgctagagatatgacactgccacccgagaccaacgttatcttaacgaaagacaaggctctgcccctggaagcggaggtcgcgcccgtgaaggacatggcccagttacccgagaccgaaatagcgccggctaaggatgtggctccatccaccgtgaaggaggtgggcctcctcaaagatatgtctcctctgtcagagaccgaaatggccctcgggaaggacgtgaccccacctcccgaaacggaagtcgtgcttatcaagaatgtgtgtctgccaccggaaatggaagtggcattgacagaagaccaggttccagccctgaagactgaagcccccctcgctaaggacggtgtcttgactctcgctaacaatgtcacacccgccaaggatgttccccctttatcggagactgaggctacccctgtcccaataaaggatatggaaattgctcagacacagaaagggatttctgaagacagtcacctggagagcctgcaggatgtcggccagtcggcagctccaacatttatgataagcccggaaacggtcaccggcactggcaaaaagtgttcgctacccgccgaggaggacagcgtgcttgagaaactgggcgaaaggaagccgtgtaacagccaaccgtccgagctgtcttcagaaacatccggcatcgctcgccccgaagaggggcgacccgtcgtcagtgggactgggaacgatatcactacacctcccaacaaagaattaccaccgagccctgagaaaaagactaaacctctcgccactacacagcccgctaagacttcgacaagcaaggcaaaaactcagcccacctctttgcctaagcagcctgcccccactacaatcggtgggctgaataagaaacctatgtctctggcttccgggttagtgcctgccgcccctccaaaaagacctgccgtggcatccgctcgtccatctatactcccatccaaggatgtgaaacctaagcccattgcagacgccaaggctcccgaaaaaagagccagccccagcaagcccgccagcgccccagcgtctaggagcggctcaaaaagcacacagaccgtggctaaaaccaccacagccgccgcggtggcctccaccgggccctcaagccgatccccttccaccctgttgcccaaaaaacccaccgccatcaaaacagagggtaagccagccgaggtgaaaaagatgacagccaagagcgtgccagccgaccttagccgcccaaaatccacttccacatcttccatgaagaagactaccaccctgagtgggacagcccccgcggccggagttgttcccagccgagttaaagccacccccatgccatcccgcccttctaccacaccctttattgataagaagcccacatctgccaaaccatcaagtaccaccccgcgactgagcaggcttgcaactaacacttctgccccagatcttaagaatgtaagatcaaaggtgggcagtaccgagaacattaagcatcagcccggaggcgggcgcgcaaaagttgagaagaagaccgaggccgctgccaccacaaggaaacctgaatctaacgctgtgactaagaccgccggacccatcgcctctgcccagaagcagccagccggtaaggttcagatcgtgtctaagaaagtaagttacagccacattcaaagtaagtgcgggtctaaggataatatcaagcacgtacccggcgggggtaatgtccagatccagaataaaaaggtggacattagtaaggtgtcctctaaatgcggttccaaagccaacatcaagcataagcccggtggcggtgacgtcaagatcgagtcgcagaaactgaatttcaaggagaaagcccaagccaaggtaggaagcctcgacaatgtgggtcatttacccgctggcggagctgtgaagattgagacgtaccggctcacctttagagctaatgcccgcgcgcggacagatcacggagcagacattgtgagtcgcccccctcactttcccggcggaccaaattccggttcccgggtgctgggacctctctctcgggctgttcactag

SEQ ID NO: 49306 - DNA, 3408 bp, Artificial Sequence
  derived and/or modified sequence
atggccgacctgagcctggccgatgctctgacagagcctagccccgatatcgaaggggaaattaagagggacttcatcgccaccttagaagccgaggccttcgacgacgtggtgggcgaaaccgtgggaaaaacagattatattcccctcctggacgtcgatgagaaaactggtaactcagaatcaaagaagaagccatgtagcgagacatcccagatcgaagatacaccttctagtaagccaacattgcttgccaacggagggcatggggtggaggggtctgataccacaggaagtccaacagaatttctggaagagaaaatggcctaccaagagtaccccaactcgcagaactggcccgaagacactaacttttgctttcagcccgagcaggtcgtggaccccatacagactgatccattcaagatgtaccacgatgatgaccttgcggaccttgttttcccatctagcgccacagcagatacgagtattttcgccggacagaatgaccccctgaaggattcttatggcatgtctccttgtaacaccgcagtggtgcctcaggggtggagcgtcgaagccctgaactctcctcactctgagtcgttcgtcagtcccgaagccgtagccgagccaccccaaccaaccgcggtcccactggagctcgctaaagagatagagatggcatcagaagaacgtcctcccgcacaggccttggaaattatgatggggctcaaaacgaccgatatggccccatccaaagaaaccgaaatggcactcgccaaagacatggcgttagctaccaagactgaggttgctcttgctaaggacatggagagcccaactaaactggatgttacgctggctaaagacatgcagccctctatggagagtgacatggcgctggtgaaggacatggaactacccactgaaaaagaagtggcgctcgttaaggatgtgaggtggccaaccgaaacagatgtgagcagcgctaaaaatgttgtacttccgactgagacagaggtggcacccgctaaggacgtgacgctgctgaaagagacagaaagggcttcccctattaaaatggacctggcaccatctaaagatatggggccaccaaaggagaataagaaggagactgaacgtgctagcccgattaaaatggatcttgcaccatccaaagacatggggcctcccaaggagaacaagatcgtgccggcaaaagacttggtactcctgtctgagatcgaagtcgctcaggccaacgatattatctccagcacagagatctcaagtgccgagaaagtggcactgtcaagtgaaactgaagtggccttagctagggacatgacactaccacctgaaacaaatgtcattctgactaaggacaaggctctgcctcttgaggccgaggtggcacccgtgaaggatatggcccaattgccagaaacagaaattgcccctgctaaagacgtagctccaagcactgttaaggaggttggattgctcaaagacatgtctcccctgtctgaaacagaaatggctctgggtaaggatgtgactcctccgccagaaaccgaggtggtactcattaaaaatgtttgcctgcccccagagatggaggttgccctgactgaggaccaagtacccgcattaaagacggaggcccctttggccaaagacggagtgttaaccctcgcgaataatgtgacccccgctaaagacgtgcctcccttgtccgaaactgaggccacccccgtgcctatcaaggacatggagatcgcccaaactcagaagggaatcagcgaggattcacacctcgagagcttgcaagatgtcggccagtcagctgctccgaccttcatgatcagccctgaaactgtgactggcaccggtaaaaagtgctctttacccgcagaggaggattccgtgctcgagaagttaggagagaggaagccatgtaattctcagccttccgaactgtcaagcgagacttcaggcattgcacgacccgaggaaggcaggcccgtggtgtccgggaccggaaatgatattacgaccccaccaaacaaagagctgcctcctagccctgaaaagaaaacgaaacccctggctacgacgcagcccgctaagaccagtaccagtaaggctaaaacgcaacctacctcactcccaaaacagcctgcccctacaacaatcggcggactgaataagaagcccatgtctctggcgtccggattagtcccagctgcgccacccaaaaggcctgcagtggcttcagctcgcccttcaatcctcccaagcaaggatgtgaagccaaagcccatcgctgatgccaaagccccagaaaaaagagcttccccttctaagcccgcatccgcacctgcaagccggagcgggtccaagagtactcaaacagtggctaagacaaccactgccgcagctgtcgcatcaaccgggccttctagtagatccccttccacactgctgccgaagaaaccaaccgccatcaagaccgagggcaaacccgcagaggtgaagaagatgacggccaagtctgtgccggctgacctgtctcggcctaaatccactagcacatcctccatgaagaagacaaccaccctttctggcacagcaccagcagcaggcgtcgtgccgtctcgcgtgaaggcgactccaatgccatccaggccctctactacgcccttcattgacaaaaaaccaacctctgcaaagccaagctccacaacccccaggctgtcacgactcgctactaatacttccgcccctgatctgaaaaacgtcagatccaaagtcggatcgaccgaaaacattaagcatcaaccgggtggcggaagggctaaggttgaaaaaaaaaccgaggccgctgcaaccacaaggaaacccgaatctaatgcagtcacaaagactgcagggccaattgcttcagctcagaaacagcccgcaggcaaagtgcagatcgtttcaaagaaggtgtcgtacagtcatattcagagtaaatgtggatcaaaggataatattaaacatgtgcccggagggggtaatgtgcaaatccaaaacaaaaaggtggatatttctaaggtgagctccaagtgcggctcgaaagctaacataaagcataaaccgggaggaggcgatgttaagattgagtcacagaaactgaacttcaaggagaaggctcaggctaaggtgggctctctcgacaatgtaggacatctgccagctggcggtgccgtgaaaattgagacctaccgccttaccttccgcgcaaatgcgcgtgcgagaaccgaccacggcgctgatatcgtgtctcgccctccccatttccccggaggtcccaattccggctctcgggtgctgggtcctctttcacgggcagtccactag

SEQ ID NO: 49307 - DNA, 3408 bp, Artificial Sequence
  derived and/or modified sequence
atggccgacctgagcctggccgacgccctgaccgagcccagccccgacatcgagggcgagatcaagagagacttcatcgccaccctggaggccgaggccttcgacgacgtggtgggcgagaccgtgggcaagaccgactacatccccctgctggacgtggacgagaagaccggcaacagcgagagcaagaagaagccctgcagcgagaccagccagatcgaggacacccccagcagcaagcccaccctgctggccaacggcggccacggcgtggagggcagcgacaccaccggcagccccaccgagttcctggaggagaagatggcctaccaggagtaccccaacagccagaactggcccgaggacaccaacttctgcttccagcccgagcaggtggtggaccccatccagaccgaccccttcaagatgtaccacgacgacgacctggccgacctggtgttccccagcagcgccaccgccgacaccagcatcttcgccggccagaacgaccccctgaaggacagctacggcatgagcccctgcaacaccgccgtggtgccccagggctggagcgtggaggccctgaacagcccccacagcgagagcttcgtgagccccgaggccgtggccgagcccccccagcccaccgccgtgcccctggagctggccaaggagatcgagatggccagcgaggagagaccccccgcccaggccctggagatcatgatgggcctgaagaccaccgacatggcccccagcaaggagaccgagatggccctggccaaggacatggccctggccaccaagaccgaggtggccctggccaaggacatggagagccccaccaagctggacgtgaccctggccaaggacatgcagcccagcatggagagcgacatggccctggtgaaggacatggagctgcccaccgagaaggaggtggccctggtgaaggacgtgagatggcccaccgagaccgacgtgagcagcgccaagaacgtggtgctgcccaccgagaccgaggtggcccccgccaaggacgtgaccctgctgaaggagaccgagagagccagccccatcaagatggacctggcccccagcaaggacatgggcccccccaaggagaacaagaaggagaccgagagagccagccccatcaagatggacctggcccccagcaaggacatgggcccccccaaggagaacaagatcgtgcccgccaaggacctggtgctgctgagcgagatcgaggtggcccaggccaacgacatcatcagcagcaccgagatcagcagcgccgagaaggtggccctgagcagcgagaccgaggtggccctggccagagacatgaccctgccccccgagaccaacgtgatcctgaccaaggacaaggccctgcccctggaggccgaggtggcccccgtgaaggacatggcccagctgcccgagaccgagatcgcccccgccaaggacgtggcccccagcaccgtgaaggaggtgggcctgctgaaggacatgagccccctgagcgagaccgagatggccctgggcaaggacgtgacccccccccccgagaccgaggtggtgctgatcaagaacgtgtgcctgccccccgagatggaggtggccctgaccgaggaccaggtgcccgccctgaagaccgaggcccccctggccaaggacggcgtgctgaccctggccaacaacgtgacccccgccaaggacgtgccccccctgagcgagaccgaggccacccccgtgcccatcaaggacatggagatcgcccagacccagaagggcatcagcgaggacagccacctggagagcctgcaggacgtgggccagagcgccgcccccaccttcatgatcagccccgagaccgtgaccggcaccggcaagaagtgcagcctgcccgccgaggaggacagcgtgctggagaagctgggcgagagaaagccctgcaacagccagcccagcgagctgagcagcgagaccagcggcatcgccagacccgaggagggcagacccgtggtgagcggcaccggcaacgacatcaccaccccccccaacaaggagctgccccccagccccgagaagaagaccaagcccctggccaccacccagcccgccaagaccagcaccagcaaggccaagacccagcccaccagcctgcccaagcagcccgcccccaccaccatcggcggcctgaacaagaagcccatgagcctggccagcggcctggtgcccgccgccccccccaagagacccgccgtggccagcgccagacccagcatcctgcccagcaaggacgtgaagcccaagcccatcgccgacgccaaggcccccgagaagagagccagccccagcaagcccgccagcgcccccgccagcagaagcggcagcaagagcacccagaccgtggccaagaccaccaccgccgccgccgtggccagcaccggccccagcagcagaagccccagcaccctgctgcccaagaagcccaccgccatcaagaccgagggcaagcccgccgaggtgaagaagatgaccgccaagagcgtgcccgccgacctgagcagacccaagagcaccagcaccagcagcatgaagaagaccaccaccctgagcggcaccgcccccgccgccggcgtggtgcccagcagagtgaaggccacccccatgcccagcagacccagcaccacccccttcatcgacaagaagcccaccagcgccaagcccagcagcaccacccccagactgagcagactggccaccaacaccagcgcccccgacctgaagaacgtgagaagcaaggtgggcagcaccgagaacatcaagcaccagcccggcggcggcagagccaaggtggagaagaagaccgaggccgccgccaccaccagaaagcccgagagcaacgccgtgaccaagaccgccggccccatcgccagcgcccagaagcagcccgccggcaaggtgcagatcgtgagcaagaaggtgagctacagccacatccagagcaagtgcggcagcaaggacaacatcaagcacgtgcccggcggcggcaacgtgcagatccagaacaagaaggtggacatcagcaaggtgagcagcaagtgcggcagcaaggccaacatcaagcacaagcccggcggcggcgacgtgaagatcgagagccagaagctgaacttcaaggagaaggcccaggccaaggtgggcagcctggacaacgtgggccacctgcccgccggcggcgccgtgaagatcgagacctacagactgaccttcagagccaacgccagagccagaaccgaccacggcgccgacatcgtgagcagacccccccacttccccggcggccccaacagcggcagcagagtgctgggccccctgagcagagccgtgcactag

SEQ ID NO: 49308 - protein, 585 aa, Artificial Sequence
  derived and/or modified sequence
MASPGSGFWSFGSEDGSGDSENPGTARAWCQVAQKFTGGIGNKLCALLYGDAEKPAESGGSQPPRAAARKAACACDQKPCSCSKVDVNYAFLHATDLLPACDGERPTLAFLQDVMNILLQYVVKSFDRSTKVIDFHYPNELLQEYNWELADQPQNLEEILMHCQTTLKYAIKTGHPRYFNQLSTGLDMVGLAADWLTSTANTNMFTYEIAPVFVLLEYVTLKKMREIIGWPGGSGDGIFSPGGAISNMYAMMIARFKMFPEVKEKGMAALPRLIAFTSEHSHFSLKKGAAALGIGTDSVILIKCDERGKMIPSDLERRILEAKQKGFVPFLVSATAGTTVYGAFDPLLAVADICKKYKIWMHVDAAWGGGLLMSRKHKWKLSGVERANSVTWNPHKMMGVPLQCSALLVREEGLMQNCNQMHASYLFQQDKHYDLSYDTGDKALQCGRHVDVFKLWLMWRAKGTTGFEAHVDKCLELAEYLYNIIKNREGYEMVFDGKPQHTNVCFWYIPPSLRTLEDNEERMSRLSKVAPVIKARMMEYGTTMVSYQPLGDKVNFFRMVISNPAATHQDIDFLIEEIERLGQDL

SEQ ID NO: 49309 - protein, 129 aa, Artificial Sequence
  derived and/or modified sequence
MNILLQYVVKSFDRSTKVIDFHYPNELLQEYNWELADQPQNLEEILMHCQTTLKYAIKTGHPRYFNQLSTGLDMVGLAADWLTSTANTNMFTYEIAPVFVLLEYVTLKKMREIIGWPGGSGDGIFSPGT

SEQ ID NO: 49310 - protein, 188 aa, Artificial Sequence
  derived and/or modified sequence
MASPGSGFWSFGSEDGSGDSENPGTARAWCQVAQKFTGGIGNKLCALLYGDAEKPAESGGSQPPRAAARKAACACDQKPCSCSKVDVNYAFLHATDLLPACDGERPTLAFLQDVMNILLQYVVKSFDRSTKVIDFHYPNELLQEYNWELADQPQNLEEILMHCQTTLKYAIKTGIVSSKIIKLFFRLQ

SEQ ID NO: 49311 - DNA, 1758 bp, Artificial Sequence
  derived and/or modified sequence
atggcgtcgccgggttcgggcttctggtcgttcggtagcgaagacgggagtggagacagcgagaacccaggtaccgctcgagcgtggtgtcaggtcgcacagaaatttacgggggggatcgggaataagctatgtgccctgctatacggcgacgcagaaaagcctgccgaatctggcgggagccaacctccaagagccgccgcgcggaaggctgcttgtgcttgcgatcagaaaccctgcagctgtagcaaggtcgacgtcaactacgctttcctccatgccaccgacttactgccggcctgcgatggcgagcgcccaacacttgcctttctccaggatgttatgaacatcctgctccaatatgttgtaaagtcattcgaccgatccacaaaagtcatagactttcattaccctaatgagctgctacaggagtataattgggaactggctgaccaaccccaaaatctcgaagaaatactgatgcactgtcagactactctaaagtatgcgattaagacggggcacccaaggtactttaaccagctgtccaccggtttagatatggtgggtctggcggcagattggttgacttccaccgcaaacaccaatatgtttacatatgagattgcccctgttttcgtgctgcttgagtatgttacactaaaaaaaatgcgggagattatcggatggcccgggggcagcggtgatgggatcttctcacctggcggggccattagtaacatgtacgctatgatgatagctcggtttaaaatgtttcccgaagtgaaggaaaaaggaatggcggcactgccaagactgatcgctttcactagcgaacattcacacttctctctgaagaagggtgctgccgccctgggcatcggaaccgactctgtaatcctcattaaatgtgacgagcgagggaagatgatcccatctgatctcgagcgaagaattcttgaggctaaacagaaaggcttcgtgcctttcctagtgagtgccaccgctggaaccacagtgtatggcgctttcgatccactgttggccgttgcagatatctgtaagaaatataaaatatggatgcatgtcgatgccgcctggggcggaggactgctgatgagcagaaagcacaaatggaaattgagtggagtcgaaagagccaattccgtgacctggaaccctcataaaatgatgggggttccactccaatgtagcgcgctcttagttagggaagaggggctcatgcagaattgtaatcagatgcatgccagttacctgtttcagcaagataagcactatgacctcagctacgataccggggataaggcgcttcaatgtgggcggcacgtagatgtcttcaaactgtggctgatgtggagagctaaaggcaccactggatttgaggcccatgtggacaagtgtctggagcttgccgagtacctgtacaatattatcaaaaacagagagggctacgagatggtgttcgatgggaagccccagcatactaacgtgtgcttctggtatatacccccctccctgagaacgctagaagacaacgaagaacggatgtctagactgagcaaagtcgcaccagtgatcaaggccagaatgatggaatacgggactactatggtctcttatcaacctctgggggataaggtgaactttttccggatggtcatctcaaaccctgctgccacacatcaggacattgacttcctaatcgaagaaattgagaggctcggtcaggatttatag

SEQ ID NO: 49312 - DNA, 390 bp, Artificial Sequence
  derived and/or modified sequence
atgaacattctcctacagtacgtggtgaagagcttcgatcgaagcacgaaggtgattgacttccactatcctaacgagttactccaggagtataattgggagctggctgatcagccccagaacttggaagagatcctaatgcactgccagaccactcttaagtacgctataaaaacgggccacccacgatacttcaatcagctgagtacaggcctggacatggtgggcctcgcagcggactggctaacaagcaccgctaataccaacatgttcacctacgagatcgccccagtttttgtgttgctggagtatgttaccctcaaaaagatgcgcgagattatcggctggcccggaggcagtggcgacggcatcttctctccaggaacctag

SEQ ID NO: 49313 - DNA, 1758 bp, Artificial Sequence
  derived and/or modified sequence
atggctagtcccgggagcggcttttggtcatttggaagcgaggatggttctggagattctgagaatcccggaaccgctcgtgcatggtgccaagtcgcccagaagttcaccgggggaatagggaataaactctgcgcactgctgtacggcgacgctgaaaagccggctgagtcaggaggcagccagccaccgagggccgccgcccgcaaggccgcatgcgcatgtgatcagaagccatgctcctgctctaaggtggatgtcaattatgccttcctccatgccactgacctgctgcccgcttgcgatggcgagcgcccaactctggctttcttgcaagacgttatgaacatcctgttgcagtacgtggtaaaaagtttcgatcggtctaccaaagtcattgattttcattatcccaacgaactgctgcaggagtacaactgggaattggccgatcaaccccaaaatcttgaggaaattctcatgcactgtcagactactcttaaatacgctataaagacaggccaccccaggtattttaaccagctgtccacaggactcgacatggtgggcctcgccgcagactggctgacttcaactgccaatacaaatatgtttacttacgaaatcgctccagtttttgtcctcctggaatacgtcaccctgaaaaagatgcgagaaatcattgggtggcctggagggtctggcgacgggatatttagccctggaggggcgatctctaatatgtatgccatgatgatcgctaggtttaaaatgtttcccgaagttaaagaaaagggtatggccgccctccctcggctgatcgctttcacatccgagcattcacacttcagcttaaagaagggcgcagccgccttgggcattggcactgacagcgtgattctgatcaagtgcgatgagagaggaaaaatgatccctagtgatctcgaaagacgaatcttggaagcaaaacagaaaggattcgtgcctttcttggtttcagctactgctgggactaccgtgtatggggcttttgaccctttgttggccgtggctgacatttgcaagaaatacaagatttggatgcacgtagatgccgcttggggggggggtctgctaatgtctagaaagcacaaatggaagctttccggagtagagcgagccaatagtgttacttggaaccctcataaaatgatgggcgttcctcttcaatgttccgccctcctggtgagagaagagggtctgatgcaaaattgcaaccagatgcacgcatcctatctgtttcagcaggataagcactatgacttgtcctacgatactggggataaggccctgcagtgcggtcgccatgtggatgtctttaaattgtggttgatgtggcgggctaaaggcactacaggttttgaagcccatgtggataaatgtttggaactggccgagtacttgtacaacattatcaagaatcgggagggatatgagatggtcttcgacggaaagcctcagcatacaaacgtttgtttctggtacatccctcctagccttcgcacactagaagacaatgaggagagaatgtctaggctgtcaaaggtggctcccgtgatcaaggctagaatgatggagtacgggaccactatggtttcctaccagccattgggggataaggtgaattttttcaggatggtcatcagtaacccagctgcgacacatcaagatatcgatttcctaattgaggaaattgaaaggcttggacaggacctatag

SEQ ID NO: 49314 - DNA, 567 bp, Artificial Sequence
  derived and/or modified sequence
atggcaagtccaggcagtggcttctggtctttcggaagcgaagacgggtctggcgactcagaaaaccctggtactgccagggcatggtgccaggtggcccagaaatttactggcggcatcggaaacaagctatgtgcactgctgtacggcgatgcagagaagccagctgaaagcggcgggtctcaacctccacgtgctgccgctcgcaaagctgcctgcgcctgtgatcagaaaccttgtagctgcagcaaggtggacgtgaattatgcctttttgcatgccactgacctgttgcctgcatgcgacggcgagcgacctacattagcgttccttcaggacgtgatgaacattctgctccaatacgttgtgaagagttttgatcgatctacaaaggttatagacttccactacccaaacgaactgcttcaggagtacaactgggagctggccgaccagccacaaaatctggaggaaatcttaatgcattgtcagacgacacttaaatatgccattaaaacgggcatcgtgtcctctaaaatcattaaactgttttttcgtctgcagtag

SEQ ID NO: 49315 - DNA, 2462 bp, Artificial Sequence
  derived and/or modified sequence
acccgccctcgccgctcggccccgccggtccccgcgcggtgccctcctcccgccacacgggcacgcacgcgcgcgcagggccaagcccgaggcagctcgcccgcagctcgcactcgcaggcgacctgctccagtctccaaagccgatggcatctccgggctctggcttttggtctttcgggtcggaagatggctctggggattccgagaatcccggcacagcgcgagcctggtgccaagtggctcagaagttcacgggcggcatcggaaacaaactgtgcgccctgctctacggagacgccgagaagccggcggagagcggcgggagccaacccccgcgggccgccgcccggaaggccgcctgcgcctgcgaccagaagccctgcagctgctccaaagtggatgtcaactacgcgtttctccatgcaacagacctgctgccggcgtgtgatggagaaaggcccactttggcgtttctgcaagatgttatgaacattttacttcagtatgtggtgaaaagtttcgatagatcaaccaaagtgattgatttccattatcctaatgagcttctccaagaatataattgggaattggcagaccaaccacaaaatttggaggaaattttgatgcattgccaaacaactctaaaatatgcaattaaaacagggcatcctagatacttcaatcaactttctactggtttggatatggttggattagcagcagactggctgacatcaacagcaaatactaacatgttcacctatgaaattgctccagtatttgtgcttttggaatatgtcacactaaagaaaatgagagaaatcattggctggccagggggctctggcgatgggatattttctcccggtggcgccatatctaacatgtatgccatgatgatcgcacgctttaagatgttcccagaagtcaaggagaaaggaatggctgctcttcccaggctcattgccttcacgtctgaacatagtcatttttctctcaagaagggagctgcagccttagggattggaacagacagcgtgattctgattaaatgtgatgagagagggaaaatgattccatctgatcttgaaagaaggattcttgaagccaaacagaaagggtttgttcctttcctcgtgagtgccacagctggaaccaccgtgtacggagcatttgaccccctcttagctgtcgctgacatttgcaaaaagtataagatctggatgcatgtggatgcagcttggggtgggggattactgatgtcccgaaaacacaagtggaaactgagtggcgtggagagggccaactctgtgacgtggaatccacacaagatgatgggagtccctttgcagtgctctgctctcctggttagagaagagggattgatgcagaattgcaaccaaatgcatgcctcctacctctttcagcaagataaacattatgacctgtcctatgacactggagacaaggccttacagtgcggacgccacgttgatgtttttaaactatggctgatgtggagggcaaaggggactaccgggtttgaagcgcatgttgataaatgtttggagttggcagagtatttatacaacatcataaaaaaccgagaaggatatgagatggtgtttgatgggaagcctcagcacacaaatgtctgcttctggtacattcctccaagcttgcgtactctggaagacaatgaagagagaatgagtcgcctctcgaaggtggctccagtgattaaagccagaatgatggagtatggaaccacaatggtcagctaccaacccttgggagacaaggtcaatttcttccgcatggtcatctcaaacccagcggcaactcaccaagacattgacttcctgattgaagaaatagaacgccttggacaagatttataataaccttgctcaccaagctgttccacttctctagagaacatgccctcagctaagccccctactgagaaacttcctttgagaattgtgcgacttcacaaaatgcaaggtgaacaccactttgtctctgagaacagacgttaccaattatggagtgtcaccagctgccaaaatcgtaggtgttggctctgctggtcactggagtagttgctactcttcagaatatggacaaagaaggcacaggtgtaaatatagtagcaggatgaggaacctcaaactgggtatcattttgcacgtgctcttctgttctcaaatgctaaatgcaaacactgtgtatttattagttaggtgtgccaaactaccgttcccaaattggtgtttctgaatgacatcaacattcccccaacattactccattactaaagacagaaaaaaataaaaacataaaatatacaaacatgtggcaacctgttcttcctaccaaatataaacttgtgtatgatccaagtattttatctgtgttgtctctctaaacccaaataaatgtgtaaatgtggacaca

SEQ ID NO: 49316 - DNA, 680 bp, Artificial Sequence
  derived and/or modified sequence
tccaagagggctctgaggccgtggcgctcttcccccagcgcggcccttgggatggcgggtggccgacgatccaggcgctcgtgcgctcactgaatcgatgacggctggcttccctaggccgctggggcctcggacctgctgccggcgtgtgatggagaaaggcccactttggcgtttctgcaagatgttatgaacattttacttcagtatgtggtgaaaagtttcgatagatcaaccaaagtgattgatttccattatcctaatgagcttctccaagaatataattgggaattggcagaccaaccacaaaatttggaggaaattttgatgcattgccaaacaactctaaaatatgcaattaaaacagggcatcctagatacttcaatcaactttctactggtttggatatggttggattagcagcagactggctgacatcaacagcaaatactaacatgttcacctatgaaattgctccagtatttgtgcttttggaatatgtcacactaaagaaaatgagagaaatcattggctggccagggggctctggcgatgggatattttctcccggtacatgatatttcaactttctttgtgttttttcttctaatatgcaatgccttgttgtaaacctagggaagattaaaaatctagcctatgcctctgcttaggttaaata

SEQ ID NO: 49317 - DNA, 5858 bp, Artificial Sequence
  derived and/or modified sequence
gcggccgcccgcacttcccgcctctggctcgcccgaggacgcgctggcacgcctcccaccccctcactctgactccagctggcgtgcatggtctgcctcgcatcctcacgactcagctccctccctctctcgtgtttttttcctccgccgccccctcattcatccccactgggctccctttccctcaaatgctctggggctctccgcgctttcctgagtccgggctccgaggacccttaggtagtcccggtctcttttaaagctccccggcttccaaagggttgccacgtccctaaaccctgtctccagctcgcatacacacacgcacagacacgcacgttttctgttcctgcgtgacacccgccctcgccgctcggccccgccggtccccgcgcggtgccctcctcccgccacacgggcacgcacgcgcgcgcagggccaagcccgaggcagctcgcccgcagctcgcactcgcaggcgacctgctccagtctccaaagccgatggcatctccgggctctggcttttggtctttcgggtcggaagatggctctggggattccgagaatcccggcacagcgcgagcctggtgccaagtggctcagaagttcacgggcggcatcggaaacaaactgtgcgccctgctctacggagacgccgagaagccggcggagagcggcgggagccaacccccgcgggccgccgcccggaaggccgcctgcgcctgcgaccagaagccctgcagctgctccaaagtggatgtcaactacgcgtttctccatgcaacagacctgctgccggcgtgtgatggagaaaggcccactttggcgtttctgcaagatgttatgaacattttacttcagtatgtggtgaaaagtttcgatagatcaaccaaagtgattgatttccattatcctaatgagcttctccaagaatataattgggaattggcagaccaaccacaaaatttggaggaaattttgatgcattgccaaacaactctaaaatatgcaattaaaacagggcatcctagatacttcaatcaactttctactggtttggatatggttggattagcagcagactggctgacatcaacagcaaatactaacatgttcacctatgaaattgctccagtatttgtgcttttggaatatgtcacactaaagaaaatgagagaaatcattggctggccagggggctctggcgatgggatattttctcccggtggcgccatatctaacatgtatgccatgatgatcgcacgctttaagatgttcccagaagtcaaggagaaaggaatggctgctcttcccaggctcattgccttcacgtctgaacatagtcatttttctctcaagaagggagctgcagccttagggattggaacagacagcgtgattctgattaaatgtgatgagagagggaaaatgattccatctgatcttgaaagaaggattcttgaagccaaacagaaagggtttgttcctttcctcgtgagtgccacagctggaaccaccgtgtacggagcatttgaccccctcttagctgtcgctgacatttgcaaaaagtataagatctggatgcatgtggatgcagcttggggtgggggattactgatgtcccgaaaacacaagtggaaactgagtggcgtggagagggccaactctgtgacgtggaatccacacaagatgatgggagtccctttgcagtgctctgctctcctggttagagaagagggattgatgcagaattgcaaccaaatgcatgcctcctacctctttcagcaagataaacattatgacctgtcctatgacactggagacaaggccttacagtgcggacgccacgttgatgtttttaaactatggctgatgtggagggcaaaggggactaccgggtttgaagcgcatgttgataaatgtttggagttggcagagtatttatacaacatcataaaaaaccgagaaggatatgagatggtgtttgatgggaagcctcagcacacaaatgtctgcttctggtacattcctccaagcttgcgtactctggaagacaatgaagagagaatgagtcgcctctcgaaggtggctccagtgattaaagccagaatgatggagtatggaaccacaatggtcagctaccaacccttgggagacaaggtcaatttcttccgcatggtcatctcaaacccagcggcaactcaccaagacattgacttcctgattgaagaaatagaacgccttggacaagatttataataaccttgctcaccaagctgttccacttctctaggtagacaattaagttgtcacaaactgtgtgaatgtatttgtagtttgttccaaagtaaatctatttctatattgtggtgtcaaagtagagtttaaaaattaaacaaaaaagacattgctccttttaaaagtcctttcttaagtttagaatacctctctaagaattcgtgacaaaaggctatgttctaatcaataaggaaaagcttaaaattgttataaatacttcccttacttttaatatagtgtgcaaagcaaactttattttcacttcagactagtaggactgaatagtgccaaattgcccctgaatcataaaaggttctttggggtgcagtaaaaaggacaaagtaaatataaaatatatgttgacaataaaaactcttgcctttttcatagtattagaaaaaaatttctaatttacctatagcaacatttcaaatgtatttaaatacatataattttacaaaaggaaaatatatatattaaaaaagatatcctattttgtaacatatagatttttattttatataggttatacaaactgcgggggcagatataaaatctaagccagatttttttttcctttctcttaatggaggcacaataaaacacttagcaaagttattttgaaacattgacccacgaaattcttaaaaggtattattgcttctttctatacatgttatggcttatcacatctctaaagttagtatttcaagacaaacacaaaagaatactgcgagttctttaaaataattgatcccattggcagtaagattctcttcccctttaagttttccacccattttactcttagcggactcactctgcaagcgtgacaaaccaggcttcatctcagattaaattagggtaattgtctctattctgctttccagttcggcctgttttgaacagaaggttgatgctagttcttgaggcatcttccaaatagtattcttttattaggtcatttgaattaattagagaaagtaaaaataaaaccttatcagcctgagcaaagaggaatgaagcacactcccagaatgtggtgagcccagaaaattaaagttggccttgggagaagagatctctgtgggacaataatgacatcatcctggcgccatattgccactgtccaggaaagagaaatttacctccaggccagttgcgcatttccatcccctccccattcctccccacaaagtctctcccactagactccctaccactgggacccaaaatagttactttatattccatgggtggttgtttttcttccatgaaatgagcctctcaccctagattttgaggcattatcttaagattttcctttatccatctcccatcgagatccaaagtgaccagaatatgcagaaataataagatccttagaattcaaaatagtatttttaaaacatccttctttccctgtgaacctgatagaaaaacatgagctaacaaaagcttccatagatatttatggggtcacacatcgtcagattccaagtgctgattggagaacaatagattgatatgcagactgcaaatgcaaatttaggaacattctccatttctgaatggaccaggtagttcagtactcagactgcaggtatacaagggaagagagaaggccctgcccttcaacgggtagaaatgccctacaatataacatagagaaatgccctataatataaccacaggatccagccatctgaaattttcataagcttccccctacattatttctcctaggctatatgcaaaaacagtgataacttgatatgaacatggctttgggccctttctgtctagaaaaacaaatgggttcactatgacaatcagaaataaactctttcatctgtcccgcagaatttcatgaaggagtaaccttccattctaggctttgtctaatggccaagcattagacaaagcattagaaagcagttcctttctcaaaactgcctgctgagaataagcacatagctgcccgactatccggagcctcaggcccaaaggttccacttcagagacagagatgctaattgatccaacctgctgtccttcgtggagaagacagtggggcccagtgccctggtgaaccaaccctgctgtactccaggatgctttatcttttgagttacagatcctagattataaactgctgctttttaggttaatgagatggtaaaattttaaaggacaatttgtgcctatatatgaaattccagcaaaacaattctagcaacaacaatagctcttcttccccgctcccctaccccttcccagtactccttcaaattggctgagagccttgctcaggcctgtgcagggaaatccttaccaactgtagcccaaagaaggaagcaaataaaagcctagtaggtcccagtagtttaataaatcatcttgaaaggagatgtggaatcaggtcagaagagagtaagggaggaagggagggagggagggagggagggaaggagggagggaggaaggaaatgaagggagggagggagggaggaaagaagggagattatttttaatattagcccaaattcccagtgccatggtctttatgtgtgcccattctttacaaatcttagaaaagtttggttttagctttaatcagaactgacatggccattttcatttatacagcaatattgtgtttatcatttaaaatacttgaacaaacaagtgtgatatgtctttatctgagacctatacatggtatggacttcatatactgccacaggatgtgaggaaagaaaaggaaatcaattctgactgtgttgcctttattatctggataatactgtcttgtcacctcagattggggttgtgcactttagatctgaactgtacagtgttgcaaatcaacatgtgtttctgtaaaagcttgtacaatatattattgatatgtctttttctgtgtggtagctgtattgaactttgatattatgaaaactacatttgcatctgttcctgttctctctctctctctctttcctaactatatgccctccacatcggctctaatagagaacatgccctcagctaagccccctactgagaaacttcctttgagaattgtgcgacttcacaaaatgcaaggtgaacaccactttgtctctgagaacagacgttaccaattatggagtgtcaccagctgccaaaatcgtaggtgttggctctgctggtcactggagtagttgctactcttcagaatatggacaaagaaggcacaggtgtaaatatagtagcaggatgaggaacctcaaactgggtatcattttgcacgtgctcttctgttctcaaatgctaaatgcaaacactgtgtatttattagttaggtgtgccaaactaccgttcccaaattggtgtttctgaatgacatcaacattcccccaacattactccattactaaagacagaaaaaaataaaaacataaaatatacaaacatgtggcaacctgttcttcctaccaaatataaacttgtgtatgatccaagtattttatctgtgttgtctctctaaacccaaataaatgtgtaaatgtggacaca

SEQ ID NO: 49318 - DNA, 641 bp, Artificial Sequence
  derived and/or modified sequence
gcgcgcgcagggccaagcccgaggcagctcgcccgcagctcgcactcgcaggcgacctgctccagtctccaaagccgatggcatctccgggctctggcttttggtctttcgggtcggaagatggctctggggattccgagaatcccggcacagcgcgagcctggtgccaagtggctcagaagttcacgggcggcatcggaaacaaactgtgcgccctgctctacggagacgccgagaagccggcggagagcggcgggagccaacccccgcgggccgccgcccggaaggccgcctgcgcctgcgaccagaagccctgcagctgctccaaagtggatgtcaactacgcgtttctccatgcaacagacctgctgccggcgtgtgatggagaaaggcccactttggcgtttctgcaagatgttatgaacattttacttcagtatgtggtgaaaagtttcgatagatcaaccaaagtgattgatttccattatcctaatgagcttctccaagaatataattgggaattggcagaccaaccacaaaatttggaggaaattttgatgcattgccaaacaactctaaaatatgcaattaaaacaggtattgtctcatcgaaaataataaagctcttttttcgtttacaa

SEQ ID NO: 49319 - DNA, 1758 bp, Artificial Sequence
  derived and/or modified sequence
atggccagccctggcagcggcttctggagctttggaagtgaagatggcagcggggacagtgaaaatcctggaacagcccgggcctggtgccaggtggcccagaagttcaccggcggcatcggcaacaagctgtgtgccctgctgtatggagatgctgagaagccagctgagagcggcggcagccagccccccagggctgctgccaggaaggccgcctgtgcctgtgaccagaagccctgcagctgcagcaaggtggatgtgaactatgccttcctgcacgccacagacctgctgcctgcctgtgatggagagcggcccaccctggccttcctgcaggatgtgatgaacatcctgctgcagtatgtggtgaagagctttgacaggagcaccaaggtgattgacttccactacccaaatgagctgctgcaggagtacaactgggagctggccgaccagccccagaacctggaggagatcctgatgcactgccagaccaccctgaagtatgccatcaagacaggccacccccgctacttcaaccagctgagcacaggcctggacatggtgggcctggccgctgactggctgaccagcacagccaacaccaacatgttcacctatgaaattgcccctgtgtttgtgctgctggagtatgtgaccctgaagaagatgagggagatcatcggctggccaggcggcagcggagatggcatcttcagccctggaggagccatcagcaacatgtatgccatgatgattgcccgcttcaagatgtttcctgaggtgaaggagaagggcatggccgccctgcccaggctcatcgccttcaccagcgagcacagccacttcagcctgaagaagggagctgctgccctgggcatcggcacagacagcgtcatcctgatcaagtgtgatgagcggggcaagatgatccccagcgacctggagcggcgcatcctggaggccaagcagaagggctttgtgcccttcctggtgtctgccacagctggcaccaccgtgtatggagcctttgaccccctgctggccgtggccgacatctgcaagaagtacaagatctggatgcacgtggatgctgcctggggcggcggcctgctgatgagcaggaagcacaagtggaagctgagcggcgtggagcgggccaacagcgtgacctggaacccccacaagatgatgggcgtgcccctgcagtgcagcgccctgctggtgcgggaggagggcctgatgcagaactgcaaccagatgcacgccagctacctgttccagcaggacaagcactatgacctgtcctatgacacaggagacaaggccctgcagtgtggcagacatgtggatgtgttcaagctgtggctgatgtggagggccaagggcaccactggatttgaggcccacgtggacaagtgcctggagctggccgagtacctgtacaacatcatcaagaaccgggagggctatgagatggtgtttgatggcaagccccagcacaccaacgtgtgcttctggtacatcccccccagcctgcggaccctggaggacaatgaggagaggatgagccggctgagcaaggtggcccctgtgatcaaggccaggatgatggagtatggcaccaccatggtgtcctaccagcccctgggggacaaggtgaacttcttcaggatggtgatcagcaacccagctgccacccaccaggacatcgacttcctgattgaggagattgaaaggctgggccaggacctgtag

SEQ ID NO: 49320 - DNA, 390 bp, Artificial Sequence
  derived and/or modified sequence
atgaacatcctgctgcagtatgtggtgaagagctttgacaggagcaccaaggtgattgacttccactacccaaatgagctgctgcaggagtacaactgggagctggccgaccagccccagaacctggaggagatcctgatgcactgccagaccaccctgaagtatgccatcaagacaggccacccccgctacttcaaccagctgagcacaggcctggacatggtgggcctggccgctgactggctgaccagcacagccaacaccaacatgttcacctatgaaattgcccctgtgtttgtgctgctggagtatgtgaccctgaagaagatgagggagatcatcggctggccaggcggcagcggagatggcatcttcagccctggcacctag

SEQ ID NO: 49321 - DNA, 567 bp, Artificial Sequence
  derived and/or modified sequence
atggccagccctggcagcggcttctggagctttggaagtgaagatggcagcggggacagtgaaaatcctggaacagcccgggcctggtgccaggtggcccagaagttcaccggcggcatcggcaacaagctgtgtgccctgctgtatggagatgctgagaagccagctgagagcggcggcagccagccccccagggctgctgccaggaaggccgcctgtgcctgtgaccagaagccctgcagctgcagcaaggtggatgtgaactatgccttcctgcacgccacagacctgctgcctgcctgtgatggagagcggcccaccctggccttcctgcaggatgtgatgaacatcctgctgcagtatgtggtgaagagctttgacaggagcaccaaggtgattgacttccactacccaaatgagctgctgcaggagtacaactgggagctggccgaccagccccagaacctggaggagatcctgatgcactgccagaccaccctgaagtatgccatcaagacaggaattgtgagcagcaagatcatcaagctgttcttccggctgcagtag

SEQ ID NO: 49322 - DNA, 1758 bp, Artificial Sequence
  derived and/or modified sequence
atggccagccccggcagcggcttctggagcttcggcagcgaggacggatctggtgactccgaaaatcccggcacagctcgagcctggtgtcaggtggcccagaaattcacgggcggtataggaaacaaactttgtgcactcttgtacggagacgccgaaaaacccgcagagtccggcggtagccagcctccacgcgcagcggcccgcaaggcagcgtgcgcctgtgatcagaagccttgcagctgctctaaagtcgatgtgaactacgcttttctccatgccaccgacttactccctgcctgtgatggcgaacgaccaacccttgcatttctgcaggacgtaatgaatattctgctccagtacgtggtcaagagcttcgacaggtccactaaggtgattgattttcattacccaaatgaactcttacaggagtacaattgggaactggccgatcagccccagaatcttgaagaaattctgatgcattgccaaactacactgaaatatgctattaaaactggccacccccgctattttaatcagctcagcaccggcctcgacatggtggggctcgcggccgactggcttactagtaccgcaaacacaaacatgttcacgtatgagatagcacctgtctttgtgctcttggaatacgtgacactaaagaaaatgcgcgaaatcataggctggccaggaggcagtggcgatggaattttttccccaggcggcgcaatttctaacatgtacgccatgatgatcgcccggttcaagatgttcccagaagttaaggagaaagggatggccgcacttccacggctgattgcttttactagtgagcacagccacttcagtctgaagaaaggagccgccgccctgggcataggcaccgactctgtcattctgatcaaatgtgacgaacgaggcaagatgataccttcagacctggaacggcggatactcgaggcaaagcaaaaagggttcgtgcccttcctcgtgtcagctacggccgggactacagtgtacggagcatttgaccccctcctggcagtggccgacatttgcaaaaagtataagatctggatgcacgtggatgccgcttggggaggtgggctccttatgagcaggaagcacaagtggaaactgtcgggagtggagcgggccaattcagtgacttggaacccacacaaaatgatgggagtgccccttcagtgcagtgccctgctcgtaagagaggaggggctcatgcagaactgtaatcagatgcatgcttcatacctgttccaacaggataagcactacgacctcagctacgatacgggtgataaggctcttcagtgcggaaggcacgtcgatgtattcaagttgtggctgatgtggcgcgccaagggcactacaggcttcgaagctcatgtggacaagtgcttagaacttgccgaatacctctacaatatcattaaaaatcgagagggctacgaaatggtgttcgatggcaagccccagcacactaacgtttgtttttggtatatccctccctccctgagaacactggaggataacgaggagcgaatgagtaggctatcgaaggtggccccagtgatcaaggctagaatgatggagtacgggactaccatggttagctaccaacctctaggcgacaaggttaacttctttagaatggttatctcgaatcccgctgccacacatcaagacatcgacttcttgatcgaggagattgagcgcctgggtcaagacctatag

SEQ ID NO: 49323 - DNA, 390 bp, Artificial Sequence
  derived and/or modified sequence
atgaacatcctgctgcagtacgtggtgaagagcttcgaccggagcacaaaggttattgattttcactaccccaatgaactgctgcaggaatataactgggagttagccgaccagccccagaatctggaggaaattctgatgcactgccagaccactcttaagtacgctataaagacagggcacccccgctatttcaaccagctgagcacagggctagatatggtcggcctcgctgcagattggctgactagcacggcaaacacaaacatgtttacatacgagatcgctccagtgttcgtcctgctggagtacgttacacttaagaagatgcgtgaaatcattggatggcctggaggatccggcgatggcatcttctcacccggaacatag

SEQ ID NO: 49324 - DNA, 1758 bp, Artificial Sequence
  derived and/or modified sequence
atggccagccccggcagcggcttctggagcttcggcagcgaggacgggtcgggagatagtgagaatcccggcaccgcccgggcatggtgccaagtcgctcagaagttcaccggtggcattgggaacaagctgtgcgccctgctgtacggagatgcagaaaaaccagcggagtctggcggtagccaacctcctagagcagccgctcgcaaggccgcatgtgcctgcgatcagaagccttgcagctgctctaaggtagacgtgaactacgcattcctccatgcaaccgatctgttaccagcgtgcgatggcgaacgacctactttagcgtttctgcaggatgtcatgaacattctgctgcagtacgtagttaaatcttttgatcgcagcacgaaagtcatcgacttccattacccaaacgagctcttgcaagaatacaattgggagctcgccgatcaaccccagaatttggaggagattctgatgcactgccagacaactttgaaatatgcgatcaagaccggacaccctcgttactttaatcagctgagcacgggtctggatatggtggggctagcagcggactggctcactagcaccgctaacaccaacatgtttacttacgaaatcgcacccgtgtttgtccttctggagtatgtgactttgaaaaagatgagagaaattatcgggtggcccggtggatcgggcgatgggatcttttcacccggcggcgctatttctaatatgtacgccatgatgattgcgcgctttaagatgttccctgaagttaaagagaaagggatggcggcactgccacgcctgatcgcatttactagcgagcacagtcacttttccctaaaaaagggagctgccgctctgggcattgggacagactctgtgatactgataaaatgcgacgagcgtggcaagatgattccatctgacttggaacgacgcatcctggaggcaaaacagaaggggtttgtgccgtttctcgtttctgctaccgcgggcactacggtttacggggccttcgaccctcttttggctgttgccgacatttgcaaaaagtataagatttggatgcacgtcgacgccgcgtggggcggaggcttgctgatgagtcgtaaacacaaatggaaactgagtggggtggagcgtgctaatagtgtgacatggaaccctcacaagatgatgggtgtccctctgcagtgctcagcacttttggtgcgcgaggagggtctgatgcaaaactgcaatcaaatgcatgcctcttacctgttccaacaggataaacactacgatctgtcatatgataccggtgataaagcactccagtgcggcagacatgttgacgtatttaagctgtggttgatgtggcgcgcaaagggtaccaccggcttcgaagctcacgttgacaagtgtttggagttggcagagtatctttataatattataaaaaaccgtgaagggtacgaaatggtgtttgatggaaagcctcagcataccaacgtctgcttctggtacataccccctagcctgaggaccttggaggacaacgaggaacgaatgtccaggttatcaaaagtggcaccagtaattaaagcgcgcatgatggagtatggcaccactatggttagctaccaaccattaggcgacaaagtcaacttttttaggatggtgatctccaaccctgctgccacgcaccaggatatagatttccttatcgaggagatcgagcggctcggccaggatctctag

SEQ ID NO: 49325 - DNA, 567 bp, Artificial Sequence
  derived and/or modified sequence
atggccagccccggcagcggcttctggagcttcggcagcgaggacgggtcaggcgatagtgagaatcccggaactgccagagcgtggtgtcaggtggcgcagaaatttacaggcgggattgggaacaaactgtgtgcccttctgtatggggatgccgagaagcctgctgagagtggaggatcacaaccacctcgcgcagccgcaagaaaggccgcttgcgcatgcgaccagaaaccatgttcctgcagcaaggtggacgttaattatgctttcttgcacgcaacggatctgcttcccgcgtgtgatggggagaggcctactttggcgtttctgcaggacgtaatgaatatcctattgcagtacgtggtgaagtcttttgaccggtcaaccaaggtcattgacttccattaccccaatgaattgctacaagaatacaattgggaactcgcggatcagccccagaacctggaggagattctgatgcactgccagactacgttgaagtatgccattaaaactggcatcgttagcagcaagataatcaagctgttcttccgtctgcagtag

SEQ ID NO: 49326 - DNA, 1758 bp, Artificial Sequence
  derived and/or modified sequence
atggccagccctggcagcgggttttggagttttggatcagaggatggttccggagacagtgagaaccccggaaccgctcgcgcatggtgtcaggtggcacagaagttcacaggagggattggaaacaagttatgcgcgctcttgtacggggacgctgaaaagcctgccgagtctgggggaagccagcctccaagagccgcagcaagaaaagccgcttgcgcttgcgaccagaaaccctgttcctgctctaaggtggacgtgaactacgccttcttgcacgcaaccgatctgttacccgcatgcgacggggaacggcctaccttagcattcttgcaggatgttatgaacatcttgctgcagtacgttgttaagagcttcgatagatccactaaggttatagactttcattacccaaacgaactgttgcaggagtataactgggagttagccgatcagccccaaaacctggaagaaattctgatgcattgtcagactacactgaaatatgcaattaaaaccgggcaccctcgatattttaatcaattgtccactggcctggacatggtcgggctggccgcagattggctgacttcgactgccaatacgaacatgtttacttacgagattgcaccagtctttgtgctgctcgaatacgtgacactgaagaagatgcgggagatcatcggctggccagggggatcaggggatggtatttttagcccagggggtgctatctccaacatgtatgccatgatgatagctaggtttaaaatgttccctgaggttaaagaaaaaggcatggccgctctccctcgacttatcgcttttacgtccgagcattcacactttagccttaagaagggagccgctgcactcggaattggcaccgacagtgtaatcctaataaaatgcgacgagcggggtaaaatgatcccctcagacctggaaagacgtatcctcgaagctaagcagaaggggttcgttcctttcctggtgagtgcaaccgcgggaactacagtgtacggcgcttttgatcctttgctggctgtagccgatatctgtaaaaagtacaaaatttggatgcatgtggatgccgcttgggggggtgggctactgatgtctaggaagcacaaatggaaactgtcaggtgtggaacgtgctaacagtgttacctggaacccacacaagatgatgggcgttccactgcagtgcagtgcccttctcgtgagggaggaaggcttaatgcaaaattgcaaccagatgcatgcatcatacctgtttcagcaagacaaacactatgatctgagctacgataccggagataaggcgctccagtgtggccgtcatgtggatgttttcaagctgtggttaatgtggagggccaagggcacaacgggatttgaagcccacgtggataaatgcttggagctcgccgagtacctgtacaacatcattaagaaccgcgaaggctacgaaatggtctttgacgggaagcctcagcacacaaacgtgtgcttttggtatattccaccatcccttagaacgttggaggacaacgaggagagaatgtcaagactgtccaaagttgcccctgtgataaaggcgcgaatgatggagtatggcactacaatggttagttaccagcccctgggagacaaagtaaacttcttcagaatggtgatttcaaacccagccgcaacccatcaggacatcgacttcttaattgaggagattgagcgtctcggacaagacttatag

SEQ ID NO: 49327 - DNA, 390 bp, Artificial Sequence
  derived and/or modified sequence
atgaacatactgctacaatacgtggtgaaatctttcgatcgcagtaccaaagtcattgactttcactacccgaatgagctgctgcaggaatacaattgggaacttgctgatcagccacagaacctagaagaaattttgatgcactgccagacaacgctaaagtacgcaatcaaaactgggcatcctcgctacttcaatcagctctcaaccggactggacatggtcgggttagcggcagactggctgacatccactgccaacacaaatatgtttacttacgaaattgccccagtgtttgttctgctggaatacgtgactctaaagaaaatgcgggaaatcatcggctggcccggtggtagtggcgatggcattttcagccccggtacctag

SEQ ID NO: 49328 - DNA, 1758 bp, Artificial Sequence
  derived and/or modified sequence
atggccagcccaggctccgggttctggtcgttcggctcggaggatggctcgggggactcagaaaatcccggaaccgcgagagcatggtgccaagtcgctcagaagttcactgggggaatagggaacaaattgtgtgccttgttgtatggggacgcagagaagccagccgagtcgggagggtcccaaccaccacgagctgcggctcggaaagcagcttgtgcatgcgatcagaagccctgtagctgctcgaaggtagacgtcaattatgcattccttcacgctactgacttattgccagcttgtgacggagagcgccctacattagcgttcttgcaagacgtgatgaacatcctgctgcagtacgtggtcaagtcttttgaccgctccactaaagtcatcgattttcactaccccaacgaactcctacaagaatataactgggaactggctgaccagccccaaaacctggaagaaatcttgatgcactgtcaaacaactctcaagtatgctattaaaacaggtcaccctagatacttcaaccagctgtccacaggattagatatggtcgggttggcagcagactggcttacttctaccgcgaacaccaacatgttcacttatgaaattgcccctgtatttgtcctgctggagtacgtgacgttaaagaaaatgcgagagatcatcggctggcccggagggtctggagacggaatctttagccccggaggcgctatcagtaacatgtatgcgatgatgattgccagatttaagatgttccccgaagtcaaggaaaaagggatggccgctttacccaggttaattgcttttaccagcgaacattcacacttctcgctcaaaaaaggggcagccgcactcggtattggcactgattctgtaattttaataaaatgcgacgagaggggtaagatgataccctccgatcttgaacgtaggatccttgaagcaaaacagaaaggctttgtaccttttctggtctctgccaccgccggaaccactgtgtacggagcctttgatccactgctggccgtggccgacatctgcaagaaatacaagatctggatgcatgtggatgctgcctggggcggaggcctcctgatgagtagaaaacacaaatggaagctgtcgggagttgagagagcgaatagtgtaacctggaatccccacaaaatgatgggtgtgcccctccaatgcagcgccttgctagtcagagaagagggacttatgcagaattgcaaccagatgcacgcatcgtatctctttcagcaggataaacactacgacctgtcctacgacaccggggacaaagccctgcagtgtggaagacacgtggatgtcttcaagctgtggttaatgtggcgggctaagggaactacaggatttgaggcccatgtagacaagtgcctggagttagctgagtatctctataatatcataaaaaatcgggagggctacgaaatggttttcgatgggaagccgcaacacacgaatgtttgtttctggtacatccctccttctctgcgcacacttgaagacaacgaggagcgcatgtctcgtctgtccaaggttgcccctgtgattaaagcccgtatgatggagtatggcactactatggtgtcctaccagcccctcggagacaaggtaaattttttccgtatggtgatcagcaaccctgcagccacacaccaagacatcgatttcctcattgaggagatagagcgcctgggacaagatctgtag

SEQ ID NO: 49329 - DNA, 567 bp, Artificial Sequence
  derived and/or modified sequence
atggcctctcccggttctggtttctggagctttggttcagaagatggatccggtgattccgaaaacccaggtacagcccgtgcttggtgtcaggtcgctcagaaattcacagggggtattggaaacaagttgtgcgccctcctgtatggagacgccgagaagccagccgagagcgggggatcccagcccccaagggcagctgcaagaaaggccgcatgcgcctgtgaccagaagccctgctcgtgttctaaggtggacgtgaactacgcattccttcatgctaccgacctgttgccagcctgtgatggggaacggccaacactggcgttcttgcaggatgttatgaatattctgttgcagtacgtggttaaaagctttgataggagcacgaaagtcatcgatttccattaccctaatgaacttttacaggaatacaactgggagctggccgaccagccgcagaatcttgaggagatccttatgcattgccaaaccaccttgaagtacgcaattaagacagggatcgtctcctcgaagatcattaaattattcttcagactccagtag

SEQ ID NO: 49330 - DNA, 1758 bp, Artificial Sequence
  derived and/or modified sequence
atggccagccccggcagcggcttctggagcttcggcagcgaggacggcagcggcgacagcgagaaccccggcaccgccagagcctggtgccaggtggcccagaagttcaccggcggcatcggcaacaagctgtgcgccctgctgtacggcgacgccgagaagcccgccgagagcggcggcagccagccccccagagccgccgccagaaaggccgcctgcgcctgcgaccagaagccctgcagctgcagcaaggtggacgtgaactacgccttcctgcacgccaccgacctgctgcccgcctgcgacggcgagagacccaccctggccttcctgcaggacgtgatgaacatcctgctgcagtacgtggtgaagagcttcgacagaagcaccaaggtgatcgacttccactaccccaacgagctgctgcaggagtacaactgggagctggccgaccagccccagaacctggaggagatcctgatgcactgccagaccaccctgaagtacgccatcaagaccggccaccccagatacttcaaccagctgagcaccggcctggacatggtgggcctggccgccgactggctgaccagcaccgccaacaccaacatgttcacctacgagatcgcccccgtgttcgtgctgctggagtacgtgaccctgaagaagatgagagagatcatcggctggcccggcggcagcggcgacggcatcttcagccccggcggcgccatcagcaacatgtacgccatgatgatcgccagattcaagatgttccccgaggtgaaggagaagggcatggccgccctgcccagactgatcgccttcaccagcgagcacagccacttcagcctgaagaagggcgccgccgccctgggcatcggcaccgacagcgtgatcctgatcaagtgcgacgagagaggcaagatgatccccagcgacctggagagaagaatcctggaggccaagcagaagggcttcgtgcccttcctggtgagcgccaccgccggcaccaccgtgtacggcgccttcgaccccctgctggccgtggccgacatctgcaagaagtacaagatctggatgcacgtggacgccgcctggggcggcggcctgctgatgagcagaaagcacaagtggaagctgagcggcgtggagagagccaacagcgtgacctggaacccccacaagatgatgggcgtgcccctgcagtgcagcgccctgctggtgagagaggagggcctgatgcagaactgcaaccagatgcacgccagctacctgttccagcaggacaagcactacgacctgagctacgacaccggcgacaaggccctgcagtgcggcagacacgtggacgtgttcaagctgtggctgatgtggagagccaagggcaccaccggcttcgaggcccacgtggacaagtgcctggagctggccgagtacctgtacaacatcatcaagaacagagagggctacgagatggtgttcgacggcaagccccagcacaccaacgtgtgcttctggtacatcccccccagcctgagaaccctggaggacaacgaggagagaatgagcagactgagcaaggtggcccccgtgatcaaggccagaatgatggagtacggcaccaccatggtgagctaccagcccctgggcgacaaggtgaacttcttcagaatggtgatcagcaaccccgccgccacccaccaggacatcgacttcctgatcgaggagatcgagagactgggccaggacctgtag

SEQ ID NO: 49331 - DNA, 390 bp, Artificial Sequence
  derived and/or modified sequence
atgaacatcctgctgcagtacgtggtgaagagcttcgacagaagcaccaaggtgatcgacttccactaccccaacgagctgctgcaggagtacaactgggagctggccgaccagccccagaacctggaggagatcctgatgcactgccagaccaccctgaagtacgccatcaagaccggccaccccagatacttcaaccagctgagcaccggcctggacatggtgggcctggccgccgactggctgaccagcaccgccaacaccaacatgttcacctacgagatcgcccccgtgttcgtgctgctggagtacgtgaccctgaagaagatgagagagatcatcggctggcccggcggcagcggcgacggcatcttcagccccggcacctag

SEQ ID NO: 49332 - DNA, 567 bp, Artificial Sequence
  derived and/or modified sequence
atggccagccccggcagcggcttctggagcttcggcagcgaggacggcagcggcgacagcgagaaccccggcaccgccagagcctggtgccaggtggcccagaagttcaccggcggcatcggcaacaagctgtgcgccctgctgtacggcgacgccgagaagcccgccgagagcggcggcagccagccccccagagccgccgccagaaaggccgcctgcgcctgcgaccagaagccctgcagctgcagcaaggtggacgtgaactacgccttcctgcacgccaccgacctgctgcccgcctgcgacggcgagagacccaccctggccttcctgcaggacgtgatgaacatcctgctgcagtacgtggtgaagagcttcgacagaagcaccaaggtgatcgacttccactaccccaacgagctgctgcaggagtacaactgggagctggccgaccagccccagaacctggaggagatcctgatgcactgccagaccaccctgaagtacgccatcaagaccggcatcgtgagcagcaagatcatcaagctgttcttcagactgcagtag

SEQ ID NO: 49333 - protein, 620 aa, Artificial Sequence
  derived and/or modified sequence
MATKEKLQCLKDFHKDILKPSPGKSPGTRPEDEAEGKPPQREKWSSKIDFVLSVAGGFVGLGNVWRFPYLCYKNGGGAFLIPYFIFLFGSGLPVFFLEIIIGQYTSEGGITCWEKICPLFSGIGYASVVIVSLLNVYYIVILAWATYYLFQSFQKELPWAHCNHSWNTPHCMEDTMRKNKSVWITISSTNFTSPVIEFWERNVLSLSPGIDHPGSLKWDLALCLLLVWLVCFFCIWKGVRSTGKVVYFTATFPFAMLLVLLVRGLTLPGAGAGIKFYLYPDITRLEDPQVWIDAGTQIFFSYAICLGAMTSLGSYNKYKYNSYRDCMLLGCLNSGTSFVSGFAIFSILGFMAQEQGVDIADVAESGPGLAFIAYPKAVTMMPLPTFWSILFFIMLLLLGLDSQFVEVEGQITSLVDLYPSFLRKGYRREIFIAFVCSISYLLGLTMVTEGGMYVFQLFDYYAASGVCLLWVAFFECFVIAWIYGGDNLYDGIEDMIGYRPGPWMKYSWAVITPVLCVGCFIFSLVKYVPLTYNKTYVYPNWAIGLGWSLALSSMLCVPLVIVIRLCQTEGPFLVRVKYLLTPREPNRWAVEREGATPYNSRTVMNGALVKPTHIIVETMM

SEQ ID NO: 49334 - protein, 200 aa, Artificial Sequence
  derived and/or modified sequence
MATKEKLQCLKDFHKDILKPSPGKSPGTRPEDEAEGKPPQREKWSSKIDFVLSVAGGFVGLGNVWRFPYLCYKNGGGAFLIPYFIFLFGSGLPVFFLEIIIGQYTSEGGITCWEKICPLFSGIGYASVVIVSLLNVYYIVILAWATYYLFQSFQKELPWAHCNHSWNTPHCMEDTMRKNKSVWITISSTNFTSPVIEFWE

SEQ ID NO: 49335 - protein, 359 aa, Artificial Sequence
  derived and/or modified sequence
MATKEKLQCLKDFHKDILKPSPGKSPGTRPEDEAEGKPPQREKWSSKIDFVLSVAGGFVGLGNVWRFPYLCYKNGGGAFLIPYFIFLFGSGLPVFFLEIIIGQYTSEGGITCWEKICPLFSGIGYASVVIVSLLNVYYIVILAWATYYLFQSFQKELPWAHCNHSWNTPHCMEDTMRKNKSVWITISSTNFTSPVIEFWERNVLSLSPGIDHPGSLKWDLALCLLLVWLVCFFCIWKGVRSTGKVVYFTATFPFAMLLVLLVRGLTLPGAGAGIKFYLYPDITRLEDPQVWIDAGTQIFFSYAICLGAMTSLGSYNKYKYNSYRSWPGLHCLPKSCDNDAAAHILVHSFFYYASLAWTG

SEQ ID NO: 49336 - protein, 109 aa, Artificial Sequence
  derived and/or modified sequence
MATKEKLQCLKDFHKDILKPSPGKSPGTRPEDEAEGKPPQREKWSSKIDFVLSVAGGFVGLGNVWRFPYLCYKNGGGAFLIPYFIFLFGSGLPVFFLEIIIGQYTSEGG

SEQ ID NO: 49337 - DNA, 1863 bp, Artificial Sequence
  derived and/or modified sequence
atggccaccaaggagaagctgcagtgcctgaaggacttccacaaggacatcctgaagcccagccccggcaagagccccggcaccagacccgaggacgaggccgagggcaagcccccccagagagagaagtggagcagcaagatcgacttcgtgctgagcgtggccggcggcttcgtgggcctgggcaacgtgtggagattcccctacctgtgctacaagaacggcggcggcgccttcctgatcccctacttcatcttcctgttcggcagcggcctgcccgtgttcttcctggagatcatcatcggccagtacaccagcgagggcggcatcacctgctgggagaagatctgccccctgttcagcggcatcggctacgccagcgtggtgatcgtgagcctgctgaacgtgtactacatcgtgatcctggcctgggccacctactacctgttccagagcttccagaaggagctgccctgggcccactgcaaccacagctggaacaccccccactgcatggaggacaccatgagaaagaacaagagcgtgtggatcaccatcagcagcaccaacttcaccagccccgtgatcgagttctgggagagaaacgtgctgagcctgagccccggcatcgaccaccccggcagcctgaagtgggacctggccctgtgcctgctgctggtgtggctggtgtgcttcttctgcatctggaagggcgtgagaagcaccggcaaggtggtgtacttcaccgccaccttccccttcgccatgctgctggtgctgctggtgagaggcctgaccctgcccggcgccggcgccggcatcaagttctacctgtaccccgacatcaccagactggaggacccccaggtgtggatcgacgccggcacccagatcttcttcagctacgccatctgcctgggcgccatgaccagcctgggcagctacaacaagtacaagtacaacagctacagagactgcatgctgctgggctgcctgaacagcggcaccagcttcgtgagcggcttcgccatcttcagcatcctgggcttcatggcccaggagcagggcgtggacatcgccgacgtggccgagagcggccccggcctggccttcatcgcctaccccaaggccgtgaccatgatgcccctgcccaccttctggagcatcctgttcttcatcatgctgctgctgctgggcctggacagccagttcgtggaggtggagggccagatcaccagcctggtggacctgtaccccagcttcctgagaaagggctacagaagagagatcttcatcgccttcgtgtgcagcatcagctacctgctgggcctgaccatggtgaccgagggcggcatgtacgtgttccagctgttcgactactacgccgccagcggcgtgtgcctgctgtgggtggccttcttcgagtgcttcgtgatcgcctggatctacggcggcgacaacctgtacgacggcatcgaggacatgatcggctacagacccggcccctggatgaagtacagctgggccgtgatcacccccgtgctgtgcgtgggctgcttcatcttcagcctggtgaagtacgtgcccctgacctacaacaagacctacgtgtaccccaactgggccatcggcctgggctggagcctggccctgagcagcatgctgtgcgtgcccctggtgatcgtgatcagactgtgccagaccgagggccccttcctggtgagagtgaagtacctgctgacccccagagagcccaacagatgggccgtggagagagagggcgccaccccctacaacagcagaaccgtgatgaacggcgccctggtgaagcccacccacatcatcgtggagaccatgatgtag

SEQ ID NO: 49338 - DNA, 1863 bp, Artificial Sequence
  derived and/or modified sequence
atggccaccaaagagaagcttcagtgccttaaagacttccacaaggatatcctcaaaccgtctcctgggaagagccccggaaccaggccagaggacgaagcagaaggcaagcctccccagagggaaaagtggagttcaaaaatcgatttcgtcttatcagtggccggcgggttcgttgggctgggcaatgtctggagatttccatacctgtgttataagaacgggggcggtgcatttctcatcccatattttatcttcctgttcggcagcggcctgcctgtgttcttcctggagattatcataggtcagtacacttccgaggggggaatcacctgctgggaaaagatttgtcccttattctctggcatcggttacgcttcagtcgtgattgtgagtcttctgaacgtctactatatagtgatcctggcctgggctacatattacctttttcaaagtttccagaaagaattgccttgggcccactgcaatcatagctggaacaccccccactgtatggaggacactatgcggaaaaacaaatctgtgtggataaccatctcaagtactaacttcacttctcctgtaattgaattttgggaaaggaacgttctgagcctctctcctggtatcgatcaccctggcagcctcaagtgggatctcgcattgtgcctgctgctcgtctggcttgtctgttttttttgcatttggaagggagtgcgttccaccggtaaggtagtgtatttcaccgcgactttccctttcgctatgctcttagtgctattagtgcggggcctgacactgcccggcgcaggggccgggattaagttttacctatacccggacataaccagactcgaagatccgcaggtctggattgatgctgggacgcagatattcttctcatacgcaatctgcctgggtgcgatgacctccctgggttcatataacaaatacaagtataatagctacagagactgtatgctactagggtgcctcaactcgggaacctctttcgtgtcggggtttgcgatctttagcatcctggggtttatggcgcaggagcagggcgtggatatagcagatgttgcagaatccgggccaggtcttgctttcatcgcctatccaaaagcagtgactatgatgccattacctacattctggtctatcttgtttttcatcatgcttctactgctcggattagacagccagttcgtggaggtcgaaggacaaatcacaagcttggttgatctgtacccatcgtttctgcgcaagggttacaggagagaaatattcatcgccttcgtgtgctcaatatcctacctgctggggcttaccatggtgacagagggcgggatgtatgtctttcagctgtttgattactatgccgcctccggagtctgcctcctttgggttgctttcttcgagtgtttcgtcatcgcctggatttatggaggggataatctctacgatggaatcgaggacatgattggataccggcctggaccttggatgaagtacagttgggctgtgataactccggttctgtgtgtgggctgtttcatattctcgctggtgaagtacgtgcccctcacatataacaagacttatgtgtatccaaattgggcaatcggtctcggctggagcctggcacttagtagtatgctttgtgtgcctctggtgattgtgatacgcctgtgtcagacagagggcccattcctggtgcgcgttaaatatctgttgactccaagagaacccaaccgatgggctgtggagagagaaggagcaacaccttataattctcggacagtgatgaatggtgccctggtcaagccaacccatatcatcgtggagacgatgatgtag

SEQ ID NO: 49339 - DNA, 1863 bp, Artificial Sequence
  derived and/or modified sequence
atggctacaaaggaaaaactgcagtgtttaaaagacttccataaagacattctgaagccaagtcccggcaaatccccaggtaccaggccagaggatgaagcagaggggaagcctcctcagcgcgagaagtggtcttcgaaaatcgatttcgtgctgtcagtagctggcggctttgtcggcctgggaaatgtgtggcgtttcccctatctgtgttacaagaacggaggaggggcctttcttattccttactttatcttcctcttcgggagcggactccccgtgtttttcctggaaataatcattggacagtacaccagcgagggcggtatcacgtgctgggagaagatctgccctctgttctctggcattggctatgcaagcgtcgtgatcgtttccttacttaatgtgtattatatagttattctggcctgggccacatattacctgtttcagagcttccaaaaagaacttccgtgggcgcactgtaatcacagctggaacactcctcattgcatggaggacacaatgcgaaagaacaaatcggtttggattacaatttctagtacaaatttcacctcccccgtgatcgaattctgggaacggaacgtattgagcctctcaccaggcatagaccatcctggctctctgaagtgggatttggccttgtgcctcctcctcgtctggctggtgtgctttttttgcatctggaagggcgtaaggtcgaccgggaaggtggtgtactttaccgcgacattcccttttgccatgctgctcgtcctcctggtacggggtcttactttgccgggtgccggggcaggtattaaattctacctctaccccgacattacgagattagaggaccctcaggtctggattgacgctgggacccagatctttttttcctatgccatatgcttgggagctatgacctctctcggctcttataacaaatacaaatataactcatatagagattgtatgctgttgggttgccttaattcgggaacatccttcgtctccggcttcgccatcttctccatcttgggcttcatggcacaagaacaaggcgtggatattgccgatgtggcagagtcagggcccggcctcgccttcattgcttatcccaaagctgttaccatgatgcccctcccaaccttttggagtatacttttttttataatgttactgttgctgggactggactcacagttcgtcgaggtggaaggacagatcacgtccctggtcgatctgtacccctctttcctgcgtaaaggttacagacgggaaatttttatcgctttcgtttgctccatatcatacctgctgggtctgaccatggttaccgaaggagggatgtatgtgttccagctatttgattactatgccgccagtggcgtgtgtctgctgtgggtggcattttttgagtgctttgtaattgcctggatctacggcggggataacctgtatgacggtatcgaagacatgattgggtatagacccggcccatggatgaagtattcttgggccgtgattacccctgtcctgtgcgtcggttgtttcatattttctctggtgaaatatgttcctctgacatacaacaagacctacgtatatcccaactgggcaatcgggctgggatggagcttggcactttcaagtatgctgtgtgtgcccctggtgatagtcatacgtctgtgtcaaacagaggggccattcctggtaagggtgaaatatctcctgaccccaagggaaccaaaccgatgggccgtcgaacgggaaggcgcaacaccttataatagtcgcacggtcatgaacggtgccttggtaaaacccacacatattatcgtggagactatgatgtag

SEQ ID NO: 49340 - DNA, 1863 bp, Artificial Sequence
  derived and/or modified sequence
atggccaccaaggagaagctgcagtgcctgaaggacttccacaaggacatcctgaagcccagccctgggaagagccctggcaccaggccagaagatgaggccgagggcaagccaccccagcgggagaagtggagcagcaagattgactttgtgctgtctgtggccggcggctttgtgggcctgggcaatgtgtggaggttcccctacctgtgctacaagaatggaggaggagccttcctgatcccctacttcatcttcctgtttggcagcggcctgcctgtgttcttcctggagatcatcatcggccagtacaccagcgagggcggcatcacctgctgggagaagatctgccccctcttctctggaattggctacgcctctgtggtgattgtgtccctgctgaatgtgtactacatcgtcatcctggcctgggccacctactacctgttccagagcttccagaaggagctgccctgggcccactgcaaccacagctggaacaccccccactgcatggaggacaccatgaggaagaacaagtctgtgtggatcaccatcagcagcaccaacttcaccagccctgtgattgagttctgggagagaaatgtgctgagcctgagccctggcatcgaccaccctggcagcctgaagtgggacctggccctgtgcctgctgctggtgtggctggtgtgcttcttctgcatctggaagggcgtgcgcagcacaggcaaggtggtgtacttcaccgccaccttcccctttgccatgctgctggtgctgctggtgcggggcctgaccctgcccggggccggggccggcatcaagttctacctgtacccagacatcacccggctggaggacccccaggtgtggattgatgctggcacccagatcttcttctcctatgccatctgcctgggcgccatgaccagcctgggcagctacaacaagtacaagtacaacagctacagagactgcatgctgctgggctgcctgaacagcggcaccagctttgtgtctggctttgccatcttcagcatcctgggcttcatggcccaggagcagggcgtggacattgctgatgtggccgagagcggccctggcctggccttcatcgcctaccccaaggctgtgaccatgatgcccctgcccaccttctggagcatcctcttcttcatcatgctgctgctgctgggcctggacagccagtttgtggaggtggagggccagatcaccagcctggtggacctgtaccccagcttcctgaggaagggctacagaagagagatcttcatcgcctttgtgtgcagcatctcctacctgctgggcctgaccatggtgacagagggcggcatgtatgtgttccagctgtttgactactatgctgccagcggcgtgtgcctgctgtgggtggccttctttgaatgttttgtgattgcctggatctatggaggagacaacctgtatgatggcatcgaggacatgattggctaccggcccggcccctggatgaagtacagctgggccgtcatcacccctgtgctgtgtgtgggctgcttcatcttcagcctggtgaagtatgtgcccctgacctacaacaagacctacgtgtaccccaactgggccatcggcctgggctggagcctggccctgagctccatgctgtgtgtgcccctggtgattgtcatccggctgtgccagacagagggccccttcctggtgcgggtgaagtacctgctgaccccccgggagcccaaccgctgggccgtggagcgggagggcgccaccccctacaacagcaggacagtgatgaatggagccctggtgaagcccacccacatcatcgtggagaccatgatgtag

SEQ ID NO: 49341 - DNA, 1863 bp, Artificial Sequence
  derived and/or modified sequence
atggccaccaaggagaagctgcagtgcctgaaggacttccacaaggatatcttaaaacctagccctggaaagagccctggcacccgacccgaggacgaggccgagggaaagccacctcagcgggagaaatggagttctaaaattgactttgtgctgtcggtggcaggaggattcgtgggcttgggtaatgtgtggcggttcccctacctatgttacaagaacggcggaggcgctttcctgattccatactttattttcctgtttggctccggactgcctgtgtttttcttagagatcataattggccagtatacttcggagggggggataacctgttgggagaagatctgtccgttgttctctgggattggctacgcatctgtggtgattgtgtcgctgttgaacgtttattatatcgtaatcctggcatgggccacctactatctgttccagagcttccaaaaagagctgccctgggcgcactgtaaccactcctggaatactccccactgcatggaggatactatgcggaaaaataagtctgtatggatcaccattagttctaccaatttcacttcaccggtaattgaattttgggagaggaacgtattgagcttaagccccggaatcgatcaccctggttctctgaagtgggatctagccctctgcctgttgcttgtttggctagtctgctttttctgtatttggaagggcgtgaggtcgacagggaaggtcgtatatttcacagccacgttcccattcgctatgctgttagtccttctggtgcgtggactaactctgccaggggctggtgccggaatcaaattttacctgtaccccgatatcacgcgactcgaggacccccaggtgtggattgatgccggcacacagatattttttagctacgcaatctgcttaggagctatgacatctctggggtcctataataaatataagtacaattcctacagagattgcatgcttctgggatgtctcaatagtggtaccagcttcgtgagtgggttcgccatcttctcaattctgggattcatggctcaggagcaaggcgttgatatagccgacgtagctgaaagtggcccaggtcttgcattcatcgcctatcccaaggccgtgaccatgatgcccttgccaactttttggtccattctcttctttatcatgctgctccttctcggattggacagtcagtttgtggaggtggagggacagatcacctccctggtcgatctgtatccttcgtttctgcgtaaaggctatagaagggaaatcttcattgccttcgtgtgttccatcagctatttgctggggttgacaatggtgacggagggaggtatgtacgtttttcaactgtttgattattacgccgcatccggcgtctgcttgctgtgggtagcctttttcgaatgctttgtgatcgcctggatctatggcggagacaacctgtacgatgggattgaggatatgattgggtatcgccctgggccgtggatgaagtacagctgggctgtaatcaccccagtgctttgtgtcggctgtttcatattctccttggtaaagtatgtgccgctgacctataacaaaacctatgtgtacccgaattgggcaatagggctgggttggtccctcgctctatcgagcatgctctgcgtgcctttagtaatcgtcattaggctgtgtcagaccgagggccctttcctggtcagagtaaaatatttgctcactcccagagaacctaatcggtgggccgtagaacgagaaggggcaacgccttacaattcccgtacagtcatgaatggggctctggtgaagccgacccacatcatagtggagacaatgatgtag

SEQ ID NO: 49342 - DNA, 1863 bp, Artificial Sequence
  derived and/or modified sequence
atggccaccaaggagaagctgcagtgcctgaaggacttccacaaggatattctgaaaccaagccccggcaaaagccctggcaccaggccagaagacgaagcagaaggtaagcccccccagagggagaaatggtccagcaagattgacttcgttttgtcggtggcaggagggttcgtgggacttggcaacgtgtggcggtttccatatttgtgttacaaaaacggggggggtgcctttctaataccctactttatttttctctttggctctgggctgcccgtgtttttccttgagatcatcatcgggcagtacacttctgaggggggaatcacatgctgggagaaaatctgccccctgttctccgggattgggtacgctagtgttgtgatcgtctcattgctcaatgtgtactatatcgtcatactggcctgggcaacgtactaccttttccagtcctttcaaaaggaactgccctgggcacattgcaatcacagctggaacacgccacactgcatggaagacaccatgcgcaagaataaatccgtttggatcaccattagctcgaccaacttcacttcccccgtgatagagttttgggagcggaacgtactaagtctctcccccggcattgatcaccccggcagccttaagtgggatttggccctgtgtctgctgctggtatggctcgtgtgctttttctgtatttggaaaggtgtgcggagtaccggcaaagtcgtttatttcacagccaccttccctttcgccatgttactggtgcttctggtccgcggcctgacactgcctggcgctggagcgggaattaaattctacttgtatcccgacattacgcgactggaagacccccaagtgtggattgacgcagggacccagatcttcttttcgtatgcaatttgcctgggcgccatgacctctctcggatcatacaataagtataagtataatagctaccgcgactgtatgctcttgggctgcctcaacagcggcacatccttcgtgtcaggcttcgcaatctttagcatactgggatttatggcacaagaacagggggtcgatatcgctgacgtggcagaatccgggccgggtctggcttttattgcctaccctaaggctgttaccatgatgcccttaccaactttctggtcgattctattcttcataatgctgctcctcctgggcttggacagccagtttgtggaagtggagggacagatcacttctctggtggacctctacccatcattcttacgaaaaggttataggcgagagatatttatcgcttttgtgtgtagtatatcctacttgctcgggctcacaatggtcacagagggtggaatgtacgtttttcagctctttgattactatgctgcctcgggagtctgcttgctgtgggttgctttcttcgagtgtttcgttatcgcttggatttacggaggggacaatctttatgacggcattgaggatatgatcggatataggccaggtccctggatgaagtatagctgggccgtgatcacacctgttctgtgcgtaggatgctttatcttttcactggtcaaatacgtgcctttgacttacaataagacctatgtatatcccaactgggccataggcctagggtggtccttagccttatctagcatgctttgtgtgcctctggtgattgtgatccgcctttgtcagactgagggtccatttctggtaagggtaaagtacctcctcacccctcgcgagccaaaccggtgggctgtcgagcgcgaaggcgctaccccctacaacagccgaaccgtgatgaacggcgcgctcgtaaagccaacccacattatcgtggagactatgatgtag

SEQ ID NO: 49343 - DNA, 1863 bp, Artificial Sequence
  derived and/or modified sequence
atggctaccaaagaaaagctgcagtgccttaaagacttccacaaagacatcttgaagccatcgcccggaaaatctcccggtacgcgtccagaggacgaggcggaagggaaacccccacaacgtgaaaagtggagctctaagatcgacttcgttctgtctgtggcaggcggtttcgtcggactcggcaatgtatggcgctttccttatctgtgctacaaaaacgggggaggcgctttcctcattccatatttcatttttcttttcggatccggactgcctgtgtttttcctagagataattatcggccagtacacgtctgaaggcggaattacatgttgggagaagatttgccccctttttagcggcatcgggtacgcctcagtggttattgtgtccttactgaacgtgtactatattgtcatccttgcatgggcaacttattacttgtttcagagtttccagaaagaattgccctgggcccattgtaaccacagctggaacacaccccattgtatggaggacacaatgcgaaagaataaatcagtttggatcacaatctccagtactaatttcacttcaccagtcattgaattctgggagcggaatgtgctgtctctctcccccggtattgaccatcctggttccctaaaatgggaccttgccctgtgcctgttgctagtgtggctagtctgcttcttctgtatttggaaaggagtaaggtcaacaggaaaggtggtgtacttcacggctactttcccatttgccatgctcttggtcctattggtaagagggctgacgctgccgggtgccggtgccggaataaaattctatctttacccagatatcacgaggctcgaggatcctcaggtatggatcgacgctggaactcagatattcttttcctacgccatctgcctgggcgctatgacttctctcggcagctacaataaatacaagtataacagctatagagactgtatgcttctcgggtgcctgaattcaggcacctcgtttgtcagtggtttcgccatcttttccattttaggattcatggctcaggagcagggagtagatattgctgatgtggccgagtccggtccaggcctcgcattcatcgcttaccccaaggcggtgacgatgatgcctctgcccacattctggagtatcttattcttcattatgctgctccttctggggctggactctcagtttgtggaggtcgaggggcagatcaccagcctggtggacctctatccaagcttcctcagaaaaggttatcgaagggagatctttatagccttcgtgtgttccatatcatacttacttggtctaaccatggtgacagaaggcggaatgtacgtgttccagctcttcgactactacgcagcaagtggagtgtgcctcctgtgggtggcattttttgaatgcttcgtgattgcttggatctacggcggagataatctttacgacggcatagaagatatgataggatacagaccaggcccttggatgaaatacagctgggctgttataacaccagtcttgtgcgtaggttgttttatctttagcctggtgaagtatgtgcccctgacttacaacaagacgtacgtttaccccaattgggcaatagggctgggttggagcttagctcttagctcaatgctctgcgtgcccctggtgattgtgattcgactatgccagaccgagggcccttttctggtgagggtgaagtacctgctgacaccgagggagcctaataggtgggcggtcgagagagaaggtgcaaccccctataattctcggacagtgatgaacggagccttggtaaagccaacccacatcatcgtagagacgatgatgtag

SEQ ID NO: 49344 - DNA, 1863 bp, Artificial Sequence
  derived and/or modified sequence
atggctactaaagaaaagctccaatgtctcaaggacttccataaagacattctgaaaccgagccccggaaaaagcccaggaactaggcccgaagatgaggctgaaggtaagccaccacaaagagagaagtggtcctcaaaaatcgactttgtgctgtccgtagccggaggatttgtggggctggggaatgtttggcgcttcccttacctgtgctacaaaaacggcggaggcgctttcctcatcccatattttatctttctcttcggctcgggcctccccgttttctttttagaaatcatcatcggccaatatacatctgaaggcggaatcacttgttgggaaaagatctgtccactgttttcaggtattgggtatgcttccgtcgtgatcgtcagtctcctgaacgtgtactacattgtgatccttgcatgggctacatactatctgttccagtccttccagaaggagctcccatgggcacactgtaatcactcttggaatactccccattgcatggaggataccatgagaaagaataaatccgtgtggattaccatttcatcgactaactttactagccctgtcatcgaattttgggaacgcaatgttctgagtctgagccccggaatcgaccatcccggttccctcaagtgggatctggctctgtgcctgctactcgtctggctggtatgcttcttttgtatttggaaaggggtgcgatctactggcaaagtcgtttactttacagcgacgtttccgtttgccatgctccttgtgttgctcgtgagaggcctgaccctgcctggggctggggcaggcatcaagttctacctttacccagatattactagactcgaggaccctcaagtgtggattgacgccggtacccagattttcttctcatacgccatttgtttgggtgctatgacttccctcgggtcttacaacaagtacaaatacaactcttacagggactgtatgctgctggggtgtctaaacagcggcactagtttcgtctccggcttcgccatcttttccattttagggtttatggcgcaagagcaaggcgtagatattgcagatgtggctgagtcaggacccggtctcgccttcatcgcttacccaaaagcagtcacaatgatgccattgccaaccttctggagcatattgttcttcatcatgctgctattgcttggattggactcacagtttgtcgaggtcgaaggccaaatcacttccctcgtagatctgtatccttcctttcttagaaagggctatcggagagagattttcatagcgtttgtctgtagcatctcttatctattgggccttacaatggttaccgagggcggaatgtacgtatttcagttgttcgactattacgctgcaagcggcgtctgtctactatgggtggcatttttcgaatgcttcgtcatcgcctggatctacggtggcgataatctctacgacgggatcgaggacatgatcgggtaccgccctgggccatggatgaaatattcttgggcagtgataactccggttctctgtgtaggatgttttattttttccctggtcaagtatgtccccctgacctataataagacctacgtctatcccaattgggcgattggattgggctggtctcttgccttgagctcaatgttgtgcgtccctttagtaattgtgatacggctctgtcagaccgagggaccattcctggtgagagtgaagtatctgctgacaccaagggaaccgaatagatgggctgtggaacgggaaggagccaccccttacaactctcggacggtcatgaatggggctcttgtgaagcccacccatattatcgtagaaacaatgatgtag

SEQ ID NO: 49345 - DNA, 6506 bp, Artificial Sequence
  derived and/or modified sequence
gagagctgcctgctcagacaacagacacgcgaggtcaggaagaagccgcttataaattaccgcttccttcgcgccgccgccaacgccgagccccgaggaccgcaagcccagaggacaagctgcgccaagagggagtgctggagctgttcacccagcgggtcagagagcgagccgggcaggccagcccccggccggcggaaccctggcacagcctgagcagatgctgcgggcggcgccgcagccaccccagatccagaaccagaaccacagcccttctgaggagctcccaaacaaagcaaggagatggccaccaaggagaagctgcagtgtctgaaagatttccacaaggacatcctgaagccctcaccagggaagagcccaggcacgcggcctgaggacgaggctgagggaaaacctccgcagagggagaagtggtctagcaagatcgactttgtgctctctgtggctggcggcttcgtgggcttgggcaacgtctggcgcttcccgtacctctgctacaagaatggtggaggtgcgtttctcataccgtattttattttcctgtttgggagcggcctgcctgtgtttttcttggagatcatcataggccagtacacctctgaagggggcatcacctgctgggaaaagatctgccccttgttctctggtatcggctatgcctccgttgtaattgtgtccctcctgaatgtctactacatcgtcatcctggcctgggccacatactacctgttccagtccttccagaaggagctgccctgggcacactgcaaccacagctggaacacacctcactgcatggaggacaccatgcgcaagaacaagagtgtctggatcaccatcagctccaccaacttcacctcccctgtcatcgagttctgggagcgcaacgtgctgagcttgtcccctggaatcgaccacccaggctctctgaaatgggacctcgctctctgccttcttttagtctggctagtgtgtttcttctgcatctggaagggcgtcaggtccactgggaaggtcgtctacttcacagccacttttccattcgccatgctcctggtgctgctggtccgagggctgacgctgccgggcgcgggcgcaggcatcaagttctatctgtatcctgacatcacccgccttgaggacccacaggtgtggattgacgctgggactcagatattcttctcttatgccatctgcctgggggctatgacctcgctggggagctacaacaagtacaagtataactcgtacagggactgtatgctgctgggatgcctgaacagtggtaccagttttgtgtctggcttcgcaattttttccatcctgggcttcatggcacaagagcaaggggtggacattgctgatgtggctgagtcaggtcctggcctggccttcattgcctacccaaaagctgtgacaatgatgccgctgcccacattttggtccattcttttttttattatgcttctcttgcttggactggatagccagtttgttgaagttgaaggacagatcacatccttggttgatctttacccatccttcctaaggaagggttatcgtcgggaaatcttcatcgccttcgtgtgtagcatcagctacctgctggggctgacgatggtgacggagggtggcatgtatgtgtttcagctctttgactactatgcagctagcggtgtatgccttttgtgggttgcattctttgaatgttttgttattgcctggatatatggaggtgataacctttatgatggtattgaggacatgattggctatcggcccgggccctggatgaagtacagctgggctgtgatcactccagttctctgtgttggatgtttcatcttctcgctcgtcaagtacgtacccctgacctacaacaaaacatacgtgtaccccaactgggccattgggctgggctggagcctggccctttcctccatgctctgcgttcccttggtcatcgtcatccgcctctgccagactgaggggccgttccttgtgagagtcaagtacctgctgaccccaagggaacccaaccgctgggctgtggagcgcgagggagccacaccttacaactctcgcaccgtcatgaacggcgctctcgtgaaaccgacccacatcattgtggagaccatgatgtgagctctctcgggtcgacggggccggcggctttcctgctgtttactaacattagattctcataggaccaggtttacagagctttatatttgcactaggatttttttttttttgtaattgtcacagaaaatgtaattgtgggtatgtgtgcgtgcgtgtgtgtgtgtgtgtgtatcgtgtgtgtgtgttttgttttgatttgggggatattttgtacaaaaagaaaacccacgggaagatgtccgtggagaggcagagctttcatactgaattagatgtattttatgggaatttggtaaatttttctttgtatttttttttttacatataagtatatatacacttagagattgtcatatacttttaccacttgaattgatcttcttgccagcaatagatctcattttcaaaagcaattcttcggtgctgtgtagctggcagaaagttctgtccagtaaacgcaggatggaattttcctgggactctacacccatcttaaggtggtataccttccaaatcctggttcagatggaagaaatagcaggagagaggacccattagctggcagacccagggggaagaaaggagggctgtgaggagatacctcattaaacttggcttagtgaagaagagagatgccaaaggaatgaaccaacccttcacataaaggagactggctgaagctgaatgaggaggccctatagcagaagtctgattctaagagcagtagaaacttgtaccagaagcaaaatcccacttttaattttgagatggtgagtggatagtcagtagaccgtcagaaccactggccagagagggagctgctagagatccaagaaggctggcaggagtgaggctcacaactcagcctcgcaagaggtggcagaggcacaggaggccacagtccttcctggggcattccaggcagagaaggagcagaggctctcccggcaggagctggggtctcagggctcagatgagtctgttgcatttgaatggggtcatagcaggttctggtcattccccaagcaacatctcagcatctcttaaagttgcctgcaggaatgaagcatgacatacctgttgagggactaggggagtggtggggaggtgagtggaccaaaggatataggccccaggcatgcagatgggcccggtgtcggggaggggtgctttctttcctcatctccccactccccactctcagcctgggagactcctgccaagccctcattaaagatgccaccctgggctgccctggcacctagcaaggcacaccaagaacagcttttgagtctgtatcctccactgggggaagtgctcccagttcagaacaagggcagcccgtggtgctgacctaggatataacaaagctcttcacttcaaaacccctgcaatagctgggtttacagacatttaccacctgcggacccaaaagagaaggcctaggagagttttctagaaggttgggattgtcagggtcctggcccctcagaactggcttgatcaagggccttatgtggagcagaggttgtctctgaaccaggagagaaggtactatacctttcaaatccccagggcagacacacccccacccagcccctatttggacctaaactgtgccatttgaacagtcacttccaagctcagtctaaatgaaaccgaaacgtgaccacgcacaaaggcagtcactgcctcgaggggtgcagaccgcagaattttcacagcaggggctcttggaaccctggaaacccccttcttaaatttgggaggaggagtatgcctttggtgtccccctcccaaggggcaattctgaaccccatctttggcaggcatacatatttcactgtttccaaagctatctactctgccaaacaacacccagtcctattccaaactctcaacgattctatcttgttcctgtttttctatgtatttatggttgccgtttgtgtctgatttgattttactgttttttccctgattttatggagtagcattgtgacctgttttcctttgtcttatataactttagtaaactaaccactgtcaatgattgagggcaggtggcacgtggggaagaggggacttggcacgcagtggctacctgggcatttgtggtcatttcagtttccatctccccagcgggggctccctgggtgaaaggccacagtattttgggttggtaggcaaattgcaacattctggacatggcctgaggaaggcctcttcttataagattctcagaccaaattctagaccaaagacacaggcagaccaagtccccaggccccgcctggaaggaagtcgttcctcaactctccccaaggcacctgtctccaatcagagccctctcgcccagccagccctggctctgtgtgcagagcatagctctgcgagtacctgtgtaataatgctcaaccttcatgtctccgtataaacgaaactttccatgagagctcatgactctggtccacctgtctatagagaatgggcaaagtccttcacctgctttctgcttgggatgggtcagaaatgctgatgcccgcacatagcccagccagccagatctggaaaggaagcgagggggttgtttaaatcaattttttaagatgaagaagtgggagacactgcgttgagatgggccatgctagggccacagagatttcctgacggtcagggagagaagggcctccagggtcccctaacccaacgcccttgttgtaaatgaggtaactgaggctcagggaggcactgtgagccaggaatggattttcttgaaacagctctagctgcaggttctccgaggtaggtgcagggaatggtgagtgtctaaccagggctacatccagcaacatcctcaaggtcttcctgacaaccaaagacaagcctttatggaaaaggaaatgcgctcccctccatgttcagggatgaggggagcagcagcagccacactcccaccatcctcacagaattcctggacccatgcggtggctccgtgagctgggtgactccagcctcacctgcacaccccagccctgcacggggccctccttcctcccagcagcccttggtgagctaggaattgagatccctgtttgtgaaagagggaactgaggtgcagagaagccagaggtgtgccagatccttaggcaggatttagatgaagtcgccctggctccagactgaccccgaggctctgcggggagtttccaggcagcaggaagtggccttggatgctctccttccaggacagcataacccctgggccatgtgcagctccttcactgccccctggatccccagcatacccccaaagacagtggggaaacacaaggggagagcacagcatggcccctccagcccacttcagggcactcttgtatcacccgggtaccgccacactggtcccccacccagccagcatctcccagcacagcccctctccctggggaaatgctctgggtagccagtctaaaggcagaggcacctaactgctccccgcagcccaccccacccaagattcagacacaagccaggaaaggacccaagagaaaatccttcaaggtggcctgaggtcccatccctccctcagacccatgtggtcccaggccaggctgcctgggacacggtaaataccactgtgtgcaaaaatcgaagtacaaaaccacaagactaaacaaaacaaacccagagagccaaacttgtagaggtgggcagtccagaaagcagggggcagccctccccctttccttctctccctgatcctcagaatatatattgttgtaataggaagcatttttgcattgttctcttgtgggtgtcactacagacatgttctggcgtgttctccgagggatggagcatcctgttatatatttgacttcaaattgagatgttggcttcattttttttttttacccaattaatctcccaatccctagcaactgtgactctgtatttagcacaagagaaagctgagaatgtgggtcttgcctccttccagaaatatgtctggctcatcaggacatttttttaaaacttcaaaatatttttaagatattttaaacttttataaaaaaaaaatcaaccaacaagagacttttctgaggaggaacatttgtatttgaacaagatccttggtgtgtagttcagtcttgcagtatacaagcttttgtgtataaatgttttatgatatgattccctgtattttgcaggggtttttttctcttttgctttttagataaatatgtatatcaatattttaaattcatctttgctttttttagaggagtttgtaatcaccttataacatgaaaataaacatttcctttttaacatcc

SEQ ID NO: 49346 - DNA, 1260 bp, Artificial Sequence
  derived and/or modified sequence
cagacaacagacacgcgaggtcaggaagaagccgcttataaattaccgcttccttcgcgccgccgccaacgccgagccccgaggaccgcaagcccagaggacaagctgcgccaagagggagtgctggagctgttcacccagcgggtcagagagcgagccgggcaggccagcccccggccggcggaaccctggcacagcctgagcagatgctgcgggcggcgccgcagccaccccagatccagaaccagaaccacagcccttctgaggagctcccaaacaaagcaaggagatggccaccaaggagaagctgcagtgtctgaaagatttccacaaggacatcctgaagccctcaccagggaagagcccaggcacgcggcctgaggacgaggctgagggaaaacctccgcagagggagaagtggtctagcaagatcgactttgtgctctctgtggctggcggcttcgtgggcttgggcaacgtctggcgcttcccgtacctctgctacaagaatggtggaggtgcgtttctcataccgtattttattttcctgtttgggagcggcctgcctgtgtttttcttggagatcatcataggccagtacacctctgaagggggcatcacctgctgggaaaagatctgccccttgttctctggtatcggctatgcctccgttgtaattgtgtccctcctgaatgtctactacatcgtcatcctggcctgggccacatactacctgttccagtccttccagaaggagctgccctgggcacactgcaaccacagctggaacacacctcactgcatggaggacaccatgcgcaagaacaagagtgtctggatcaccatcagctccaccaacttcacctcccctgtcatcgagttctgggagtaaggccacctcattgaagcaaggaggaggacatgggtggggcagagaggatggcccacttccttatctcctcccctgggatacaggagccactgtcttcgggggagtgggaggagggtgcagatctggagataaatttatgcctttggccatagacaggactggaatcccagttctgccacttactggctgtttgaccttaggcaagccactcctcctttctgagcctcagtttctttacctgtaagataaaaagaatgaatcattactaccctgtgaggcaggtatgcatacttatgttgtctaaaaatgatacagttttcttaatgtattttaggaaaaaatatattctgttattgcacagagaaaaa

SEQ ID NO: 49347 - DNA, 1991 bp, Artificial Sequence
  derived and/or modified sequence
atttttccacccagcaggatgggtgatgctgagagctgcctgctcagacaacagacacgcgaggtcaggaagaagccgcttataaattaccgcttccttcgcgccgccgccaacgccgagccccgaggaccgcaagcccagaggacaagctgcgccaagagggagtgctggagctgttcacccagcgggtcagagagcgagccgggcaggccagcccccggccggcggaaccctggcacagcctgagcagatgctgcgggcggcgccgcagccaccccagatccagaaccagaaccacagcccttctgaggagctcccaaacaaagcaaggagatggccaccaaggagaagctgcagtgtctgaaagatttccacaaggacatcctgaagccctcaccagggaagagcccaggcacgcggcctgaggacgaggctgagggaaaacctccgcagagggagaagtggtctagcaagatcgactttgtgctctctgtggctggcggcttcgtgggcttgggcaacgtctggcgcttcccgtacctctgctacaagaatggtggaggtgcgtttctcataccgtattttattttcctgtttgggagcggcctgcctgtgtttttcttggagatcatcataggccagtacacctctgaagggggcatcacctgctgggaaaagatctgccccttgttctctggtatcggctatgcctccgttgtaattgtgtccctcctgaatgtctactacatcgtcatcctggcctgggccacatactacctgttccagtccttccagaaggagctgccctgggcacactgcaaccacagctggaacacacctcactgcatggaggacaccatgcgcaagaacaagagtgtctggatcaccatcagctccaccaacttcacctcccctgtcatcgagttctgggagcgcaacgtgctgagcttgtcccctggaatcgaccacccaggctctctgaaatgggacctcgctctctgccttcttttagtctggctagtgtgtttcttctgcatctggaagggcgtcaggtccactgggaaggtcgtctacttcacagccacttttccattcgccatgctcctggtgctgctggtccgagggctgacgctgccgggcgcgggcgcaggcatcaagttctatctgtatcctgacatcacccgccttgaggacccacaggtgtggattgacgctgggactcagatattcttctcttatgccatctgcctgggggctatgacctcgctggggagctacaacaagtacaagtataactcgtacaggtcctggcctggccttcattgcctacccaaaagctgtgacaatgatgccgctgcccacattttggtccattcttttttttattatgcttctcttgcttggactggatagccagtttgttgaagttgaaggacagatcacatccttggttgatctttacccatccttcctaaggaagggttatcgtcgggaaatcttcatcgccttcgtgtgtagcatcagctacctgctggggctgacgatggtgacggagggtggcatgtatgtgtttcagctctttgactactatgcagctagcggtgtatgccttttgtgggttgcattctttgaatgttttgttattgcctggatatatggtgagtacagattttttcatgtcctttctcaaggctctcctttgggcttctctacttagaagcttcagaagcagagaatactaacagaaattcaatttgagttgaacagtaggccctccctacctagactacacaaataatctcactgtagccacactgaagatcctcctggtgctaaaggtgtgaggtgtgactggatgttttcacagtttcagaacttggttgtgcaggacctggaatactccttttttatctccttgaggccttgggtttgagtttgggctgtgcctaagattgcacacctagggtttggagtgtgcctcagattgccag

SEQ ID NO: 49348 - DNA, 6534 bp, Artificial Sequence
  derived and/or modified sequence
atttttccacccagcaggatgggtgatgctgagagctgcctgctcagacaacagacacgcgaggtcaggaagaagccgcttataaattaccgcttccttcgcgccgccgccaacgccgagccccgaggaccgcaagcccagaggacaagctgcgccaagagggagtgctggagctgttcacccagcgggtcagagagcgagccgggcaggccagcccccggccggcggaaccctggcacagcctgagcagatgctgcgggcggcgccgcagccaccccagatccagaaccagaaccacagcccttctgaggagctcccaaaccaaggagatggccaccaaggagaagctgcagtgtctgaaagatttccacaaggacatcctgaagccctcaccagggaagagcccaggcacgcggcctgaggacgaggctgagggaaaacctccgcagagggagaagtggtctagcaagatcgactttgtgctctctgtggctggcggcttcgtgggcttgggcaacgtctggcgcttcccgtacctctgctacaagaatggtggaggtgcgtttctcataccgtattttattttcctgtttgggagcggcctgcctgtgtttttcttggagatcatcataggccagtacacctctgaagggggcatcacctgctgggaaaagatctgccccttgttctctggtatcggctatgcctccgttgtaattgtgtccctcctgaatgtctactacatcgtcatcctggcctgggccacatactacctgttccagtccttccagaaggagctgccctgggcacactgcaaccacagctggaacacacctcactgcatggaggacaccatgcgcaagaacaagagtgtctggatcaccatcagctccaccaacttcacctcccctgtcatcgagttctgggagcgcaacgtgctgagcttgtcccctggaatcgaccacccaggctctctgaaatgggacctcgctctctgccttcttttagtctggctagtgtgtttcttctgcatctggaagggcgtcaggtccactgggaaggtcgtctacttcacagccacttttccattcgccatgctcctggtgctgctggtccgagggctgacgctgccgggcgcgggcgcaggcatcaagttctatctgtatcctgacatcacccgccttgaggacccacaggtgtggattgacgctgggactcagatattcttctcttatgccatctgcctgggggctatgacctcgctggggagctacaacaagtacaagtataactcgtacagggactgtatgctgctgggatgcctgaacagtggtaccagttttgtgtctggcttcgcaattttttccatcctgggcttcatggcacaagagcaaggggtggacattgctgatgtggctgagtcaggtcctggcctggccttcattgcctacccaaaagctgtgacaatgatgccgctgcccacattttggtccattcttttttttattatgcttctcttgcttggactggatagccagtttgttgaagttgaaggacagatcacatccttggttgatctttacccatccttcctaaggaagggttatcgtcgggaaatcttcatcgccttcgtgtgtagcatcagctacctgctggggctgacgatggtgacggagggtggcatgtatgtgtttcagctctttgactactatgcagctagcggtgtatgccttttgtgggttgcattctttgaatgttttgttattgcctggatatatggaggtgataacctttatgatggtattgaggacatgattggctatcggcccgggccctggatgaagtacagctgggctgtgatcactccagttctctgtgttggatgtttcatcttctcgctcgtcaagtacgtacccctgacctacaacaaaacatacgtgtaccccaactgggccattgggctgggctggagcctggccctttcctccatgctctgcgttcccttggtcatcgtcatccgcctctgccagactgaggggccgttccttgtgagagtcaagtacctgctgaccccaagggaacccaaccgctgggctgtggagcgcgagggagccacaccttacaactctcgcaccgtcatgaacggcgctctcgtgaaaccgacccacatcattgtggagaccatgatgtgagctctctcgggtcgacggggccggcggctttcctgctgtttactaacattagattctcataggaccaggtttacagagctttatatttgcactaggatttttttttttttgtaattgtcacagaaaatgtaattgtgggtatgtgtgcgtgcgtgtgtgtgtgtgtgtgtatcgtgtgtgtgtgttttgttttgatttgggggatattttgtacaaaaagaaaacccacgggaagatgtccgtggagaggcagagctttcatactgaattagatgtattttatgggaatttggtaaatttttctttgtatttttttttttacatataagtatatatacacttagagattgtcatatacttttaccacttgaattgatcttcttgccagcaatagatctcattttcaaaagcaattcttcggtgctgtgtagctggcagaaagttctgtccagtaaacgcaggatggaattttcctgggactctacacccatcttaaggtggtataccttccaaatcctggttcagatggaagaaatagcaggagagaggacccattagctggcagacccagggggaagaaaggagggctgtgaggagatacctcattaaacttggcttagtgaagaagagagatgccaaaggaatgaaccaacccttcacataaaggagactggctgaagctgaatgaggaggccctatagcagaagtctgattctaagagcagtagaaacttgtaccagaagcaaaatcccacttttaattttgagatggtgagtggatagtcagtagaccgtcagaaccactggccagagagggagctgctagagatccaagaaggctggcaggagtgaggctcacaactcagcctcgcaagaggtggcagaggcacaggaggccacagtccttcctggggcattccaggcagagaaggagcagaggctctcccggcaggagctggggtctcagggctcagatgagtctgttgcatttgaatggggtcatagcaggttctggtcattccccaagcaacatctcagcatctcttaaagttgcctgcaggaatgaagcatgacatacctgttgagggactaggggagtggtggggaggtgagtggaccaaaggatataggccccaggcatgcagatgggcccggtgtcggggaggggtgctttctttcctcatctccccactccccactctcagcctgggagactcctgccaagccctcattaaagatgccaccctgggctgccctggcacctagcaaggcacaccaagaacagcttttgagtctgtatcctccactgggggaagtgctcccagttcagaacaagggcagcccgtggtgctgacctaggatataacaaagctcttcacttcaaaacccctgcaatagctgggtttacagacatttaccacctgcggacccaaaagagaaggcctaggagagttttctagaaggttgggattgtcagggtcctggcccctcagaactggcttgatcaagggccttatgtggagcagaggttgtctctgaaccaggagagaaggtactatacctttcaaatccccagggcagacacacccccacccagcccctatttggacctaaactgtgccatttgaacagtcacttccaagctcagtctaaatgaaaccgaaacgtgaccacgcacaaaggcagtcactgcctcgaggggtgcagaccgcagaattttcacagcaggggctcttggaaccctggaaacccccttcttaaatttgggaggaggagtatgcctttggtgtccccctcccaaggggcaattctgaaccccatctttggcaggcatacatatttcactgtttccaaagctatctactctgccaaacaacacccagtcctattccaaactctcaacgattctatcttgttcctgtttttctatgtatttatggttgccgtttgtgtctgatttgattttactgttttttccctgattttatggagtagcattgtgacctgttttcctttgtcttatataactttagtaaactaaccactgtcaatgattgagggcaggtggcacgtggggaagaggggacttggcacgcagtggctacctgggcatttgtggtcatttcagtttccatctccccagcgggggctccctgggtgaaaggccacagtattttgggttggtaggcaaattgcaacattctggacatggcctgaggaaggcctcttcttataagattctcagaccaaattctagaccaaagacacaggcagaccaagtccccaggccccgcctggaaggaagtcgttcctcaactctccccaaggcacctgtctccaatcagagccctctcgcccagccagccctggctctgtgtgcagagcatagctctgcgagtacctgtgtaataatgctcaaccttcatgtctccgtataaacgaaactttccatgagagctcatgactctggtccacctgtctatagagaatgggcaaagtccttcacctgctttctgcttgggatgggtcagaaatgctgatgcccgcacatagcccagccagccagatctggaaaggaagcgagggggttgtttaaatcaattttttaagatgaagaagtgggagacactgcgttgagatgggccatgctagggccacagagatttcctgacggtcagggagagaagggcctccagggtcccctaacccaacgcccttgttgtaaatgaggtaactgaggctcagggaggcactgtgagccaggaatggattttcttgaaacagctctagctgcaggttctccgaggtaggtgcagggaatggtgagtgtctaaccagggctacatccagcaacatcctcaaggtcttcctgacaaccaaagacaagcctttatggaaaaggaaatgcgctcccctccatgttcagggatgaggggagcagcagcagccacactcccaccatcctcacagaattcctggacccatgcggtggctccgtgagctgggtgactccagcctcacctgcacaccccagccctgcacggggccctccttcctcccagcagcccttggtgagctaggaattgagatccctgtttgtgaaagagggaactgaggtgcagagaagccagaggtgtgccagatccttaggcaggatttagatgaagtcgccctggctccagactgaccccgaggctctgcggggagtttccaggcagcaggaagtggccttggatgctctccttccaggacagcataacccctgggccatgtgcagctccttcactgccccctggatccccagcatacccccaaagacagtggggaaacacaaggggagagcacagcatggcccctccagcccacttcagggcactcttgtatcacccgggtaccgccacactggtcccccacccagccagcatctcccagcacagcccctctccctggggaaatgctctgggtagccagtctaaaggcagaggcacctaactgctccccgcagcccaccccacccaagattcagacacaagccaggaaaggacccaagagaaaatccttcaaggtggcctgaggtcccatccctccctcagacccatgtggtcccaggccaggctgcctgggacacggtaaataccactgtgtgcaaaaatcgaagtacaaaaccacaagactaaacaaaacaaacccagagagccaaacttgtagaggtgggcagtccagaaagcagggggcagccctccccctttccttctctccctgatcctcagaatatatattgttgtaataggaagcatttttgcattgttctcttgtgggtgtcactacagacatgttctggcgtgttctccgagggatggagcatcctgttatatatttgacttcaaattgagatgttggcttcattttttttttttacccaattaatctcccaatccctagcaactgtgactctgtatttagcacaagagaaagctgagaatgtgggtcttgcctccttccagaaatatgtctggctcatcaggacatttttttaaaacttcaaaatatttttaagatattttaaacttttataaaaaaaaaatcaaccaacaagagacttttctgaggaggaacatttgtatttgaacaagatccttggtgtgtagttcagtcttgcagtatacaagcttttgtgtataaatgttttatgatatgattccctgtattttgcaggggtttttttctcttttgctttttagataaatatgtatatcaatattttaaattcatctttgctttttttagaggagtttgtaatcaccttataacatgaaaataaacatttcctttttaacatccaa

SEQ ID NO: 49349 - DNA, 6409 bp, Artificial Sequence
  derived and/or modified sequence
atttttccacccagcaggatgggtgatgctgagagctgcctgctcagacaacagacacgcgaggtcaggaagaagccgcttataaattaccgcttccttcgcgccgccgccaacgccgagccccgaggaccgcaagcccagaggacaagctgcgccaagagggagtgctggagctgttcacccagcgggtcagagagcgagccgggcaggccagcccccggccggcggaaccctggcacagcctgagcagatgctgcgggcggcgccgcagccaccccagatccagaaccagaaccacagcccttctgaggagctcccaaaccaaggagatggccaccaaggagaagctgcagtgtctgaaagatttccacaaggacatcctgaagccctcaccagggaagagcccaggcacgcggcctgaggacgaggctgagggaaaacctccgcagagggagaagtggtctagcaagatcgactttgtgctctctgtggctggcggcttcgtgggcttgggcaacgtctggcgcttcccgtacctctgctacaagaatggtggaggtgcgtttctcataccgtattttattttcctgtttgggagcggcctgcctgtgtttttcttggagatcatcataggccagtacacctctgaagggggcatcacctgctgggaaaagatctgccccttgttctctggtatcggctatgcctccgttgtaattgtgtccctcctgaatgtctactacatcgtcatcctggcctgggccacatactacctgttccagtccttccagaaggagctgccctgggcacactgcaaccacagctggaacacacctcactgcatggaggacaccatgcgcaagaacaagagtgtctggatcaccatcagctccaccaacttcacctcccctgtcatcgagttctgggagcgcaacgtgctgagcttgtcccctggaatcgaccacccaggctctctgaaatgggacctcgctctctgccttcttttagtctggctagtgtgtttcttctgcatctggaagggcgtcaggtccactgggaaggtcgtctacttcacagccacttttccattcgccatgctcctggtgctgctggtccgagggctgacgctgccgggcgcgggcgcaggcatcaagttctatctgtatcctgacatcacccgccttgaggacccacaggtgtggattgacgctgggactcagatattcttctcttatgccatctgcctgggggctatgacctcgctggggagctacaacaagtacaagtataactcgtacaggtcctggcctggccttcattgcctacccaaaagctgtgacaatgatgccgctgcccacattttggtccattcttttttttattatgcttctcttgcttggactggatagccagtttgttgaagttgaaggacagatcacatccttggttgatctttacccatccttcctaaggaagggttatcgtcgggaaatcttcatcgccttcgtgtgtagcatcagctacctgctggggctgacgatggtgacggagggtggcatgtatgtgtttcagctctttgactactatgcagctagcggtgtatgccttttgtgggttgcattctttgaatgttttgttattgcctggatatatggaggtgataacctttatgatggtattgaggacatgattggctatcggcccgggccctggatgaagtacagctgggctgtgatcactccagttctctgtgttggatgtttcatcttctcgctcgtcaagtacgtacccctgacctacaacaaaacatacgtgtaccccaactgggccattgggctgggctggagcctggccctttcctccatgctctgcgttcccttggtcatcgtcatccgcctctgccagactgaggggccgttccttgtgagagtcaagtacctgctgaccccaagggaacccaaccgctgggctgtggagcgcgagggagccacaccttacaactctcgcaccgtcatgaacggcgctctcgtgaaaccgacccacatcattgtggagaccatgatgtgagctctctcgggtcgacggggccggcggctttcctgctgtttactaacattagattctcataggaccaggtttacagagctttatatttgcactaggatttttttttttttgtaattgtcacagaaaatgtaattgtgggtatgtgtgcgtgcgtgtgtgtgtgtgtgtgtatcgtgtgtgtgtgttttgttttgatttgggggatattttgtacaaaaagaaaacccacgggaagatgtccgtggagaggcagagctttcatactgaattagatgtattttatgggaatttggtaaatttttctttgtatttttttttttacatataagtatatatacacttagagattgtcatatacttttaccacttgaattgatcttcttgccagcaatagatctcattttcaaaagcaattcttcggtgctgtgtagctggcagaaagttctgtccagtaaacgcaggatggaattttcctgggactctacacccatcttaaggtggtataccttccaaatcctggttcagatggaagaaatagcaggagagaggacccattagctggcagacccagggggaagaaaggagggctgtgaggagatacctcattaaacttggcttagtgaagaagagagatgccaaaggaatgaaccaacccttcacataaaggagactggctgaagctgaatgaggaggccctatagcagaagtctgattctaagagcagtagaaacttgtaccagaagcaaaatcccacttttaattttgagatggtgagtggatagtcagtagaccgtcagaaccactggccagagagggagctgctagagatccaagaaggctggcaggagtgaggctcacaactcagcctcgcaagaggtggcagaggcacaggaggccacagtccttcctggggcattccaggcagagaaggagcagaggctctcccggcaggagctggggtctcagggctcagatgagtctgttgcatttgaatggggtcatagcaggttctggtcattccccaagcaacatctcagcatctcttaaagttgcctgcaggaatgaagcatgacatacctgttgagggactaggggagtggtggggaggtgagtggaccaaaggatataggccccaggcatgcagatgggcccggtgtcggggaggggtgctttctttcctcatctccccactccccactctcagcctgggagactcctgccaagccctcattaaagatgccaccctgggctgccctggcacctagcaaggcacaccaagaacagcttttgagtctgtatcctccactgggggaagtgctcccagttcagaacaagggcagcccgtggtgctgacctaggatataacaaagctcttcacttcaaaacccctgcaatagctgggtttacagacatttaccacctgcggacccaaaagagaaggcctaggagagttttctagaaggttgggattgtcagggtcctggcccctcagaactggcttgatcaagggccttatgtggagcagaggttgtctctgaaccaggagagaaggtactatacctttcaaatccccagggcagacacacccccacccagcccctatttggacctaaactgtgccatttgaacagtcacttccaagctcagtctaaatgaaaccgaaacgtgaccacgcacaaaggcagtcactgcctcgaggggtgcagaccgcagaattttcacagcaggggctcttggaaccctggaaacccccttcttaaatttgggaggaggagtatgcctttggtgtccccctcccaaggggcaattctgaaccccatctttggcaggcatacatatttcactgtttccaaagctatctactctgccaaacaacacccagtcctattccaaactctcaacgattctatcttgttcctgtttttctatgtatttatggttgccgtttgtgtctgatttgattttactgttttttccctgattttatggagtagcattgtgacctgttttcctttgtcttatataactttagtaaactaaccactgtcaatgattgagggcaggtggcacgtggggaagaggggacttggcacgcagtggctacctgggcatttgtggtcatttcagtttccatctccccagcgggggctccctgggtgaaaggccacagtattttgggttggtaggcaaattgcaacattctggacatggcctgaggaaggcctcttcttataagattctcagaccaaattctagaccaaagacacaggcagaccaagtccccaggccccgcctggaaggaagtcgttcctcaactctccccaaggcacctgtctccaatcagagccctctcgcccagccagccctggctctgtgtgcagagcatagctctgcgagtacctgtgtaataatgctcaaccttcatgtctccgtataaacgaaactttccatgagagctcatgactctggtccacctgtctatagagaatgggcaaagtccttcacctgctttctgcttgggatgggtcagaaatgctgatgcccgcacatagcccagccagccagatctggaaaggaagcgagggggttgtttaaatcaattttttaagatgaagaagtgggagacactgcgttgagatgggccatgctagggccacagagatttcctgacggtcagggagagaagggcctccagggtcccctaacccaacgcccttgttgtaaatgaggtaactgaggctcagggaggcactgtgagccaggaatggattttcttgaaacagctctagctgcaggttctccgaggtaggtgcagggaatggtgagtgtctaaccagggctacatccagcaacatcctcaaggtcttcctgacaaccaaagacaagcctttatggaaaaggaaatgcgctcccctccatgttcagggatgaggggagcagcagcagccacactcccaccatcctcacagaattcctggacccatgcggtggctccgtgagctgggtgactccagcctcacctgcacaccccagccctgcacggggccctccttcctcccagcagcccttggtgagctaggaattgagatccctgtttgtgaaagagggaactgaggtgcagagaagccagaggtgtgccagatccttaggcaggatttagatgaagtcgccctggctccagactgaccccgaggctctgcggggagtttccaggcagcaggaagtggccttggatgctctccttccaggacagcataacccctgggccatgtgcagctccttcactgccccctggatccccagcatacccccaaagacagtggggaaacacaaggggagagcacagcatggcccctccagcccacttcagggcactcttgtatcacccgggtaccgccacactggtcccccacccagccagcatctcccagcacagcccctctccctggggaaatgctctgggtagccagtctaaaggcagaggcacctaactgctccccgcagcccaccccacccaagattcagacacaagccaggaaaggacccaagagaaaatccttcaaggtggcctgaggtcccatccctccctcagacccatgtggtcccaggccaggctgcctgggacacggtaaataccactgtgtgcaaaaatcgaagtacaaaaccacaagactaaacaaaacaaacccagagagccaaacttgtagaggtgggcagtccagaaagcagggggcagccctccccctttccttctctccctgatcctcagaatatatattgttgtaataggaagcatttttgcattgttctcttgtgggtgtcactacagacatgttctggcgtgttctccgagggatggagcatcctgttatatatttgacttcaaattgagatgttggcttcattttttttttttacccaattaatctcccaatccctagcaactgtgactctgtatttagcacaagagaaagctgagaatgtgggtcttgcctccttccagaaatatgtctggctcatcaggacatttttttaaaacttcaaaatatttttaagatattttaaacttttataaaaaaaaaatcaaccaacaagagacttttctgaggaggaacatttgtatttgaacaagatccttggtgtgtagttcagtcttgcagtatacaagcttttgtgtataaatgttttatgatatgattccctgtattttgcaggggtttttttctcttttgctttttagataaatatgtatatcaatattttaaattcatctttgctttttttagaggagtttgtaatcaccttataacatgaaaataaacatttcctttttaacatccaa

SEQ ID NO: 49350 - DNA, 603 bp, Artificial Sequence
  derived and/or modified sequence
atggccaccaaggagaagctgcagtgcctgaaggacttccacaaggacatcctgaagcccagccccggcaagagccccggcaccagacccgaggacgaggccgagggcaagcccccccagagagagaagtggagcagcaagatcgacttcgtgctgagcgtggccggcggcttcgtgggcctgggcaacgtgtggagattcccctacctgtgctacaagaacggcggcggcgccttcctgatcccctacttcatcttcctgttcggcagcggcctgcccgtgttcttcctggagatcatcatcggccagtacaccagcgagggcggcatcacctgctgggagaagatctgccccctgttcagcggcatcggctacgccagcgtggtgatcgtgagcctgctgaacgtgtactacatcgtgatcctggcctgggccacctactacctgttccagagcttccagaaggagctgccctgggcccactgcaaccacagctggaacaccccccactgcatggaggacaccatgagaaagaacaagagcgtgtggatcaccatcagcagcaccaacttcaccagccccgtgatcgagttctgggagtag

SEQ ID NO: 49351 - DNA, 330 bp, Artificial Sequence
  derived and/or modified sequence
atggccaccaaggagaagctgcagtgcctgaaggacttccacaaggacatcctgaagcccagccccggcaagagccccggcaccagacccgaggacgaggccgagggcaagcccccccagagagagaagtggagcagcaagatcgacttcgtgctgagcgtggccggcggcttcgtgggcctgggcaacgtgtggagattcccctacctgtgctacaagaacggcggcggcgccttcctgatcccctacttcatcttcctgttcggcagcggcctgcccgtgttcttcctggagatcatcatcggccagtacaccagcgagggcggctag

SEQ ID NO: 49352 - DNA, 603 bp, Artificial Sequence
  derived and/or modified sequence
atggcgacaaaggagaaattgcaatgtctcaaagattttcataaagacatcctgaaaccctccccaggtaagagtcctggcacaagaccagaagatgaggccgagggaaagcctccccagagggaaaagtggagctcaaagatcgacttcgtcctaagcgtggcaggaggattcgttggcctgggaaatgtgtggcgctttccatatctttgttacaagaatgggggtggagcattccttattccctactttatctttctgttcggctctggattgcccgtgttcttcttggaaattatcatcggacagtacaccagcgagggcggcatcacctgctgggagaaaatttgtccgctgttttcaggtatcgggtacgcgtcagtggtgatcgtcagcctactgaacgtgtactacattgtcattctggcatgggcaacctactatctgtttcagagcttccagaaagaactcccatgggctcattgtaatcattcatggaatacaccacactgcatggaagataccatgcgtaagaataagtctgtttggatcaccattagctctaccaactttacctctcccgtcatcgaattttgggagtag

SEQ ID NO: 49353 - DNA, 330 bp, Artificial Sequence
  derived and/or modified sequence
atggccacaaaggaaaagctgcagtgtctgaaggactttcataaggatattctgaaaccttccccgggaaagtctcctggtacgcgccccgaagatgaagctgaaggaaagccgcctcagcgcgagaaatggtcttcaaagatcgactttgtgctgtccgtggctggaggatttgttggactgggaaacgtgtggagatttccatatttatgctacaagaacgggggaggcgcatttctaatcccatacttcatcttcttgtttgggagcggcctaccagtattcttcctggaaataatcatcgggcagtataccagcgaagggggttag

SEQ ID NO: 49354 - DNA, 603 bp, Artificial Sequence
  derived and/or modified sequence
atggccaccaaggagaagctgcagtgcctgaaggacttccacaaggacatcctgaagcccagccctgggaagagccctggcaccaggccagaagatgaggccgagggcaagccaccccagcgggagaagtggagcagcaagattgactttgtgctgtctgtggccggcggctttgtgggcctgggcaatgtgtggaggttcccctacctgtgctacaagaatggaggaggagccttcctgatcccctacttcatcttcctgtttggcagcggcctgcctgtgttcttcctggagatcatcatcggccagtacaccagcgagggcggcatcacctgctgggagaagatctgccccctcttctctggaattggctacgcctctgtggtgattgtgtccctgctgaatgtgtactacatcgtcatcctggcctgggccacctactacctgttccagagcttccagaaggagctgccctgggcccactgcaaccacagctggaacaccccccactgcatggaggacaccatgaggaagaacaagtctgtgtggatcaccatcagcagcaccaacttcaccagccctgtgattgagttctgggagtag

SEQ ID NO: 49355 - DNA, 330 bp, Artificial Sequence
  derived and/or modified sequence
atggccaccaaggagaagctgcagtgcctgaaggacttccacaaggacatcctgaagcccagccctgggaagagccctggcaccaggccagaagatgaggccgagggcaagccaccccagcgggagaagtggagcagcaagattgactttgtgctgtctgtggccggcggctttgtgggcctgggcaatgtgtggaggttcccctacctgtgctacaagaatggaggaggagccttcctgatcccctacttcatcttcctgtttggcagcggcctgcctgtgttcttcctggagatcatcatcggccagtacaccagcgagggcggctag

SEQ ID NO: 49356 - DNA, 603 bp, Artificial Sequence
  derived and/or modified sequence
atggccaccaaggagaagctgcagtgcctgaaggacttccacaaggatattctcaaaccctcgcccggcaaaagtcctggcactcgtcccgaagatgaagctgaagggaagcctccgcagagagagaagtggagcagcaaaattgacttcgtgttatcagttgccggcggctttgtgggcttggggaacgtctggaggtttccttacctttgctataagaacggaggcggtgccttccttattccatactttatctttttgttcggctcggggctccccgttttttttctcgaaatcataattggacagtatacttctgagggaggcataacatgttgggagaagatctgccccctcttttctggtattggctatgccagcgtggtcatagtgtccttgctcaacgtatattatatcgtcatccttgcctgggcaacatactatctgtttcagagtttccagaaggagctgccatgggctcattgcaaccacagttggaacacccctcattgtatggaagacacaatgaggaagaacaagtcggtttggataaccatcagcagcaccaatttcacctccccagtgattgaattttgggaatag

SEQ ID NO: 49357 - DNA, 330 bp, Artificial Sequence
  derived and/or modified sequence
atggccaccaaggagaagctgcagtgcctgaaggacttccacaaggacattctgaaacccagtccaggcaaaagcccaggcaccaggccagaggacgaggcagaagggaaacctccacagcgggagaaatggagctccaaaatagattttgtcttaagcgtggccggtggctttgtcgggctgggtaatgtatggcgcttcccctacctctgctacaagaatggcggaggggcctttctaataccttattttatctttctgttcggaagcggattacctgtgtttttcctggaaataattatcggacaatacacctcagagggcggctag

SEQ ID NO: 49358 - DNA, 603 bp, Artificial Sequence
  derived and/or modified sequence
atggccactaaggagaaattgcagtgtcttaaagacttccacaaagacattctaaaaccttcccccggaaaatcccccggtaccagaccggaggatgaggccgaaggcaagcctccccagcgggagaaatggagctccaaaattgactttgtcctgtccgtggccggagggtttgtgggactcggcaatgtgtggcggtttccctacctgtgctacaagaatgggggaggggctttcctcataccctatttcatctttcttttcggctcggggttacctgtgttcttcctcgaaattataatcggccaatacaccagtgagggagggatcacttgctgggagaagatttgtccactcttctccggcattggttacgccagtgtggtgatagtgagcctgctgaacgtttactatattgtaatactggcttgggcaacatattacctttttcagtctttccagaaagagttgccttgggcacattgtaaccacagctggaacaccccacactgcatggaggataccatgcggaagaataagtctgtttggatcacaatttcgtctacaaatttcacatctcctgtgatcgagttttgggagtag

SEQ ID NO: 49359 - DNA, 330 bp, Artificial Sequence
  derived and/or modified sequence
atggcaacaaaggaaaagctgcaatgcctgaaagacttccataaggacatacttaagccctccccaggaaagagcccaggaactaggcctgaggatgaggctgagggaaagcccccacagcgggagaaatggtcctccaagatcgattttgtgctctctgtcgcaggtggatttgtgggcctggggaatgtctggcgctttccttacctatgttataaaaacggaggaggagccttcctaatcccatacttcatatttctctttggatcgggattaccggtcttttttctggagataatcatcggccaatacacctccgaagggggatag

SEQ ID NO: 49360 - protein, 424 aa, Artificial Sequence
  derived and/or modified sequence
MGTPASGRKRTPVKDRFSAEDEALSNIAREAEARLAAKRAARAEARDIRMRELERQQKELDEKSDKQYAENYTRPSSRNSASATTPLSGNSSRRGSGDTSSLIDPDTSLSELRDIYDLKDQIQDVEGRYMQGLKELKESLSEVEEKYKKAMVSNAQLDNEKNNLIYQVDTLKDVIEEQEEQMAEFYRENEEKSKELERQKHMCSVLQHKMEELKEGLRQRDELIEKHGLVIIPDGTPNGDVSHEPVAGAITVVSQEAAQVLESAGEGPLDVRLRKLAGEKEELLSQIRKLKLQLEEERQKCSRNDGTVGDLAGLQNGSDLQFIEMQRDANRQISEYKFKLSKAEQDITTLEQSISRLEGQVLRYKTAAENAEKVEDELKAEKRKLQRELRTALDKIEEMEMTNSHLAKRLEKMKANRTALLAQQ

SEQ ID NO: 49361 - DNA, 1275 bp, Artificial Sequence
  derived and/or modified sequence
atgggaactccggcctctggaaggaaaaggacccccgtcaaagacaggttttctgcagaagacgaggcattgtccaacattgcacgggaggcagaggccagactcgcggccaaacgcgcagccagggctgaggctcgggacatccgtatgcgtgagctggaaagacaacagaaggagctggatgagaagagtgacaagcaatatgcagaaaactataccagaccttcaagccgtaacagcgcatctgccactaccccgctcagcggcaattccagcaggcgagggtccggggatacctcttccctcatcgacccagataccagcctatcggagctccgagacatctatgatctaaaagaccagattcaggatgtggagggaaggtacatgcagggattgaaggagttgaaagagagcttgtcagaggtcgaggagaaatacaagaaagccatggtatctaatgcgcagctggacaacgagaagaacaatttgatctaccaggttgacacgctgaaggatgtcatcgaagagcaggaggagcagatggcagagttctacagagagaacgaggaaaaatctaaggagctcgaaaggcagaagcatatgtgcagcgtgttgcagcataaaatggaagagcttaaagagggtctgaggcaaagggacgaacttatagaaaagcacggacttgtgataattcctgacggaacccccaatggtgacgtatctcacgaacccgtcgccggtgccattaccgtggtctcccaggaggctgcccaggtgctagagagcgcaggcgaggggcctctggacgtcagactgcgtaagctagccggggagaaagaggagctactctctcagattcgcaagctcaaactacaactggaagaagagcgtcagaaatgttctcggaacgatggtacggtaggagatctagccggcctccagaacgggtcggacttgcagttcatagaaatgcagcgtgatgctaaccgacagatttcagagtataaattcaagctgtctaaagccgaacaggacatcacaaccctggagcagagtataagtcgccttgaaggccaggttcttcgctacaagacggctgccgagaatgctgagaaggtggaggacgaattgaaggccgaaaaaaggaaactgcagcgcgaattaaggaccgccctcgacaagattgaggagatggagatgactaactcccaccttgccaagcgcttggagaagatgaaagccaatagaactgcgctcttagcacagcagtag

SEQ ID NO: 49362 - DNA, 1275 bp, Artificial Sequence
  derived and/or modified sequence
atgggcaccccagccagcggcaggaagaggacccctgtgaaggaccgcttcagcgcagaagatgaggccctgagcaacatcgcccgggaggccgaggcccggctggccgccaagagagctgcccgggcagaggcccgggacatccgcatgagggagctggagcggcagcagaaggagctggatgagaagagtgacaagcagtatgcagagaactacacccggcccagcagcaggaacagcgccagcgccaccacccccctgagcggcaacagcagcagaagaggcagcggggacaccagcagcctgattgatcctgacaccagcctgtctgagctgcgggacatctatgacctgaaggaccagatccaggatgtggagggccgctacatgcagggcctgaaggagctgaaggagagcctgtctgaggtggaggagaagtacaagaaggccatggtgtccaatgcccagctggacaatgagaagaacaacctgatctaccaggtggacaccctgaaggatgtgattgaggagcaggaggagcagatggccgagttctaccgggagaatgaggagaagagcaaggagctggagcggcagaagcacatgtgcagcgtgctgcagcacaagatggaggagctgaaggagggcctgcggcagagagatgagctgattgagaagcacggcctggtgatcatcccagatggcaccccaaatggagatgtgtcccatgagcctgtggccggggccatcaccgtggtgtcccaggaggccgcccaggtgctggagagcgctggggagggccccctggatgtgcggctgaggaagctggccggggagaaggaggagctgctgagccagatcaggaagctgaagctgcagctggaggaggagcggcagaagtgcagcagaaatgatggcaccgtgggggacctggccggcctgcagaatggaagtgacctgcagttcatcgagatgcagagagatgccaaccggcagatcagcgagtacaagttcaagctgagcaaggccgagcaggacatcaccaccctggagcagagcatcagccggctggagggccaggtgctgcgctacaagacagctgctgaaaatgctgagaaggtggaggatgagctgaaggccgagaagaggaagctgcagcgggagctgaggacagccctggacaagattgaggagatggagatgaccaacagccacctggccaagaggctggagaagatgaaggccaacagaacagccctgctggcccagcagtag

SEQ ID NO: 49363 - DNA, 2522 bp, Artificial Sequence
  derived and/or modified sequence
catccttcgcctcctcagtcggccgctcaggctgcggctcctcccggggccggttcccgctgtctcagccgcggcgcagagggcacatcggcctgaccgactagccggctgccagtgccgggagccgccgcgtccatccccgcccgcctggccggggacccaggactgagtcgtccagctgcgcccctcgcccatagccccagcgggcgccgggcgggcgagcagctcttcggcccttcccggacagcgacgcagtcgcagcgcgcgccctaacacagatgtgggaagataaatgaaggggtctagatgtaaatgtcagtggaaaggagagctaccatcactaagggctgaaaacacagttaaatcactttcaaagttaaaagactattaagaacacaagatggggactcctgcttctggaaggaaaagaacacctgtgaaagaccgattttctgcagaagatgaagctttgagtaacattgccagagaggcagaggcaaggctggcagcaaaacgggctgcccgggcagaagcaagagatatacgcatgagagaactggaacgacaacaaaaagagttggatgaaaaatctgacaaacagtatgctgaaaattatacaagaccttcatctcgaaattctgcctcagcaacaacccctctaagtggaaactcatccagacgaggaagtggggacaccagcagcttaatagatccagacacttcattaagtgaattgcgggatatctatgaccttaaggaccagatacaggatgtagaagggagatacatgcaggggcttaaagaactaaaggaatctttgtctgaagtggaagaaaaatacaagaaagccatggtttccaatgcacagttagacaatgagaagaacaatttgatctaccaagtagacacactcaaggatgttattgaagagcaggaggaacagatggcagaattttatagagaaaatgaagaaaaatcaaaggagttagaaaggcagaaacatatgtgtagtgtgctgcagcataagatggaagaacttaaagaaggcctgcggcaaagagatgagcttattgagaaacatggcttagttataatccccgatggcactcccaatggtgatgtcagtcatgaaccagtggctggagccatcactgttgtgtctcaggaagctgctcaggtcttggagtcagcaggagaagggccattagatgtaaggctacgaaaacttgctggagagaaggaagaactactgtcacagattagaaaactgaagcttcagttagaggaggaacgacagaaatgctccaggaatgatggcacagtgggtgacctggcaggactgcagaatggctcagacttgcagttcatcgaaatgcagagagatgccaatagacaaattagcgaatacaaatttaagctttcaaaagcagaacaggatataactaccttggagcaaagtattagccggcttgagggacaggttctgagatataaaactgctgctgagaatgctgagaaagttgaagatgaattgaaagcagaaaaacggaagctacaacgagagttacgaacagcactggacaagattgaggagatggagatgaccaacagccacctggccaagcggctggagaagatgaaggccaataggacagcacttctggcccagcagtaggaaaaccacccttcaacctgggtgatgctccttggggccctacctagagggactgacttttgtccattgacacaaaccccttttagtactgttttgagttttgtcattaaaacagccacctttgtattttataatttatgacagaatgaagtcattttgaatctacatgaatgaacactttggattttgttgtagtttgattctagggtagaaccagtccatgctgtttttattttttatctccgtaattgtagaatcatgtttactcaacgtttttccccagctgcctcagtaactgggcactcggaggccttggcacgggttctggaggacagacagcaattctatgagtgctcactgagatacttgctggagacctcagaaaacacaagtgccttctccacggtgcaattcagacttcagtgatctccagtggtcaaaagacatttacccttaatatcagacaacatttatattttagtgaagaaacaagttctcgggtggggaatctatgtttcactcagatttatatgtttggaggaaaaaagcctttttttgtaaaatatttaaatttatataagaaaatgttagaaaaaaatatggggagtgtatataaaacttgctttattgcatggggcaggggaagtccaggcctaatactcctaaagtaagagttgggtcctttttttcttcaatacaactgtgctgtaccttgtaaagtattttatctgctgcttatttgtggaatgaaacctcaaacaaacccaaagggggagggtagggcagggcaggcagattggaaatctgcctgcagattctattaaatacacccttttgccaaccacaa

SEQ ID NO: 49364 - DNA, 1275 bp, Artificial Sequence
  derived and/or modified sequence
atgggcacccccgccagcggccggaagcggacccccgtgaaggaccgcttcagtgccgaggacgaagctctctctaatattgccagggaggccgaggcccgattagccgcgaagcgggctgcccgggccgaggcccgtgacattaggatgcgcgaactggagcgccaacaaaaggagctggatgaaaagagcgacaaacagtacgccgagaactacacccggccatcttcacggaatagcgcctccgcaaccacccctctatccggtaattcctccaggagaggttctggtgacacgtccagcttgatcgaccccgatacgagcttgtcagaactccgggacatatatgatctcaaggatcagattcaggacgtggaaggacgctatatgcagggtttgaaggaactcaaggagtctctctccgaagtggaagaaaaatacaaaaaagccatggtgagcaatgcccaactggacaacgagaagaataatctgatctaccaggtggacacactgaaggatgtcatcgaggagcaggaggaacagatggctgagttctaccgggaaaatgaggagaaatctaaggaattagagcgccagaaacatatgtgctcggtgcttcagcacaagatggaagagcttaaggaagggttgagacagcgcgatgagctaatagagaagcatggcctggtgatcatcccagacgggactccgaatggcgatgtaagccacgagcccgtagcaggagccatcacagttgtctcacaggaagctgcccaggtcctggaatcagctggcgaggggccactggatgtacgtttgagaaaactggcaggcgaaaaggaagaacttctgagtcagataagaaagctcaaactgcagctcgaagaggagcgacaaaaatgcagtcgaaacgatggaactgtaggagatcttgccggcttgcagaacgggtctgatcttcagttcatcgaaatgcagagggacgccaacaggcagatcagtgagtacaaatttaagttgtctaaagctgaacaggatatcactacgctcgagcagagcatctccagactggagggccaggtcctccgatataaaacggctgcagaaaatgcagaaaaggtggaagacgagctaaaagcggaaaaacggaagttgcagagagaactccgcactgcactggacaagatcgaggaaatggaaatgacaaactctcatctcgctaagagactcgagaagatgaaagccaaccgcactgctctcctggcacagcaatag

SEQ ID NO: 49365 - DNA, 1275 bp, Artificial Sequence
  derived and/or modified sequence
atgggcaccccggcatctggtcgaaaaaggactcccgttaaggaccggttcagtgcagaagacgaggctttatccaacatcgctagagaggccgaagcccgtctcgcagcgaaacgggcagccagagcggaggctagagacatccggatgcgtgagttggagcgccagcagaaagagctggacgagaagtctgacaagcagtatgccgagaactacacccgcccatccagtcgtaactcagcatccgctactactcctctgagcggcaattcaagccgcagaggcagcggagatacctcctctctcatcgacccggatacctcccttagtgaactgcgcgatatttacgatttaaaggatcagattcaggacgtggagggcaggtacatgcagggtctgaaggaactgaaagaatctctgagcgaggtagaagagaagtataagaaggccatggtgtccaacgctcagttggataacgagaaaaacaatctcatctatcaagttgatactctgaaggatgtgatagaagagcaagaagaacagatggccgagttttaccgggagaatgaggaaaaatcgaaagaactggaacggcagaagcacatgtgtagcgttctgcaacacaaaatggaggagctgaaggaaggcctacgtcagcgggacgagctaatcgagaagcatggattggtcatcatccctgatggcacgccaaatggagacgtgagtcacgaacccgtcgctggggctatcacagtagttagccaggaggcagcgcaggtgctcgaatctgcaggggaagggcctctcgatgtgcggctccggaagctcgccggagagaaagaggagctgttgtcacagattcgcaagcttaagctccagctggaggaagaacgacagaagtgctcgcgcaacgatggtaccgtcggagacctggcaggcttgcagaacggaagcgatctccaattcattgagatgcaacgggacgccaacaggcagatatcagagtataagttcaagctgtcaaaggcagagcaagacattaccaccctggagcagtcaatcagtagactcgagggccaggtactgcgatacaagacagcagcagagaatgccgaaaaagttgaagatgagcttaaggccgaaaagagaaaattgcagagggagttacgtactgccctagataagatagaagagatggaaatgacaaactcgcacctcgctaaacgtctggagaaaatgaaagcaaatcgcacagcccttctggcccaacagtag

SEQ ID NO: 49366 - DNA, 1275 bp, Artificial Sequence
  derived and/or modified sequence
atgggcacccccgccagcggcagaaagagaacccccgtgaaggacagattcagcgccgaggacgaggccctgagcaacatcgccagagaggccgaggccagactggccgccaagagagccgccagagccgaggccagagacatcagaatgagagagctggagagacagcagaaggagctggacgagaagagcgacaagcagtacgccgagaactacaccagacccagcagcagaaacagcgccagcgccaccacccccctgagcggcaacagcagcagaagaggcagcggcgacaccagcagcctgatcgaccccgacaccagcctgagcgagctgagagacatctacgacctgaaggaccagatccaggacgtggagggcagatacatgcagggcctgaaggagctgaaggagagcctgagcgaggtggaggagaagtacaagaaggccatggtgagcaacgcccagctggacaacgagaagaacaacctgatctaccaggtggacaccctgaaggacgtgatcgaggagcaggaggagcagatggccgagttctacagagagaacgaggagaagagcaaggagctggagagacagaagcacatgtgcagcgtgctgcagcacaagatggaggagctgaaggagggcctgagacagagagacgagctgatcgagaagcacggcctggtgatcatccccgacggcacccccaacggcgacgtgagccacgagcccgtggccggcgccatcaccgtggtgagccaggaggccgcccaggtgctggagagcgccggcgagggccccctggacgtgagactgagaaagctggccggcgagaaggaggagctgctgagccagatcagaaagctgaagctgcagctggaggaggagagacagaagtgcagcagaaacgacggcaccgtgggcgacctggccggcctgcagaacggcagcgacctgcagttcatcgagatgcagagagacgccaacagacagatcagcgagtacaagttcaagctgagcaaggccgagcaggacatcaccaccctggagcagagcatcagcagactggagggccaggtgctgagatacaagaccgccgccgagaacgccgagaaggtggaggacgagctgaaggccgagaagagaaagctgcagagagagctgagaaccgccctggacaagatcgaggagatggagatgaccaacagccacctggccaagagactggagaagatgaaggccaacagaaccgccctgctggcccagcagtag

SEQ ID NO: 49367 - protein, 441 aa, Artificial Sequence
  derived and/or modified sequence
MSLLTNYEGLRHQIERLVRENEELKKLVRLIRENHELKSAIKTQAGGLGISGFTSGLGEATAGLSSRQNNGVFLPPSPAVANERVLEEVGIMALAPLAEMLTSLQPSATPGSLMSPLTGTLSTLLSGPAPTSQSSPLTSFLTSPIAGPLTGTLASSLGLPSTGTLTPSSLVAGPVAMSQSSPLIAPVMGTVAVSLSSPLLSSTATPPGVSQNLLANPMSNLVLPEAPRLRLAEPLRGGPTGPQSPACVVPTATTKVPLSTEPPQSTQDPEPLSMAFAGAPLQTSTPIGAMGTPAPKTAFSFNTSDTQAQPSAAQEQVVPASVPTSPTTSPTVTVLASAPALAPQVATSYTPSSTTHIAQGAPHPPSRMHNSPTQNLPVPHCPPHNAHSPPRTSSSPASVNDSRGPRTTEPSTKSMMEVERKLAHRKTSKFPENPRGFPEPQ

SEQ ID NO: 49368 - DNA, 1326 bp, Artificial Sequence
  derived and/or modified sequence
atgagcctgctgaccaactacgagggcctgagacaccagatcgagagactggtgagagagaacgaggagctgaagaagctggtgagactgatcagagagaaccacgagctgaagagcgccatcaagacccaggccggcggcctgggcatcagcggcttcaccagcggcctgggcgaggccaccgccggcctgagcagcagacagaacaacggcgtgttcctgccccccagccccgccgtggccaacgagagagtgctggaggaggtgggcatcatggccctggcccccctggccgagatgctgaccagcctgcagcccagcgccacccccggcagcctgatgagccccctgaccggcaccctgagcaccctgctgagcggccccgcccccaccagccagagcagccccctgaccagcttcctgaccagccccatcgccggccccctgaccggcaccctggccagcagcctgggcctgcccagcaccggcaccctgacccccagcagcctggtggccggccccgtggccatgagccagagcagccccctgatcgcccccgtgatgggcaccgtggccgtgagcctgagcagccccctgctgagcagcaccgccaccccccccggcgtgagccagaacctgctggccaaccccatgagcaacctggtgctgcccgaggcccccagactgagactggccgagcccctgagaggcggccccaccggcccccagagccccgcctgcgtggtgcccaccgccaccaccaaggtgcccctgagcaccgagcccccccagagcacccaggaccccgagcccctgagcatggccttcgccggcgcccccctgcagaccagcacccccatcggcgccatgggcacccccgcccccaagaccgccttcagcttcaacaccagcgacacccaggcccagcccagcgccgcccaggagcaggtggtgcccgccagcgtgcccaccagccccaccaccagccccaccgtgaccgtgctggccagcgcccccgccctggccccccaggtggccaccagctacacccccagcagcaccacccacatcgcccagggcgccccccacccccccagcagaatgcacaacagccccacccagaacctgcccgtgccccactgccccccccacaacgcccacagcccccccagaaccagcagcagccccgccagcgtgaacgacagcagaggccccagaaccaccgagcccagcaccaagagcatgatggaggtggagagaaagctggcccacagaaagaccagcaagttccccgagaaccccagaggcttccccgagccccagtag

SEQ ID NO: 49369 - DNA, 1326 bp, Artificial Sequence
  derived and/or modified sequence
atgagcctactaaccaactatgaggggttgcgtcatcagatcgaaagacttgtgagggaaaacgaagagttgaaaaagctggttcggctcatccgcgagaatcacgaactcaagagtgctatcaagacacaggccggcgggttagggatcagcgggttcacaagtggtctgggcgaggctacagccgggctgtccagtagacagaataatggggtatttctcccaccaagtccggctgtggctaacgaaagagtgttggaagaggtgggtatcatggcgctggcccctctcgctgagatgcttacaagcctgcagcccagcgctacaccggggtctttgatgagcccactgaccgggacactaagcaccctgctaagcggacctgcacctacgtcgcagtcatccccactcacgtcgttcctcacttcacccattgctgggcccctgactggaaccctggcaagctctctaggtctgccgagtacagggacactgaccccgtcaagcctggtggcaggaccggtggccatgtcccagagctcccctctgatcgcccctgtgatggggacagtggccgtgagcctctcttctcctctgctgagctcaacggcgactcctcctggagtgtcccagaaccttctggccaatcctatgtctaatctggttctgccagaagcgccacgcctgcgcctggctgagcccctacgcggaggacccaccgggccccagagccctgcttgtgtcgtgcccacggcgactacaaaggtcccactgtccactgaaccacctcagtcaacgcaggatccagaacccttgtccatggccttcgcaggcgccccacttcaaacatcaaccccaattggcgccatgggcacgccagctcctaagacagccttcagttttaatactagcgatacacaggctcagccatctgcagctcaggagcaggtagtccccgcctcagtccctactagtcctactacttcacctacggtgaccgtcttggcctctgcaccagccctcgcgcctcaggtggcaaccagctacacaccgagcagcactacccacattgcacagggcgccccacacccaccttccaggatgcataatagcccgacacagaacctgcctgtcccccattgcccacctcataatgcgcacagtccgccacggaccagcagctcccccgccagcgtgaacgattctaggggcccgcgcaccaccgaaccatctacaaagagtatgatggaggttgaacgaaagctggcccatcgaaaaactagcaagttccctgagaaccccagaggctttccggagccccagtag

SEQ ID NO: 49370 - DNA, 1326 bp, Artificial Sequence
  derived and/or modified sequence
atgagcctgctgaccaactatgagggcctgcggcaccagatcgagcggctggtgcgggagaatgaggagctgaagaagctggtgcggctcatcagagaaaatcatgagctgaagagcgccatcaagacccaggccggcggcctgggcatcagcggcttcaccagcggcctgggggaggccacagctggcctgagcagccggcagaacaacggggtcttcctgccccccagccctgctgtggccaatgaaagagtgctggaggaggtgggcatcatggccctggcccccctggccgagatgctgaccagcctgcagcccagcgccaccccaggcagcctgatgagccccctgaccggcaccctgagcaccctgctgagcggccctgcccccaccagccagagcagccccctgaccagcttcctgaccagccccatcgccggccccctgaccggcaccctggccagcagcctgggcctgcccagcacaggcaccctgacccccagcagcctggtggccggccctgtggccatgagccagagcagccccctcatcgcccctgtgatgggcaccgtggccgtgtccctgagcagccccctgctgagcagcacagccaccccacctggggtgtcccagaacctgctggccaaccccatgagcaacctggtgctgcctgaggccccccggctgcggctggccgagcccctgcggggcggccccaccggcccccagagccctgcctgtgtggtgcccacagccaccaccaaggtgcccctgagcacagagcccccccagagcacccaggaccctgagcccctgtccatggcctttgctggggcccccctgcagaccagcacccccatcggggccatgggcaccccagcccccaagacagccttctccttcaacaccagtgacacccaggcccagcccagcgctgcccaggagcaggtggtgcctgcctctgtgcccaccagccccaccaccagccccaccgtgacagtgctggccagcgccccagccctggccccccaggtggccaccagctacacccccagcagcaccacccacatcgcccagggcgccccccacccccccagcaggatgcacaacagccccacccagaacctgcctgtgccccactgccccccccacaatgcccacagcccccccaggaccagcagcagccctgcctctgtgaatgacagccggggccccaggaccacagagcccagcaccaagtccatgatggaggtggagaggaagctggcccacaggaagaccagcaagtttcctgagaacccccggggcttccctgagccccagtag

SEQ ID NO: 49371 - DNA, 1326 bp, Artificial Sequence
  derived and/or modified sequence
atgagcctgctgaccaactacgagggcctgcggcaccagatcgagcggctggtcagggagaatgaagagctgaagaaactggtgagactgatccgagagaaccatgagttgaagtccgccatcaaaacccaagccgggggcctaggaatttcaggattcacaagcgggcttggggaggccacggccggtttgtctagccggcagaacaatggagttttcctgccacctagccccgccgttgcaaacgagcgagtgctggaggaagtcggcattatggcattagccccacttgcagagatgctgacatcactacagcccagtgccacccccggttcgctgatgagtccactgacgggcactctgtctaccttgctgtcagggcccgcccccaccagccagagctctccattgaccagtttcttgacctctcccatcgcaggacctctgacagggacattggctagtagcctgggcttgccttccactggtacccttacgccctcttcccttgttgccggtccggtggctatgtcacaatccagtccactgatcgcccctgtaatgggaacagtcgcagtgtcgctatctagccctctgctgagttcaaccgccacccctccaggggtgtcacagaatctgctcgctaatccgatgagtaaccttgtgctcccagaggcgcccaggttgcgtcttgcagaaccgctgaggggcggtccgactggaccccaatcccctgcttgcgtagttcctaccgcgaccacgaaagttcccctctcaactgaacctccccagtccactcaggaccccgaacctttgtccatggctttcgcaggtgcccctctccagacatccacaccgattggagccatgggaacccccgcccccaagactgccttttcctttaatacctccgacacacaagctcagcccagcgccgcacaagaacaggtcgtgccagcttccgtgcccacatcacccacaacaagccccaccgtgactgtgctggccagtgcccctgctcttgccccccaggtcgccacctcttatacgcccagtagcacaacccacatagcacagggcgcaccccaccctcctagcagaatgcataactctcccacccagaacctgccagtcccccactgccccccccacaacgcccacagtcccccaaggacctcatccagccccgcatccgtcaatgacagcagaggcccaagaacaactgaacccagtaccaagtctatgatggaggttgagcgaaagctggctcataggaagacgtccaaatttcccgagaatcccagaggctttcccgagccacagtag

SEQ ID NO: 49372 - DNA, 1326 bp, Artificial Sequence
  derived and/or modified sequence
atgtccctgttaacaaattacgagggcctgaggcatcagatcgagagacttgtgagagaaaacgaggagttaaagaagctcgtgcgtttgatcagagagaaccacgagctgaagtctgcaatcaaaacacaggctggtgggttaggcataagtgggttcacctccggtctcggcgaagctactgcgggactgagcagtcgccagaataatggcgtttttctgccccctagtccagccgtcgccaatgagcgcgtgctggaggaggtaggaataatggccctcgccccattagcagaaatgctgaccagcctgcaacccagtgcaaccccagggtcattaatgagtcccttgactggcaccctttcaaccctcctttctgggccagccccaaccagccagtcgagtcctctcacttcttttctcacctctcccatcgccggacctctcacgggtacgcttgcatccagcctgggcctgccaagcaccggaaccctcactccaagctccctcgtggctggcccagtcgcgatgtcacagtccagtcctctgatcgccccagtaatgggcacggtggccgtctctttatctagcccattgttgtccagtacggctacgccgcctggagtgagccaaaacttgctggcaaaccccatgagcaatctggttttacctgaggccccaagactccggctcgcagaacctttgagggggggaccaacgggaccccagtcccctgcttgcgtggtgcctaccgcgacaaccaaggtcccactgtcaaccgagccccctcaatccacccaggatccagagcctctctctatggctttcgctggagctcccctacagactagcacacctatcggcgcaatgggcacaccggctcctaaaacagccttctccttcaacactagcgatacgcaagctcaaccaagcgccgcacaggagcaggtcgtaccagcgagtgttccaacgagccccacaacgtctcctactgtgacagttttggcctccgcgccagcactggctcctcaggttgcgacctcctacacaccttccagcacaacacacatcgcacagggagcacctcaccccccatcgcgtatgcacaactcccccacacagaatcttccagtgccccattgccctccacacaacgctcattcacctcctagaacgtcctcaagccctgccagcgtgaacgactcgagaggcccaagaacgacagagccttccactaaatcaatgatggaggtggagcgcaagctggctcaccgaaaaactagcaaattccccgagaatcctcgcggattccctgagcctcagtag

SEQ ID NO: 49373 - DNA, 1795 bp, Artificial Sequence
  derived and/or modified sequence
ctccttcagcccaggcaaggcctggggccctgggcagcctccaggtgcagtgccctcccgtgggccgcacccttgccactgccccagggcatgtctctactcaccaattatgaagggcttcggcatcagatagagaggctggtgcgggaaaatgaggaactgaagaagttggtgcggctcattcgggagaatcacgagctcaagtcagcgatcaagactcaggcaggcgggctcggcatcagcgggttcacgagtgggcttggtgaggcaacagcaggcctttcctcacgccagaacaatggtgtcttcctgcccccgtccccagcagtggcaaacgaacgagtcctcgaagaagtggggatcatggccttggcacccctggccgagatgctaaccagcttgcagcccagcgccacaccgggctcactcatgagccccctgacaggcaccctcagcacgctgctgtctggcccagcacccacgtcacagagcagccccctcaccagcttcctgaccagtcccattgcgggacccctaacaggcacactggccagttccctgggcctgccctccactggcaccctgactcccagcagcctcgtggcaggccctgtggccatgtcccagagcagccccctgatagcccctgtgatgggcacggtggctgtctctctgagcagccccctcctcagctccactgccaccccaccaggggtctctcagaacctgctggccaaccccatgagcaacctggtcctgccagaggccccaaggctgcggctggctgagccactccgcggaggccccactgggccccagtccccagcttgcgtggtacccactgccaccaccaaagtcccactctccactgagcccccccagtcgacccaggacccagagcctctcagcatggcgtttgcaggagcacccctccagacctccacccctatcggagccatgggcacacctgctcccaagacggccttctccttcaacacttcggacacacaggcccagcccagtgccgcccaggaacaagtggtccctgcatctgtccccacctcccccaccacctcccccacggtcaccgtccttgcctctgcccccgcccttgccccccaggttgccaccagctacacaccctcaagcaccacccacatcgcccagggtgccccccatcccccttcccgaatgcataattccccaacccagaacctgcctgtcccccactgtcctccacacaacgcccactccccacctcgtacctcatcctccccggcttcagtcaatgactctcgaggtccacgcaccacagaaccgtcgacgaagagcatgatggaggtggaacggaagctggcccaccgcaagaccagcaagttccccgagaacccccgaggcttccctgaaccccagtgaccacaagctggatgagaagctgtgccagaggctcacacagcgctatgtgagcgtcatgaacaggctgcagagtctgggctacaacgggcgggtgcaccctgcgctgaccgagcagctggtgaacgcttatggcatcctgcgagagcgcccggagctggcggcgtctgagggcggcccctacaccgtggacttcctgcagcgtgtggtggtggagaccgtgcaccccggcatgctcgccgacgcgctgctgctgctctcctgcctcagccagctggcgcacgatgacggcaagcccatgttcatctggtgacgctggagctgggaggtccaggctcgctcagccccacagccctgtgcacggccattaaagcttcccaca

SEQ ID NO: 49374 - protein, 383 aa, Artificial Sequence
  derived and/or modified sequence
MELEGQWWRGQLAADIHQALRYKELKLPSYKGQSPQLSLRRYFADLIAIVSNRFTLCPSARHLAVYLLDLFMDRYDISIQQLHLVALSCLLLASKFEEKEDSVPKLEQLNSLGCMTNMNLVLTKQNLLHMELLLLETFQWNLCLPTAAHFIEYYLSEAVHETDLHDGWPMICLEKTKLYMAKYADYFLEVSLQDYAFLNYAPSLVAAACVASSRIILRLSPTWPTRLHRLTAYSWDFLVQCIERLLIAHDNDVKEANKQRGQAGPQSAQLSVFQTASQPSRPVHFQQPQYLHQTHQTSLQYRHPTSEQPSCQQIVSTTHTSSYTLQTCPAGFQTSVQGLGHMQTGVGMSLAIPVEVKPCLSVSYNRSYQINEHYPCITPCFER

SEQ ID NO: 49375 - DNA, 1152 bp, Artificial Sequence
  derived and/or modified sequence
atggagctggagggtcagtggtggaggggccagctcgccgccgatatccatcaggcgttgagatacaaagagctcaaattgccatcttacaagggccagtctcctcagctgagtttgcgacgctactttgccgatctcattgccattgtgtccaataggttcactctttgcccatcagcgcgccacctggccgtgtaccttctggatctgttcatggacaggtacgatatctcaattcaacagctacacctggtcgcacttagctgcttgctgctggcatcaaaatttgaagagaaagaggattccgttcctaagctcgaacagctcaatagtctggggtgcatgaccaatatgaatttggtgttaaccaaacaaaacctcctccacatggagctgctgctcttggagaccttccagtggaacctttgtctgccaaccgccgcacattttatcgagtattaccttagcgaggcggttcacgagacagacctacatgacggttggcccatgatctgcctggaaaagaccaagttatacatggcaaagtacgccgactatttcttggaggtttcactgcaagactatgctttccttaactatgcccctagcctagtagcagcggcatgtgtggcttccagtaggataatcctgcgcttaagcccaacttggcccacacgcctgcaccgcctgacggcctactcgtgggactttctcgtgcaatgcattgagcgcctgcttatcgcccatgacaacgacgttaaggaggctaataaacagcggggccaggccggccctcagagcgctcagctcagtgtatttcagacagcctcccagccctctagacccgtccactttcagcagccccagtatttgcatcaaacacaccaaacatcactccagtaccgccaccctacatccgaacagccttcttgccagcaaattgtaagcacaacccatacctccagctataccctacaaacctgccctgctggtttccagacgtctgtgcagggcctgggccatatgcagactggcgtgggaatgtcgttagctataccagtggaggtcaaaccctgcctatccgtcagctacaatcggtcttatcagatcaatgagcattatccctgtattactccttgtttcgagcgctag

SEQ ID NO: 49376 - DNA, 1152 bp, Artificial Sequence
  derived and/or modified sequence
atggagctggagggccagtggtggaggggccagctggccgctgacatccaccaggccctgcgctacaaggagctgaagctgcccagctacaagggccagagcccccagctgagcctgcggcgctactttgctgacctgattgccatcgtgagcaaccgcttcaccctgtgccccagcgcccggcacctggccgtgtacctgctggacctcttcatggacagatatgacatcagcatccagcagctgcacctggtggccctgagctgcctgctgctggccagcaagtttgaggagaaggaggacagcgtgcccaagctggagcagctgaacagcctgggctgcatgaccaacatgaacctggtgctgaccaagcagaacctgctgcacatggagctgctgctgctggagaccttccagtggaacctgtgcctgcccacagctgcccacttcatcgagtactacctgtctgaggccgtgcatgaaacagacctgcatgatggctggcccatgatctgcctggagaagaccaagctgtacatggccaagtatgctgactacttcctggaggtgtccctgcaggactatgccttcctgaactatgcccccagcctggtggccgccgcctgtgtggccagcagccgcatcatcctgcggctgagccccacctggcccacccggctgcaccggctgacagcctacagctgggacttcctggtgcagtgcatcgagcggctgctgattgcccatgacaatgatgtgaaggaggccaacaagcagaggggccaggccggcccccagagcgcccagctgtctgtgttccagacagccagccagcccagcaggcctgtgcacttccagcagccccagtacctgcaccagacccaccagaccagcctgcagtaccgccaccccaccagcgagcagcccagctgccagcagatcgtgtccaccacccacaccagcagctacaccctgcagacctgcccagctggcttccagacctctgtgcagggcctgggccacatgcagacaggagtgggcatgagcctggccatccctgtggaggtgaagccctgcctgtctgtgtcctacaacagaagctaccagatcaatgagcactacccctgcatcaccccctgctttgaaagatag

SEQ ID NO: 49377 - DNA, 1152 bp, Artificial Sequence
  derived and/or modified sequence
atggagctggagggccagtggtggcggggccagctggccgccgacatccatcaggctctcagatataaagagctgaaactgccctcttataaaggacagagcccacaattgtcattgaggagatacttcgccgacctgatcgccatcgtaagcaaccggtttacactctgcccctcagccagacacctcgctgtttacctgcttgatctgttcatggaccgatatgatatcagcattcagcagctccacctggttgctctctcctgcctgctcctggcaagtaagtttgaagaaaaggaggacagtgtgcctaaactggaacaattgaacagcctggggtgcatgaccaacatgaatcttgtgcttaccaagcagaatctgttacatatggagctcctgctcctcgaaacatttcagtggaacctgtgcctccccactgccgcccatttcattgagtactacctgagcgaggccgtccacgaaaccgacctgcacgacggatggcccatgatatgcctcgagaagactaagctttatatggctaaatacgccgactattttctggaggtgtcgttacaagactacgctttcttgaattacgctcctagcttggtcgcggctgcctgcgttgcgtcaagccgcatcatcctacggctgagcccgacttggcctaccagactccatcgcttaaccgcctactcttgggacttcttggtgcagtgcatcgaacgactgttgatcgcccatgacaatgatgtcaaggaggctaacaagcagaggggtcaagccggcccacagagcgctcagctgagtgtatttcagactgcgagtcagccatcccggccggtgcatttccagcagcctcagtacttacatcagacacaccaaacttccttacagtaccgacatccaacttccgaacagcccagctgccaacagattgtgagtactactcatacctcctcttatacacttcagacgtgcccggctggtttccagaccagcgtgcagggacttggccatatgcagactggtgttggtatgagtctggcaattccggttgaggtgaagccatgtctgtccgtctcttataacagatcttatcaaatcaatgagcactacccatgcataacaccttgttttgagcggtag

SEQ ID NO: 49378 - DNA, 1152 bp, Artificial Sequence
  derived and/or modified sequence
atggagctggaggggcagtggtggcgcggtcagctagccgctgatatccatcaggcactgcgctacaaggagctgaagctgccatcctacaaggggcagtccccacagttgtctttgaggcggtatttcgcagacctgatagccattgtgagcaacaggttcaccctatgcccatctgccagacacctggccgtctacctcctcgacctgtttatggataggtatgatatttctatccagcagctgcatctggtggccttgtcttgcctgctcttggctagcaaatttgaggaaaaggaggacagcgtgcccaagctggagcaactaaatagcctggggtgtatgacaaacatgaacctggtgctgactaagcaaaacttgcttcacatggagctcctgctgctggagactttccagtggaatctgtgcctgcccactgccgctcacttcatcgagtactatctgtctgaagcggttcatgaaactgacctgcatgacggttggcccatgatttgcttggagaagacgaaactgtacatggcaaagtacgctgattattttctggaagtgtcgttacaggactacgcttttcttaattatgccccttctctggtagctgctgcctgtgtggcgtccagccgcattattctgcgcctcagtccaacgtggccaactcgactgcatagacttacagcctacagctgggacttccttgtccaatgcattgaacgcctgttgattgctcacgacaacgatgtgaaagaggccaacaagcagcgcggtcaggccggaccacaaagtgctcagctgagtgtgttccagaccgcctcccagccctcgagaccagtccatttccagcagccccaatatctgcatcaaacccaccagacaagtctccagtaccgacaccccacaagcgagcagccctcctgccagcagatcgtgtcaactacgcataccagttcctacactctgcagacttgccccgctggctttcagacttccgtccagggactgggacacatgcaaaccggggtgggtatgtccctagccatcccagtcgaagtaaagccctgtctgtccgtgtcctataaccggagctaccaaattaacgagcattacccttgcattacaccttgtttcgaacgttag

SEQ ID NO: 49379 - DNA, 4136 bp, Artificial Sequence
  derived and/or modified sequence
atgctgaccgtacccaggcgggagccgccgcgccgccgcctggcgctgcacctgggcccggcccggccgccaattggacggctcggggcgaccccgctgtatcgcgagacgagattggcagcggcggggcctcaagtgcccccgcgctggctttgtatgcggagccgcctgccggtcctttaacaatgggcggcgcgagcgtccaggcgctgggctctagctgaggccggcgcttagcggcccactgtccgcagcatgagcggggccggcgtccgccgcacgacggcggggctggggctgtgagggccgcggttccggactcgagttgccgcgtcgggctgggcgcgccgccgggtcccatggagctggaggggcagtggtggcgaggacagctggccgccgatattcaccaagcgcttcgctacaaggagctgaagttgccctcctataaaggccagtcccctcagttaagtctcagacggtattttgctgacttgattgccattgtgagcaatcgcttcacactctgcccttctgcccgccatcttgctgtctatttactggacctgtttatggaccgctatgacatctctatccagcagctgcatttagttgcgctttcctgcctgcttctagcaagtaaatttgaagaaaaagaagacagtgtgcctaagctggagcagctcaacagcctgggttgtatgactaatatgaatctagtattaacaaaacaaaatttgctacatatggaactattattattagaaacctttcagtggaacctctgccttccaacagccgcccatttcattgagtattatctctctgaagcagtacacgaaacagatcttcatgacggctggccaatgatttgcttggaaaagactaaactctacatggccaaatatgcagattacttcctggaagtatctttgcaagattatgcctttctaaattatgcaccttctttagtagctgctgcatgtgtggcttcttcgaggattatacttcgtctttctccaacgtggcctacaagactacatcgtcttactgcctactcttgggatttcttagtgcagtgtattgaacgactgttgatcgctcatgataatgatgtgaaagaagcaaacaaacagagagggcaagcaggacctcagtcagcgcaactaagtgtattccagacagcctcccagccatcacggccagttcactttcagcaacctcagtatctccatcagacacatcagacctcactgcagtatcgccatcctacgtcagaacaaccaagctgtcagcagattgtatcgaccacacacacctcatcttacacactacagacatgtcctgctggcttccaaactagtgttcagggccttgggcacatgcagactggtgttgggatgtcactggcaataccagtagaagttaagccctgtctgagtgtttcttacaaccggagttatcagataaatgaacattacccttgtattactccatgttttgaaaggtgattatttgtgaagctgataaccgacccagactgctttgtgacatgaagctatgggtaagcgttttgtaaacttctgttcaaaaggaaagggatctaaatgacatcagaactcttcaggtaccagcaccaggaagactgaatatcctttttaatgcaccatgaatcctgggagactaagcaaattaacagtatgtcaaattctgttacaacaaatccctgtatgacaaaaatgttcaagtcctggctgatggtccaaatatttcaaaaatattcagtacaacagaaaatttggacagacttcaatttgccattttgagatttgacctgtggtagcatctgggcctaatgttggcttctaagtcaaagactaaatgtttatctcatctatggacttgccaaacagtcttttatgaaggaaagttacagtattaatttttgaaaaggttttttttattctgcaattttttatttttgttctacacatgaatttttgactaagtttaaactcatgaattgttatgctataccaatctgcagtaaaaaaaatttttttagatgattctatataacttcgtctcacaaatagtgtaggtatctgggtttatatactaaaattaagggtggagaagatcttattttttaaatcatggtcataatttttctttttttccctaagtgatcaacatcaaatttttagaattaaaatacatttaactcagggaatttgtactacttggaaacacttaactgtaatgcaacatgccttgggaatgttatagtgtgaactacctttataacataggttaaaatacgcttgctagggtgtgttttcaaatgagaacataatatagctcagaatgaagtggtagttcctgtgattcataatacatatgtaggttttgcatatctcagtgcaatccatgatttatactcagaatcgacattcttaaaaagttatttcaagggatggcataactgtaagaggtcagtgctagaataaagtcctgtaggtttattttggaagggactgtggccagggtagttctcaggttgtgctagagcagcactttgttatgtggaagacaggttttttaagcaacctttgaatccagctctagtcagtctaagcaggcaaaggtaactgatgactaaatttcagtagctactttcattggattgaccctacaactgccctgggacatttcactgtaccagtattaactgcaaacagcaataattgtcattacagcaagggcagtttgggggtaaagcattttggaggaataaccttaaaaagttaaaaagtcattgtaataactgataaactgtatacattgtgctcctttctgtgggagaagaaagatttggtggagggaagctttctggtttaaaaattagtaaggtgtgtctttttgttttttttaagatagcacttgaatagaagggaaaactgcatggcagatacgtgactgccacaatatgcatcgaagacaaacttactataaagatgttgtgggtatgcagcaggagtctcagtaatcaagccaatggcctttgtcaggaagggaaggggctcaacacagtgatggactgatccagatggctcccggggatgaatgtgggtgggtagcttctgtcagtatcaatgcttagagaaatatcctttccttaaaaagaaaataacttttatatttagagtacatagggcatgatgtggatttattagtctggtagataaaatgaaaaaccactcaggtaagaacactcactcatggcagtttttaagcatgaaaattgttttctgaaagtatcatcacttttcctttttaaagaaggctgctaattggattttggtagttcttacctcaagaaaacttgaattatttgggggaaagtaggctcaaaagagaatatatctttcacattcacattcagaacccagcaacctggagtccaattttcagtattttaactacctcaataatgctatgaatgtaagatattgggatagagatcccaacttgaaacaacagccagtgcctgtggtaacttaatgtcttgtcaaatacttttattgattggtttatatgccattcttgttatagaagaatatgccttttaaaaaagcttattaataacactttcccaatttatattttaaaaagctaaagaacactggattaataatcttttgggagggtagaataaaataattgattactattgctgcatacccggggtgggatggggtggttggagaaccagaactatttttaaaacattaggtttcaatataaatacaactcacaactgctagctttggggggtgggggaacattgtgtgggttttgttttgtttaatttattgattagtctttaaagtaggcttttttttttttttttgagaatactggaccatcattaaatgtgtactgtgaagagattaatatgtatgaagggctttaccaaagtccactaaataaacactactcaagtacagactgcaaaccaaaatgtatctgtgttacgacattaattgcaaatagcaagtatggtgctaaagtctacaccaatggaattagatgagtgctatgcacttaattttaaaataaaactagttttcagt

SEQ ID NO: 49380 - DNA, 1152 bp, Artificial Sequence
  derived and/or modified sequence
atggagctggagggccagtggtggagaggccagctggccgccgacatccaccaggccctgagatacaaggagctgaagctgcccagctacaagggccagagcccccagctgagcctgagaagatacttcgccgacctgatcgccatcgtgagcaacagattcaccctgtgccccagcgccagacacctggccgtgtacctgctggacctgttcatggacagatacgacatcagcatccagcagctgcacctggtggccctgagctgcctgctgctggccagcaagttcgaggagaaggaggacagcgtgcccaagctggagcagctgaacagcctgggctgcatgaccaacatgaacctggtgctgaccaagcagaacctgctgcacatggagctgctgctgctggagaccttccagtggaacctgtgcctgcccaccgccgcccacttcatcgagtactacctgagcgaggccgtgcacgagaccgacctgcacgacggctggcccatgatctgcctggagaagaccaagctgtacatggccaagtacgccgactacttcctggaggtgagcctgcaggactacgccttcctgaactacgcccccagcctggtggccgccgcctgcgtggccagcagcagaatcatcctgagactgagccccacctggcccaccagactgcacagactgaccgcctacagctgggacttcctggtgcagtgcatcgagagactgctgatcgcccacgacaacgacgtgaaggaggccaacaagcagagaggccaggccggcccccagagcgcccagctgagcgtgttccagaccgccagccagcccagcagacccgtgcacttccagcagccccagtacctgcaccagacccaccagaccagcctgcagtacagacaccccaccagcgagcagcccagctgccagcagatcgtgagcaccacccacaccagcagctacaccctgcagacctgccccgccggcttccagaccagcgtgcagggcctgggccacatgcagaccggcgtgggcatgagcctggccatccccgtggaggtgaagccctgcctgagcgtgagctacaacagaagctaccagatcaacgagcactacccctgcatcaccccctgcttcgagagatag

SEQ ID NO: 49381 - protein, 371 aa, Artificial Sequence
  derived and/or modified sequence
MELEGQWWRGQLAADIHQALRYKELKLPSYKGQSPQLSLRRYFADLIAIVSNRFTLCPSARHLAVYLLDLFMDRYDISIQQLHLVALSCLLLASKFEEKEDSVPKLEQLNSLGCMTNMNLVLTKQNLLHMELLLLETFQWNLCLPTAAHFIEYYLSEAVHETDLHDGWPMICLEKTKLYMAKYADYFLEVSLQAAACVASSRIILRLSPTWPTRLHRLTAYSWDFLVQCIERLLIAHDNDVKEANKQRGQAGPQSAQLSVFQTASQPSRPVHFQQPQYLHQTHQTSLQYRHPTSEQPSCQQIVSTTHTSSYTLQTCPAGFQTSVQGLGHMQTGVGMSLAIPVEVKPCLSVSYNRSYQINEHYPCITPCFER

SEQ ID NO: 49382 - DNA, 1116 bp, Artificial Sequence
  derived and/or modified sequence
atggaacttgagggtcagtggtggcgaggccagcttgcagccgacatccatcaggcccttcggtataaggaactcaaactaccctcctataagggccagtcaccacaactgagcctgcggcggtatttcgccgacctgattgcaatcgttagcaaccgatttacactgtgcccatcagcaaggcatctggccgtctacctgctggatctcttcatggaccggtacgatatctccatccagcaattgcacctcgtcgccctgtcttgtctattgctggctagcaaattcgaagagaaggaggactccgttcctaaacttgaacagctcaattctttgggatgtatgacaaatatgaatcttgtactcaccaaacagaatctgctgcacatggaactcttgcttttggagacttttcagtggaacttatgtttgcctaccgccgcccattttatcgagtactatttgagcgaggccgtgcacgagaccgatttgcacgatggatggcccatgatctgtcttgaaaagacaaaactctatatggccaagtacgccgattatttcctggaagtcagtctgcaggccgctgcatgtgttgcctctagtcgcatcattcttcgcctctctccaacatggcctaccaggcttcatcggcttactgcctattcttgggattttttggttcaatgcatcgagagactactcatcgcacatgataacgatgtaaaggaggctaacaaacaaaggggtcaggctgggccccagtcagcccagctttctgttttccagaccgcatcccagcccagtaggccagttcactttcagcaacctcaatatctacatcagacacatcaaacctctctccagtaccggcatcccacttccgaacagccaagctgccagcaaatagttagcactacccacaccagctcatacaccctgcagacgtgtcctgccggcttccagacatcggtgcagggtctgggccatatgcagacaggggttggaatgagcctggcgatacctgttgaagtcaagccttgcctcagcgtgtcctataacaggagctaccagatcaatgaacattatccctgcattacgccctgcttcgagcgttag

SEQ ID NO: 49383 - DNA, 1116 bp, Artificial Sequence
  derived and/or modified sequence
atggagctggagggccagtggtggaggggccagctggccgctgacatccaccaggccctgcgctacaaggagctgaagctgcccagctacaagggccagagcccccagctgagcctgcggcgctactttgctgacctgattgccatcgtgagcaaccgcttcaccctgtgccccagcgcccggcacctggccgtgtacctgctggacctcttcatggacagatatgacatcagcatccagcagctgcacctggtggccctgagctgcctgctgctggccagcaagtttgaggagaaggaggacagcgtgcccaagctggagcagctgaacagcctgggctgcatgaccaacatgaacctggtgctgaccaagcagaacctgctgcacatggagctgctgctgctggagaccttccagtggaacctgtgcctgcccacagctgcccacttcatcgagtactacctgtctgaggccgtgcatgaaacagacctgcatgatggctggcccatgatctgcctggagaagaccaagctgtacatggccaagtatgctgactacttcctggaggtgtccctgcaggccgccgcctgtgtggccagcagccgcatcatcctgcggctgagccccacctggcccacccggctgcaccggctgacagcctacagctgggacttcctggtgcagtgcatcgagcggctgctgattgcccatgacaatgatgtgaaggaggccaacaagcagaggggccaggccggcccccagagcgcccagctgtctgtgttccagacagccagccagcccagcaggcctgtgcacttccagcagccccagtacctgcaccagacccaccagaccagcctgcagtaccgccaccccaccagcgagcagcccagctgccagcagatcgtgtccaccacccacaccagcagctacaccctgcagacctgcccagctggcttccagacctctgtgcagggcctgggccacatgcagacaggagtgggcatgagcctggccatccctgtggaggtgaagccctgcctgtctgtgtcctacaacagaagctaccagatcaatgagcactacccctgcatcaccccctgctttgaaagatag

SEQ ID NO: 49384 - DNA, 1116 bp, Artificial Sequence
  derived and/or modified sequence
atggagctggagggccagtggtggcggggccagctggccgccgacattcaccaggcattgagatacaaagagctcaagctgccttcatacaaaggccagtcccctcaactttcactccgaagatatttcgccgatctgatcgccattgtctccaatcgattcacactatgcccctctgccaggcacttggccgtttacttgttagacctgttcatggatagatatgacataagcatccagcaactgcacctggtcgccctgagctgcctcctcctggcatccaagttcgaagagaaggaagatagcgtgcccaaacttgaacagctgaattccctgggttgcatgaccaacatgaatctggtcctcactaaacagaacttgcttcacatggagttacttcttctggaaacattccagtggaatctttgtctccccaccgccgcccattttattgaatattacctgtccgaggcagtgcatgagacagacctccatgacggatggccgatgatctgcctggaaaaaactaagctctacatggcgaagtatgcagattatttcctcgaggtgagccttcaagcggccgcctgtgttgcatcttctaggatcatcttaaggcttagccccacttggccaacccgtttgcacagactaactgcatattcctgggactttctggtccagtgcatagagagactgctaattgcacacgataatgacgtcaaggaggccaataagcaaaggggacaggcagggccccagtcggcccaactgtcagtatttcagaccgcatctcagccttcaagacctgtccactttcagcagccacagtatctgcatcagacccaccagacttcgcttcagtaccgtcacccgacatctgagcaacccagctgtcagcagatcgtttccactacacatacctcatcctatacattgcaaacatgtccagccggcttccagaccagcgtgcaggggctgggccatatgcagaccggggttggaatgtccttggctatccccgtggaagtaaaaccctgtctcagcgtttcctacaatcgctcctatcagatcaacgaacactacccatgtatcacaccctgtttcgagcgctag

SEQ ID NO: 49385 - DNA, 1116 bp, Artificial Sequence
  derived and/or modified sequence
atggaactcgaaggacagtggtggaggggtcagctggccgctgacattcaccaagcattgaggtacaaagagttgaagctgccctcttacaaggggcaatccccccagttatccctccgtagatacttcgccgatcttatcgccatcgtgagcaatagattcacattatgtccttctgccagacatttagctgtttaccttctcgacttgtttatggatcgttatgacatttcaatccagcagctgcacttggtagcccttagttgccttctcctggcatctaagtttgaagaaaaagaggacagtgtacccaaactcgaacagctcaatagcttaggatgcatgaccaacatgaacctagtcctgaccaaacagaatctgctccacatggagctcttactcctggagacctttcagtggaacttgtgtctgcctactgccgctcacttcattgaatactatctgtcagaggcggtgcatgagacagatcttcacgacggatggccaatgatctgcctcgaaaaaacaaagctctatatggccaaatacgccgactattttctcgaggtttcgttacaagccgcagcttgtgttgctagttcccgcataatcctgagactgtctccgacctggccaacccggctgcatcggctgacggcctactcgtgggactttctcgtccagtgcatcgagcgtttgctcattgcccatgacaacgacgtgaaagaggcaaacaagcagagaggacaggctggacctcagagtgcacagctcagtgttttccagaccgcctcccagcccagtcggcctgtgcatttccaacagccccagtatctccaccaaacacaccagacttccctgcagtaccggcatcccacttctgagcagcccagttgccaacagatcgtgtcaacaactcacacaagctcatacacgcttcagacatgccctgccggatttcagaccagcgtgcagggactgggtcatatgcaaactggggtcggaatgagtctggccatacccgtagaggtcaagccctgtttgagtgtgtcctacaaccggtcttaccagatcaacgagcattatccctgcataacaccgtgtttcgaacgctag

SEQ ID NO: 49386 - DNA, 4100 bp, Artificial Sequence
  derived and/or modified sequence
atgctgaccgtacccaggcgggagccgccgcgccgccgcctggcgctgcacctgggcccggcccggccgccaattggacggctcggggcgaccccgctgtatcgcgagacgagattggcagcggcggggcctcaagtgcccccgcgctggctttgtatgcggagccgcctgccggtcctttaacaatgggcggcgcgagcgtccaggcgctgggctctagctgaggccggcgcttagcggcccactgtccgcagcatgagcggggccggcgtccgccgcacgacggcggggctggggctgtgagggccgcggttccggactcgagttgccgcgtcgggctgggcgcgccgccgggtcccatggagctggaggggcagtggtggcgaggacagctggccgccgatattcaccaagcgcttcgctacaaggagctgaagttgccctcctataaaggccagtcccctcagttaagtctcagacggtattttgctgacttgattgccattgtgagcaatcgcttcacactctgcccttctgcccgccatcttgctgtctatttactggacctgtttatggaccgctatgacatctctatccagcagctgcatttagttgcgctttcctgcctgcttctagcaagtaaatttgaagaaaaagaagacagtgtgcctaagctggagcagctcaacagcctgggttgtatgactaatatgaatctagtattaacaaaacaaaatttgctacatatggaactattattattagaaacctttcagtggaacctctgccttccaacagccgcccatttcattgagtattatctctctgaagcagtacacgaaacagatcttcatgacggctggccaatgatttgcttggaaaagactaaactctacatggccaaatatgcagattacttcctggaagtatctttgcaagctgctgcatgtgtggcttcttcgaggattatacttcgtctttctccaacgtggcctacaagactacatcgtcttactgcctactcttgggatttcttagtgcagtgtattgaacgactgttgatcgctcatgataatgatgtgaaagaagcaaacaaacagagagggcaagcaggacctcagtcagcgcaactaagtgtattccagacagcctcccagccatcacggccagttcactttcagcaacctcagtatctccatcagacacatcagacctcactgcagtatcgccatcctacgtcagaacaaccaagctgtcagcagattgtatcgaccacacacacctcatcttacacactacagacatgtcctgctggcttccaaactagtgttcagggccttgggcacatgcagactggtgttgggatgtcactggcaataccagtagaagttaagccctgtctgagtgtttcttacaaccggagttatcagataaatgaacattacccttgtattactccatgttttgaaaggtgattatttgtgaagctgataaccgacccagactgctttgtgacatgaagctatgggtaagcgttttgtaaacttctgttcaaaaggaaagggatctaaatgacatcagaactcttcaggtaccagcaccaggaagactgaatatcctttttaatgcaccatgaatcctgggagactaagcaaattaacagtatgtcaaattctgttacaacaaatccctgtatgacaaaaatgttcaagtcctggctgatggtccaaatatttcaaaaatattcagtacaacagaaaatttggacagacttcaatttgccattttgagatttgacctgtggtagcatctgggcctaatgttggcttctaagtcaaagactaaatgtttatctcatctatggacttgccaaacagtcttttatgaaggaaagttacagtattaatttttgaaaaggttttttttattctgcaattttttatttttgttctacacatgaatttttgactaagtttaaactcatgaattgttatgctataccaatctgcagtaaaaaaaatttttttagatgattctatataacttcgtctcacaaatagtgtaggtatctgggtttatatactaaaattaagggtggagaagatcttattttttaaatcatggtcataatttttctttttttccctaagtgatcaacatcaaatttttagaattaaaatacatttaactcagggaatttgtactacttggaaacacttaactgtaatgcaacatgccttgggaatgttatagtgtgaactacctttataacataggttaaaatacgcttgctagggtgtgttttcaaatgagaacataatatagctcagaatgaagtggtagttcctgtgattcataatacatatgtaggttttgcatatctcagtgcaatccatgatttatactcagaatcgacattcttaaaaagttatttcaagggatggcataactgtaagaggtcagtgctagaataaagtcctgtaggtttattttggaagggactgtggccagggtagttctcaggttgtgctagagcagcactttgttatgtggaagacaggttttttaagcaacctttgaatccagctctagtcagtctaagcaggcaaaggtaactgatgactaaatttcagtagctactttcattggattgaccctacaactgccctgggacatttcactgtaccagtattaactgcaaacagcaataattgtcattacagcaagggcagtttgggggtaaagcattttggaggaataaccttaaaaagttaaaaagtcattgtaataactgataaactgtatacattgtgctcctttctgtgggagaagaaagatttggtggagggaagctttctggtttaaaaattagtaaggtgtgtctttttgttttttttaagatagcacttgaatagaagggaaaactgcatggcagatacgtgactgccacaatatgcatcgaagacaaacttactataaagatgttgtgggtatgcagcaggagtctcagtaatcaagccaatggcctttgtcaggaagggaaggggctcaacacagtgatggactgatccagatggctcccggggatgaatgtgggtgggtagcttctgtcagtatcaatgcttagagaaatatcctttccttaaaaagaaaataacttttatatttagagtacatagggcatgatgtggatttattagtctggtagataaaatgaaaaaccactcaggtaagaacactcactcatggcagtttttaagcatgaaaattgttttctgaaagtatcatcacttttcctttttaaagaaggctgctaattggattttggtagttcttacctcaagaaaacttgaattatttgggggaaagtaggctcaaaagagaatatatctttcacattcacattcagaacccagcaacctggagtccaattttcagtattttaactacctcaataatgctatgaatgtaagatattgggatagagatcccaacttgaaacaacagccagtgcctgtggtaacttaatgtcttgtcaaatacttttattgattggtttatatgccattcttgttatagaagaatatgccttttaaaaaagcttattaataacactttcccaatttatattttaaaaagctaaagaacactggattaataatcttttgggagggtagaataaaataattgattactattgctgcatacccggggtgggatggggtggttggagaaccagaactatttttaaaacattaggtttcaatataaatacaactcacaactgctagctttggggggtgggggaacattgtgtgggttttgttttgtttaatttattgattagtctttaaagtaggcttttttttttttttttgagaatactggaccatcattaaatgtgtactgtgaagagattaatatgtatgaagggctttaccaaagtccactaaataaacactactcaagtacagactgcaaaccaaaatgtatctgtgttacgacattaattgcaaatagcaagtatggtgctaaagtctacaccaatggaattagatgagtgctatgcacttaattttaaaataaaactagttttcagt

SEQ ID NO: 49387 - DNA, 1116 bp, Artificial Sequence
  derived and/or modified sequence
atggagctggagggccagtggtggagaggccagctggccgccgacatccaccaggccctgagatacaaggagctgaagctgcccagctacaagggccagagcccccagctgagcctgagaagatacttcgccgacctgatcgccatcgtgagcaacagattcaccctgtgccccagcgccagacacctggccgtgtacctgctggacctgttcatggacagatacgacatcagcatccagcagctgcacctggtggccctgagctgcctgctgctggccagcaagttcgaggagaaggaggacagcgtgcccaagctggagcagctgaacagcctgggctgcatgaccaacatgaacctggtgctgaccaagcagaacctgctgcacatggagctgctgctgctggagaccttccagtggaacctgtgcctgcccaccgccgcccacttcatcgagtactacctgagcgaggccgtgcacgagaccgacctgcacgacggctggcccatgatctgcctggagaagaccaagctgtacatggccaagtacgccgactacttcctggaggtgagcctgcaggccgccgcctgcgtggccagcagcagaatcatcctgagactgagccccacctggcccaccagactgcacagactgaccgcctacagctgggacttcctggtgcagtgcatcgagagactgctgatcgcccacgacaacgacgtgaaggaggccaacaagcagagaggccaggccggcccccagagcgcccagctgagcgtgttccagaccgccagccagcccagcagacccgtgcacttccagcagccccagtacctgcaccagacccaccagaccagcctgcagtacagacaccccaccagcgagcagcccagctgccagcagatcgtgagcaccacccacaccagcagctacaccctgcagacctgccccgccggcttccagaccagcgtgcagggcctgggccacatgcagaccggcgtgggcatgagcctggccatccccgtggaggtgaagccctgcctgagcgtgagctacaacagaagctaccagatcaacgagcactacccctgcatcaccccctgcttcgagagatag

SEQ ID NO: 49388 - protein, 817 aa, Artificial Sequence
  derived and/or modified sequence
MYHSLSETRHPLQPEEQEVGIDPLSSYSNKSGGDSNKNGRRTSSTLDSEGTFNSYRKEWEELFVNNNYLATIRQKGINGQLRSSRFRSICWKLFLCVLPQDKSQWISRIEELRAWYSNIKEIHITNPRKVVGQQDLMINNPLSQDEGSLWNKFFQDKELRSMIEQDVKRTFPEMQFFQQENVRKILTDVLFCYARENEQLLYKQGMHELLAPIVFVLHCDHQAFLHASESAQPSEEMKTVLNPEYLEHDAYAVFSQLMETAEPWFSTFEHDGQKGKETLMTPIPFARPQDLGPTIAIVTKVNQIQDHLLKKHDIELYMHLNRLEIAPQIYGLRWVRLLFGREFPLQDLLVVWDALFADGLSLGLVDYIFVAMLLYIRDALISSNYQTCLGLLMHYPFIGDVHSLILKALFLRDPKRNPRPVTYQFHPNLDYYKARGADLMNKSRTNAKGAPLNINKVSNSLINFGRKLISPAMAPGSAGGPVPGGNSSSSSSVVIPTRTSAEAPSHHLQQQQQQQRLMKSESMPVQLNKGDVVTGSDAQVSVPVQTLTDLQGLSSKNISSSPSVESLPGGREFTGSPPSSATKKDSFFSNISRSRSHSKTMGRKESEEELEAQISFLQGQLNDLDAMCKYCAKVMDTHLVNIQDVILQENLEKEDQILVSLAGLKQIKDILKGSLRFNQSQLEAEENEQITIADNHYCSSGQGQGRGQGQSVQMSGAIKQASSETPGCTDRGNSDDFILISKDDDGSSARGSFSGQAQPLRTLRSTSGKSQAPVCSPLVFSDPLMGPASASSSNPSSSPDDDSSKDSGFTIVSPLDI

SEQ ID NO: 49389 - protein, 183 aa, Artificial Sequence
  derived and/or modified sequence
MYHSLSETRHPLQPEEQEVGIDPLSSYSNKSGGDSNKNGRRTSSTLDSEGTFNSYRKEWEELFVNNNYLATIRQKGINGQLRSSRFRSICWKLFLCVLPQDKSQWISRIEELRAWYSNIKEIHITNPRKVVGQQDLMINNPLSQDEGSLWNKFFQDKELRSMIEQDVKRTFPEMQFFQQENVR

SEQ ID NO: 49390 - protein, 88 aa, Artificial Sequence
  derived and/or modified sequence
MYHSLSETRHPLQPEEQEVGIDPLSSYSNKSGGDSNKNGRRTSSTLDSEGTFNSYRKEWEELFVNNNYLATIRQKGINGQLRSSRFRS

SEQ ID NO: 49391 - DNA, 2454 bp, Artificial Sequence
  derived and/or modified sequence
atgtaccacagcctgagcgagaccagacaccccctgcagcccgaggagcaggaggtgggcatcgaccccctgagcagctacagcaacaagagcggcggcgacagcaacaagaacggcagaagaaccagcagcaccctggacagcgagggcaccttcaacagctacagaaaggagtgggaggagctgttcgtgaacaacaactacctggccaccatcagacagaagggcatcaacggccagctgagaagcagcagattcagaagcatctgctggaagctgttcctgtgcgtgctgccccaggacaagagccagtggatcagcagaatcgaggagctgagagcctggtacagcaacatcaaggagatccacatcaccaaccccagaaaggtggtgggccagcaggacctgatgatcaacaaccccctgagccaggacgagggcagcctgtggaacaagttcttccaggacaaggagctgagaagcatgatcgagcaggacgtgaagagaaccttccccgagatgcagttcttccagcaggagaacgtgagaaagatcctgaccgacgtgctgttctgctacgccagagagaacgagcagctgctgtacaagcagggcatgcacgagctgctggcccccatcgtgttcgtgctgcactgcgaccaccaggccttcctgcacgccagcgagagcgcccagcccagcgaggagatgaagaccgtgctgaaccccgagtacctggagcacgacgcctacgccgtgttcagccagctgatggagaccgccgagccctggttcagcaccttcgagcacgacggccagaagggcaaggagaccctgatgacccccatccccttcgccagaccccaggacctgggccccaccatcgccatcgtgaccaaggtgaaccagatccaggaccacctgctgaagaagcacgacatcgagctgtacatgcacctgaacagactggagatcgccccccagatctacggcctgagatgggtgagactgctgttcggcagagagttccccctgcaggacctgctggtggtgtgggacgccctgttcgccgacggcctgagcctgggcctggtggactacatcttcgtggccatgctgctgtacatcagagacgccctgatcagcagcaactaccagacctgcctgggcctgctgatgcactaccccttcatcggcgacgtgcacagcctgatcctgaaggccctgttcctgagagaccccaagagaaaccccagacccgtgacctaccagttccaccccaacctggactactacaaggccagaggcgccgacctgatgaacaagagcagaaccaacgccaagggcgcccccctgaacatcaacaaggtgagcaacagcctgatcaacttcggcagaaagctgatcagccccgccatggcccccggcagcgccggcggccccgtgcccggcggcaacagcagcagcagcagcagcgtggtgatccccaccagaaccagcgccgaggcccccagccaccacctgcagcagcagcagcagcagcagagactgatgaagagcgagagcatgcccgtgcagctgaacaagggcgacgtggtgaccggcagcgacgcccaggtgagcgtgcccgtgcagaccctgaccgacctgcagggcctgagcagcaagaacatcagcagcagccccagcgtggagagcctgcccggcggcagagagttcaccggcagcccccccagcagcgccaccaagaaggacagcttcttcagcaacatcagcagaagcagaagccacagcaagaccatgggcagaaaggagagcgaggaggagctggaggcccagatcagcttcctgcagggccagctgaacgacctggacgccatgtgcaagtactgcgccaaggtgatggacacccacctggtgaacatccaggacgtgatcctgcaggagaacctggagaaggaggaccagatcctggtgagcctggccggcctgaagcagatcaaggacatcctgaagggcagcctgagattcaaccagagccagctggaggccgaggagaacgagcagatcaccatcgccgacaaccactactgcagcagcggccagggccagggcagaggccagggccagagcgtgcagatgagcggcgccatcaagcaggccagcagcgagacccccggctgcaccgacagaggcaacagcgacgacttcatcctgatcagcaaggacgacgacggcagcagcgccagaggcagcttcagcggccaggcccagcccctgagaaccctgagaagcaccagcggcaagagccaggcccccgtgtgcagccccctggtgttcagcgaccccctgatgggccccgccagcgccagcagcagcaaccccagcagcagccccgacgacgacagcagcaaggacagcggcttcaccatcgtgagccccctggacatctag

SEQ ID NO: 49392 - DNA, 2454 bp, Artificial Sequence
  derived and/or modified sequence
atgtaccactctctgagcgaaacccgacatcccctgcagccagaggaacaggaggtggggattgatccactttcatcttattctaacaagtccggcggtgacagtaacaaaaatggtcggaggacttcgtccaccctggactccgaggggaccttcaattcctatagaaaggaatgggaagaattatttgtcaataataactacctggcgacgattcgccagaaaggaatcaacggccagctgagatctagtaggttcagatctatttgctggaaactgtttctctgcgtgctgcctcaggataaatctcaatggatttctagaattgaggagctcagggcctggtacagtaacatcaaggagatccatatcaccaatccaagaaaggtagtgggtcagcaggacctcatgattaataatcccctgtcacaggacgaaggatctctctggaacaagttttttcaggataaagaactgcgctctatgatcgagcaagatgttaaacgcacttttcccgagatgcagttttttcagcaggagaacgtccgtaaaattctgactgatgttttgttctgttacgcacgcgaaaacgaacagctactgtataagcaggggatgcacgagctgctggccccaatcgttttcgtgcttcattgcgatcatcaggccttccttcatgctagcgaaagcgcccagcccagtgaggagatgaaaacggtcctcaaccctgagtacctggagcacgacgcctatgcggtgttttcacaattgatggagaccgccgaaccttggttctctacctttgagcacgatggtcagaagggcaaggagacccttatgacacctattcccttcgcgaggccacaggacctgggcccaactatcgcgatagtgacgaaggtcaaccaaattcaggaccacctgctgaagaagcacgatattgaactgtatatgcacctgaacagactggagatcgccccccagatctacggtctgcggtgggtccgccttctgtttgggagagaattcccgttacaggacttgctggtcgtctgggacgcccttttcgctgatggactgtcattagggttagttgactacatattcgtggctatgctgctgtacattcgggacgccctcatcagctcaaattaccagacgtgccttggactgctgatgcattacccttttattggcgatgtgcactcactgattctgaaagctctctttctccgagatccaaaacggaatccaagaccagtgacctatcaattccatcccaatctcgattattataaggctagaggggcggacctgatgaacaaatcacgcaccaatgccaaaggcgcccccctgaatatcaataaggttagcaatagccttataaacttcggtcgaaagctcatatcacccgccatggcccccggtagcgcagggggccctgtgcctggaggcaacagctcaagcagttccagtgtggtgattcctaccagaacatcagctgaagcccctagccatcatctgcagcaacagcagcaacagcagagattgatgaaaagcgaaagcatgcctgtgcagctcaacaagggcgacgtagttactggcagcgacgcccaggtttcggttccagtgcaaaccttaaccgatctgcaaggcctctccagtaaaaacatctcgagcagtcctagcgttgagagtctcccaggcggtagagagttcaccggcagccctccctcaagcgccacaaagaaggacagtttttttagcaatatcagccgcagccggagtcactcaaagaccatgggtcgaaaggagagcgaagaggagcttgaggcccagatttcattccttcagggccagttaaatgacctggacgctatgtgtaaatattgcgccaaagtgatggacacacacctggtaaatattcaggatgtgattctgcaggaaaacctagagaaggaagatcagatcttggtttctttggccggcctgaagcaaattaaagacattctgaaagggtccctccggttcaaccaatcacagcttgaggccgaggaaaacgaacagattacaatcgccgataaccactattgctcgtcaggtcagggccagggacgtggccaggggcaatctgtgcaaatgtcaggagctatcaaacaagcatcgagtgaaacccccggatgtactgatagaggaaactctgacgatttcattctgatttcaaaagatgatgacgggtcgtcagccaggggttcatttagcggacaggcccagccgctgaggacactgcgcagcacgtcagggaaatcccaggcccccgtctgtagtccattagtgttttctgatcccctaatgggccctgctagtgctagctccagcaatccaagttcttctccagacgacgattcttctaaagactccggttttaccattgtttctcccttggacatctag

SEQ ID NO: 49393 - DNA, 2454 bp, Artificial Sequence
  derived and/or modified sequence
atgtaccacagcctgtctgagaccaggcaccccctgcagcctgaggagcaggaggtgggcatcgaccccctgagcagctacagcaacaagtctggaggagacagcaacaagaatggccgccgcaccagcagcaccctggacagcgagggcaccttcaacagctacaggaaggagtgggaggagctgtttgtgaacaacaactacctggccaccatccggcagaagggcatcaatggccagctgcggagcagccgcttccgcagcatctgctggaagctgttcctgtgtgtgctgccccaggacaagagccagtggatcagcagaattgaggagctgcgggcctggtacagcaacatcaaggagatccacatcaccaaccccaggaaggtggtgggccagcaggacctgatgatcaacaaccccctgagccaggatgagggcagcctgtggaacaagttcttccaggacaaggagctgcgctccatgattgagcaggatgtgaagaggaccttccctgagatgcagttcttccagcaggagaatgtgaggaagatcctgacagatgtgctcttctgctacgcccgggagaatgagcagctgctgtacaagcagggcatgcatgagctgctggcccccatcgtgtttgtgctgcactgtgaccaccaggccttcctgcacgccagcgagagcgcccagcccagcgaggagatgaagacagtgctgaaccctgagtacctggagcatgatgcctatgctgtgttcagccagctgatggagacagctgagccctggttcagcacctttgaacatgatggccagaagggcaaggagaccctgatgacccccatcccctttgcccggccccaggacctgggccccaccatcgccatcgtgaccaaggtgaaccagatccaggaccacctgctgaagaagcatgacatcgagctgtacatgcacctgaaccggctggagatcgccccccagatctacggcctgcgctgggtgcggctgctgtttggccgggagttccccctgcaggacctgctggtggtgtgggatgccctgtttgctgatggcctgagcctgggcctggtggactacatctttgtggccatgctgctgtacatcagagatgccctgatcagcagcaactaccagacctgcctgggcctgctgatgcactaccccttcatcggagatgtgcacagcctcatcctgaaggccctcttcctgcgggaccccaagaggaaccccaggcctgtgacctaccagttccaccccaacctggactactacaaggcccggggagctgacctgatgaacaagagcaggaccaatgccaagggggcccccctgaacatcaacaaggtgagcaacagcctcatcaactttggaaggaagctgatcagccctgccatggcccctggcagcgctgggggccctgtgcctgggggcaacagcagcagcagcagctctgtggtgatccccaccaggaccagcgctgaggcccccagccaccacctgcagcagcagcagcagcagcagaggctgatgaagtctgagagcatgcctgtgcagctgaacaagggagatgtggtgacaggcagtgatgcccaggtgtctgtgcctgtgcagaccctgacagacctgcagggcctgagcagcaagaacatcagcagcagccccagcgtggagagcctgcccggcggccgggagttcaccggcagcccccccagcagcgccaccaagaaggacagcttcttcagcaacatcagccgcagccgcagccacagcaagaccatgggcaggaaggagagcgaggaggagctggaggcccagatctccttcctgcagggccagctgaatgacctggatgccatgtgcaagtactgtgccaaggtgatggacacccacctggtgaacatccaggacgtcatcctgcaggagaacctggagaaggaggaccagatcctggtgtccctggccggcctgaagcagatcaaggacatcctgaagggcagcctgcgcttcaaccagagccagctggaggccgaggagaatgagcagatcaccatcgctgacaaccactactgcagcagcggccagggccagggccggggccagggccagagcgtgcagatgtctggggccatcaagcaggccagcagcgagaccccaggctgcacagaccggggcaacagtgatgacttcatcctgatcagcaaggatgatgatggcagcagcgcccggggcagcttcagcggccaggcccagcccctgcggaccctgcggagcaccagcggcaagagccaggcccctgtgtgcagccccctggtgttcagtgaccccctgatgggccctgccagcgccagcagcagcaaccccagcagcagcccagatgatgacagcagcaaggacagcggcttcaccatcgtgagccccctggacatctag

SEQ ID NO: 49394 - DNA, 2454 bp, Artificial Sequence
  derived and/or modified sequence
atgtaccacagcctgagcgagacccggcaccccctgcagcccgaggagcaagaggtggggatcgatcccctcagctcatactctaacaagtcagggggggatagcaacaaaaacggcagacggaccagctcgacattggactctgaagggacttttaattcgtatcgcaaagagtgggaggagctgtttgtcaacaacaattacctggctaccatccggcagaaaggaatcaacgggcagcttaggagctccaggtttcgttccatttgttggaagctgtttctgtgtgtactcccacaagataaatcccagtggatttcacggatagaggaactgagggcatggtattccaacataaaagagatacacatcactaaccctcgcaaggttgtcggtcagcaggatctcatgatcaataatcctttatctcaggatgaaggctctctttggaacaagttcttccaggataaggagctgcggtccatgattgagcaagatgtcaagagaacatttcccgagatgcagttcttccagcaggaaaacgtccgcaagatcctcactgacgtactattttgttatgcccgagaaaacgaacagctgctgtataagcaaggaatgcacgaactcctggcccccatcgtgtttgtgctgcattgcgaccatcaggctttccttcatgccagcgaaagcgcacaaccctccgaagagatgaagactgttctgaacccggaatacctggaacacgacgcctatgcggtgttcagccaactcatggagactgctgagccgtggttctccacattcgagcatgatggtcagaaggggaaagagaccctcatgaccccaattccatttgccaggccacaggaccttggtcccacaatagctatcgtaacaaaggtgaaccagatccaggatcatctgcttaagaagcacgacattgagctctatatgcacctgaacagactcgagatcgccccccagatctacggactgaggtgggtgcggctgctctttgggcgggaatttcccctccaggatctcctcgttgtgtgggacgcgttgttcgccgacggattgtcgctgggcttggtggactacatattcgtggcaatgctgttgtatatccgcgacgccctgataagctccaactatcagacatgcctgggactgctcatgcactacccatttatcggagatgttcacagcttaatacttaaagcgctgttcctcagggacccaaaacggaacccccgaccagtgacataccaattccatcctaacctggattactataaggcgcggggcgcggacttgatgaacaagagccggaccaacgctaaaggagctccgctaaacatcaataaagtgtctaatagccttatcaatttcggcagaaagttgatctcacccgccatggctccaggctctgcaggcggacctgtgcctggagggaactctagcagctcatccagtgtcgtgatccccacccggacctccgctgaagcaccaagccaccacctgcaacaacaacaacagcagcagcgtctgatgaaatctgaaagtatgcctgtccaactaaacaagggggacgtcgtcactggaagcgatgcacaggtgtccgtccctgttcagaccctcacagatcttcaggggctgtcctccaagaacatcagttccagcccctccgtggagtcccttcccggtgggcgggagttcacgggatccccaccatccagtgctactaagaaagattcatttttttctaacatctcaagatcacgcagccactcgaaaaccatgggaaggaaggagtcggaagaggagttagaggcgcagatctcttttttacaggggcagctcaacgacttggacgcgatgtgtaaatactgcgctaaggtaatggacacacacctcgtgaacattcaagacgtcatccttcaggagaacctagagaaagaggatcagattttggtctctctcgctgggctgaagcaaatcaaggatattctgaagggctcactccggttcaaccagagccagctcgaagcagaggaaaatgagcagatcaccattgccgataatcactactgcagcagcggacagggccagggccggggtcaaggacagtcggttcagatgtcaggcgcgatcaagcaggccagcagcgagacacccgggtgtacagatcgaggtaactcagacgattttatactgatttccaaggatgacgacggttcctccgcccgtgggtctttctccggccaggcacaacccctccgaactcttagaagcaccagtggcaagtcccaggcgcccgtgtgctctcctcttgtcttctctgacccgctgatggggcctgcttctgctagctcttctaaccccagctctagccccgacgatgactcctccaaggacagtggctttacgatagtgagccctctcgacatctag

SEQ ID NO: 49395 - DNA, 2454 bp, Artificial Sequence
  derived and/or modified sequence
atgtatcactcactcagtgagacccgtcaccccctgcaacctgaggaacaagaggtcggaattgaccccctctcgagctacagcaataaatcaggaggagattcaaacaaaaatgggagaaggaccagttccaccttggacagtgaaggaacatttaatagctatagaaaggaatgggaagagttatttgtcaacaataactacttggcaactattcggcaaaagggcatcaatggccagctgcggtcaagtcgcttccgttccatttgctggaagctcttcctctgcgtgctccctcaggataagagccagtggatttcccgcatcgaggaactgagagcttggtacagcaatatcaaagaaatccacatcaccaaccctaggaaggtcgtcggtcagcaggacctcatgattaacaatcctctgagccaggatgagggaagcctgtggaacaaattcttccaggataaagaactccgaagcatgattgaacaggatgtgaaaagaacctttccagagatgcagttttttcaacaggagaatgtccggaagattcttactgatgttctgttctgctatgctcgcgagaatgaacagcttttgtacaaacagggaatgcatgaattacttgcccctatcgtttttgtcctccactgcgaccaccaggcgttcctgcacgcttccgagtccgcccagccctctgaggagatgaagaccgtgctcaatcctgagtacctggagcatgacgcatatgcagtgttctcgcagcttatggagaccgctgaaccctggttcagcacatttgagcatgatggccagaaaggaaaagaaaccctcatgaccccaattcctttcgcccgaccccaggacctcggccctactattgctatcgtgaccaaggtgaaccagattcaggatcatctactgaagaagcacgatatcgaactgtacatgcatctcaatcgcctcgagattgctccacagatatacggcctgaggtgggtaaggcttctatttggacgcgaattcccgctgcaggatcttctagttgtatgggacgccctatttgctgacggtctgtctctgggcctagtagactacatttttgtcgctatgttgctgtatattagggatgcgctcatcagcagcaattatcagacatgcttggggctgttaatgcactacccatttattggagacgttcatagcctgattcttaaagcacttttcctgagagacccgaaacggaacccgaggccggttacctatcagttccatccgaacttggattactacaaagctaggggagccgatctgatgaataaatcaagaaccaatgcaaagggcgcaccgctcaatattaataaagtatcaaatagtctgataaactttggacgtaagctcatttcacccgcaatggctcctggctctgctggcggacctgtcccagggggaaattcatcatcgagctcctccgttgtgatcccgacaagaaccagcgccgaggctccaagccaccaccttcaacagcagcagcagcagcaacgactgatgaagagcgagagtatgcccgtgcagctgaacaagggggacgtcgtcactgggtccgatgctcaggtatccgtgcccgtccaaacactgacagatctacaaggcctgagtagtaagaatattagctccagtcccagtgttgagtctctgcctggaggtcgtgagtttaccggtagccccccttcctccgctacaaaaaaggactccttcttcagcaacatcagccgcagccgcagtcactccaagacaatggggagaaaagagagcgaagaggagctcgaggctcaaatcagtttcctccagggccagctgaacgatctcgatgctatgtgcaagtattgcgctaaagtgatggacactcacctggttaatatccaagatgtgattctgcaagagaacctagaaaaggaagaccagattctcgtcagcctggccggattgaaacaaatcaaagacatcctcaaagggagcctgcgtttcaatcaatcacaactggaggctgaggaaaacgagcaaatcaccattgccgataaccattactgttcctccggtcagggccaaggaaggggtcaaggacagagtgtgcaaatgagcggagccatcaagcaggcttcttctgaaactccaggatgtacagaccgagggaacagcgatgattttatccttatcagcaaagacgacgacggtagctccgcaagggggtcattcagtggtcaagcccaaccactacgcaccctgcgctcaaccagtggaaaaagtcaagcccctgtatgctcacctctggttttttctgaccctttgatggggcctgcaagtgcgagctcctctaatccctcatcttctccagatgacgactcgtctaaagactccgggttcactatcgtcagcccgcttgacatctag

SEQ ID NO: 49396 - DNA, 3124 bp, Artificial Sequence
  derived and/or modified sequence
gtattgagtcaccataagtggacaaggaaggagcttctaacagacctcattgtacatacaaaattacaatcatgaatgtaaaggaaagcacactggaactgcttgcagctgactgcgaccttgagtctcagcttctgcatctgtgaaatgaagatactggtctgtgatatcagtatcaagataaaagtttggaatgggagaaaaattctcaaagcctgaaagaaaatctgtagttacttttggtgacgctgtccagttcccacaatgtatcattccttatctgaaactagacatcctctgcagccagaagaacaagaagtaggcattgaccccttgtccagttactctaacaagtctggaggagattcaaataaaaatggaagaagaacaagttctactttagactctgaagggacttttaattcctataggaaagaatgggaagaactatttgtaaacaacaattacttggcaacaataaggcagaaggggattaatgggcagctgagaagcagcaggttccgcagcatttgctggaagctatttctttgtgttcttcctcaagacaaaagtcaatggataagtagaattgaagaattaagagcatggtatagcaacattaaagaaatacatattaccaacccgaggaaggttgttggccaacaagatttgatgatcaataatcctctttcacaggatgaagggagtctttggaacaaattcttccaagataaagaacttcgatcaatgattgaacaagatgtcaaaagaacgtttcctgaaatgcagtttttccagcaagaaaatgtgagaaaaattcttacagatgttcttttctgttatgccagagaaaacgagcagttgctttataaacagggcatgcacgaactgttagcacctatagtctttgtccttcactgtgaccaccaagcttttctacatgccagtgagtctgcacagcccagtgaggaaatgaaaactgtcttgaaccctgagtatctggaacatgatgcctatgcagtgttctcacaacttatggaaactgctgaaccttggttttcaacttttgagcatgatggtcagaaggggaaagaaacactgatgactcccattccctttgctagaccacaagatttagggccaacaattgctattgttactaaagtcaaccagatccaggatcatctactgaagaagcatgatattgagctttacatgcacttgaacagactagaaattgcaccacagatatatgggttaaggtgggtgcggctgctatttggacgagagttccccctgcaggaccttctggtggtctgggatgccttgtttgcagacggcctcagcctgggtttagtagattatatcttcgtagccatgttactttacatccgagatgctttgatctctagtaactaccagacctgtctcggccttctgatgcattacccattcatcggggatgtacactcactgattcttaaggctctgttccttagagatccaaagagaaatccaagaccagtgacttatcaattccatccaaatttagattattacaaagcacgaggagcagacctcatgaataaaagccggaccaatgccaaaggtgctcccctgaatataaataaggtctctaatagcctgattaattttggaagaaagttgatttccccagcaatggctccaggcagtgcaggtggccctgtacctggaggcaacagcagtagctcctcctctgttgtaattcctaccaggacctcagcagaggccccaagccatcacttgcaacagcaacagcagcagcagaggctgatgaaatcagaaagcatgcctgtgcaattgaacaaaggcgatgtagttacaggaagcgatgctcaggtttctgttcctgtccagactctaactgacctccaagggctaagttctaaaaacatcagttcatctccaagcgttgagagtttgcctggaggaagagaattcactggctctccaccttcatctgctactaaaaaagattccttttttagcaacatctcacgttctcgctcacacagcaaaactatgggcagaaaagaatctgaagaagaattagaagcccaaatttccttccttcaagggcagttgaatgacctggatgccatgtgcaaatactgtgcaaaggtgatggacactcatcttgtaaatattcaagatgtgatattacaagaaaatttggaaaaagaagatcaaattctggtttccctggcaggattaaaacagatcaaagacattctaaaaggttccctgcgttttaaccagagccagctagaggccgaagagaacgaacagatcaccattgcggacaaccactactgctccagcggccagggccagggccgaggccaaggccagagcgttcaaatgtcaggggccattaaacaggcctcttcagaaacgccagggtgcactgatagagggaattccgatgacttcatcctgatttccaaagatgatgatgggagcagtgccaggggctccttctccggccaggcccagcctcttcgcaccctcagaagcacctctgggaaaagccaggccccagtctgctccccactggtgttctcagatccactgatgggcccagcctcagcttcctccagcaaccccagctccagtcctgatgacgacagcagcaaggactctggcttcaccattgtgagtcccctggacatctgaccacagtgcccagtcctgccccacagggatctagccacccttcagtggccccaaggccagactgaggctcatccagtggagaaccttcttaaaccactgcttccttcccggcatgcattttgcattggtccagccctttgaaaccccttagagagaagcatatatggccacaaagcacagaggcttaggtttgccacatgcagacagggctttctgggcccttacctaatccccacccgactcttgctctgagttagagctgagttacgtacccagtatcacactcacagttagaaaagaccgaatcacaatttagaatcacttttcctctgtccccttctccccagctaagaatgtgtggcacctccatcagttatacttagaaggagcagaaatagttattttc

SEQ ID NO: 49397 - protein, 1160 aa, Artificial Sequence
  derived and/or modified sequence
MACRRRYFVEGEAPSSETGTSLDSPSAYPQGPLVPGSSLSPDHYEHTSVGAYGLYSGPPGQQQRTRRPKLQHSTSILRKQAEEEAIKRSRSLSESYELSSDLQDKQVEMLERKYGGRLVTRHAARTIQTAFRQYQMNKNFERLRSSMSENRMSRRIVLSNMRMQFSFEGPEKVHSSYFEGKQVSVTNDGSQLGALVSPECGDLSEPTTLKSPAPSSDFADAITELEDAFSRQVKSLAESIDDALNCRSLHTEEAPALDAARARDTEPQTALHGMDHRKLDEMTASYSDVTLYIDEEELSPPLPLSQAGDRPSSTESDLRLRAGGAAPDYWALAHKEDKADTDTSCRSTPSLERQEQRLRVEHLPLLTIEPPSDSSVDLSDRSERGSLKRQSAYERSLGGQQGSPKHGPHSGAPKSLPREEPELRPRPPRPLDSHLAINGSANRQSKSESDYSDGDNDSINSTSNSNDTINCSSESSSRDSLREQTLSKQTYHKEARNSWDSPAFSNDVIRKRHYRIGLNLFNKKPEKGVQYLIERGFVPDTPVGVAHFLLQRKGLSRQMIGEFLGNRQKQFNRDVLDCVVDEMDFSTMELDEALRKFQAHIRVQGEAQKVERLIEAFSQRYCICNPGVVRQFRNPDTIFILAFAIILLNTDMYSPNVKPERKMKLEDFIKNLRGVDDGEDIPREMLMGIYERIRKRELKTNEDHVSQVQKVEKLIVGKKPIGSLHPGLGCVLSLPHRRLVCYCRLFEVPDPNKPQKLGLHQREIFLFNDLLVVTKIFQKKKNSVTYSFRQSFSLYGMQVLLFENQYYPNGIRLTSSVPGADIKVLINFNAPNPQDRKKFTDDLRESIAEVQEMEKHRIESELEKQKGVVRPSMSQCSSLKKESGNGTLSRACLDDSYASGEGLKRSALSSSLRDLSEAGKRGRRSSAGSLESNVEGSIISSPHMRRRATSTRECPSRPHQTMPNSSSLLGSLFGSKRGKPPPQAHLPSAPALATPPPTGGPASLAALCGWPPPGAPRGAAAGRHARASHPVLPHAEPSPVPPSPPPPPTPAHPARTPVPPRPPWGPPSLRGPCPRPPAAALGPRGAHSAPPWAAPCPAAPHQQQGQTQRHQHNCVDSLGRGPRLPETPAHHTGHARGSPAAHQTRGTSVAISPLCPSRPN

SEQ ID NO: 49398 - protein, 1114 aa, Artificial Sequence
  derived and/or modified sequence
MACRRRYFVEGEAPSSETGTSLDSPSAYPQGPLVPGSSLSPDHYEHTSVGAYGLYSGPPGQQQRTRRPKLQHSTSILRKQAEEEAIKRSRSLSESYELSSDLQDKQVEMLERKYGGRLVTRHAARTIQTAFRQYQMNKNFERLRSSMSENRMSRRIVLSNMRMQFSFEGPEKVHSSYFEGKQVSVTNDGSQLGALVSPECGDLSEPTTLKSPAPSSDFADAITELEDAFSRQVKSLAESIDDALNCRSLHTEEAPALDAARARDTEPQTALHGMDHRKLDEMTASYSDVTLYIDEEELSPPLPLSQAGDRPSSTESDLRLRAGGAAPDYWALAHKEDKADTDTSCRSTPSLERQEQRLRVEHLPLLTIEPPSDSSVDLSDRSERGSLKRQSAYERSLGGQQGSPKHGPHSGAPKSLPREEPELRPRPPRPLDSHLAINGSANRQSKSESDYSDGDNDSINSTSNSNDTINCSSESSSRDSLREQTLSKQTYHKEARNSWDSPAFSNDVIRKRHYRIGLNLFNKKPEKGVQYLIERGFVPDTPVGVAHFLLQRKGLSRQMIGEFLGNRQKQFNRDVLDCVVDEMDFSTMELDEALRKFQAHIRVQGEAQKVERLIEAFSQRYCICNPGVVRQFRNPDTIFILAFAIILLNTDMYSPNVKPERKMKLEDFIKNLRGVDDGEDIPREMLMGIYERIRKRELKTNEDHVSQVQKVEKLIVGKKPIGSLHPGLGCVLSLPHRRLVCYCRLFEVPDPNKPQKLGLHQREIFLFNDLLVVTKIFQKKKNSVTYSFRQSFSLYGMQVLLFENQYYPNGIRLTSSVPGADIKVLINFNAPNPQDRKKFTDDLRESIAEVQEMEKHRIESELEKQKGVVRPSMSQCSSLKKESGNGTLSRACLDDSYASGEGLKRSALSSSLRDLSEAGKRGRRSSAGSLESNVEGSIISSPHMRRRATSTRECPSRPHQTMPNSSSLLGSLFGSKRGKPPPQAHLPSAPALPPPHPPVVLPHLQHSVAGHHLGPPEGLPQAAMHGHHTQYCHMQNPPPYHHHHHHHPPQHIQHAHQYHHGPHGGHPAYGAHAHGHPPLPSAHVGHTVHHHGQPPAPPPPTSSKAKPSGISTIV

SEQ ID NO: 49399 - DNA, 3483 bp, Artificial Sequence
  derived and/or modified sequence
atggcctgcagaagaagatacttcgtggagggcgaggcccccagcagcgagaccggcaccagcctggacagccccagcgcctacccccagggccccctggtgcccggcagcagcctgagccccgaccactacgagcacaccagcgtgggcgcctacggcctgtacagcggcccccccggccagcagcagagaaccagaagacccaagctgcagcacagcaccagcatcctgagaaagcaggccgaggaggaggccatcaagagaagcagaagcctgagcgagagctacgagctgagcagcgacctgcaggacaagcaggtggagatgctggagagaaagtacggcggcagactggtgaccagacacgccgccagaaccatccagaccgccttcagacagtaccagatgaacaagaacttcgagagactgagaagcagcatgagcgagaacagaatgagcagaagaatcgtgctgagcaacatgagaatgcagttcagcttcgagggccccgagaaggtgcacagcagctacttcgagggcaagcaggtgagcgtgaccaacgacggcagccagctgggcgccctggtgagccccgagtgcggcgacctgagcgagcccaccaccctgaagagccccgcccccagcagcgacttcgccgacgccatcaccgagctggaggacgccttcagcagacaggtgaagagcctggccgagagcatcgacgacgccctgaactgcagaagcctgcacaccgaggaggcccccgccctggacgccgccagagccagagacaccgagccccagaccgccctgcacggcatggaccacagaaagctggacgagatgaccgccagctacagcgacgtgaccctgtacatcgacgaggaggagctgagcccccccctgcccctgagccaggccggcgacagacccagcagcaccgagagcgacctgagactgagagccggcggcgccgcccccgactactgggccctggcccacaaggaggacaaggccgacaccgacaccagctgcagaagcacccccagcctggagagacaggagcagagactgagagtggagcacctgcccctgctgaccatcgagccccccagcgacagcagcgtggacctgagcgacagaagcgagagaggcagcctgaagagacagagcgcctacgagagaagcctgggcggccagcagggcagccccaagcacggcccccacagcggcgcccccaagagcctgcccagagaggagcccgagctgagacccagaccccccagacccctggacagccacctggccatcaacggcagcgccaacagacagagcaagagcgagagcgactacagcgacggcgacaacgacagcatcaacagcaccagcaacagcaacgacaccatcaactgcagcagcgagagcagcagcagagacagcctgagagagcagaccctgagcaagcagacctaccacaaggaggccagaaacagctgggacagccccgccttcagcaacgacgtgatcagaaagagacactacagaatcggcctgaacctgttcaacaagaagcccgagaagggcgtgcagtacctgatcgagagaggcttcgtgcccgacacccccgtgggcgtggcccacttcctgctgcagagaaagggcctgagcagacagatgatcggcgagttcctgggcaacagacagaagcagttcaacagagacgtgctggactgcgtggtggacgagatggacttcagcaccatggagctggacgaggccctgagaaagttccaggcccacatcagagtgcagggcgaggcccagaaggtggagagactgatcgaggccttcagccagagatactgcatctgcaaccccggcgtggtgagacagttcagaaaccccgacaccatcttcatcctggccttcgccatcatcctgctgaacaccgacatgtacagccccaacgtgaagcccgagagaaagatgaagctggaggacttcatcaagaacctgagaggcgtggacgacggcgaggacatccccagagagatgctgatgggcatctacgagagaatcagaaagagagagctgaagaccaacgaggaccacgtgagccaggtgcagaaggtggagaagctgatcgtgggcaagaagcccatcggcagcctgcaccccggcctgggctgcgtgctgagcctgccccacagaagactggtgtgctactgcagactgttcgaggtgcccgaccccaacaagccccagaagctgggcctgcaccagagagagatcttcctgttcaacgacctgctggtggtgaccaagatcttccagaagaagaagaacagcgtgacctacagcttcagacagagcttcagcctgtacggcatgcaggtgctgctgttcgagaaccagtactaccccaacggcatcagactgaccagcagcgtgcccggcgccgacatcaaggtgctgatcaacttcaacgcccccaacccccaggacagaaagaagttcaccgacgacctgagagagagcatcgccgaggtgcaggagatggagaagcacagaatcgagagcgagctggagaagcagaagggcgtggtgagacccagcatgagccagtgcagcagcctgaagaaggagagcggcaacggcaccctgagcagagcctgcctggacgacagctacgccagcggcgagggcctgaagagaagcgccctgagcagcagcctgagagacctgagcgaggccggcaagagaggcagaagaagcagcgccggcagcctggagagcaacgtggagggcagcatcatcagcagcccccacatgagaagaagagccaccagcaccagagagtgccccagcagaccccaccagaccatgcccaacagcagcagcctgctgggcagcctgttcggcagcaagagaggcaagccccccccccaggcccacctgcccagcgcccccgccctggccacccccccccccaccggcggccccgccagcctggccgccctgtgcggctggcccccccccggcgcccccagaggcgccgccgccggcagacacgccagagccagccaccccgtgctgccccacgccgagcccagccccgtgccccccagccccccccccccccccacccccgcccaccccgccagaacccccgtgccccccagacccccctggggcccccccagcctgagaggcccctgccccagaccccccgccgccgccctgggccccagaggcgcccacagcgcccccccctgggccgccccctgccccgccgccccccaccagcagcagggccagacccagagacaccagcacaactgcgtggacagcctgggcagaggccccagactgcccgagacccccgcccaccacaccggccacgccagaggcagccccgccgcccaccagaccagaggcaccagcgtggccatcagccccctgtgccccagcagacccaactag

SEQ ID NO: 49400 - DNA, 3345 bp, Artificial Sequence
  derived and/or modified sequence
atggcctgcagaagaagatacttcgtggagggcgaggcccccagcagcgagaccggcaccagcctggacagccccagcgcctacccccagggccccctggtgcccggcagcagcctgagccccgaccactacgagcacaccagcgtgggcgcctacggcctgtacagcggcccccccggccagcagcagagaaccagaagacccaagctgcagcacagcaccagcatcctgagaaagcaggccgaggaggaggccatcaagagaagcagaagcctgagcgagagctacgagctgagcagcgacctgcaggacaagcaggtggagatgctggagagaaagtacggcggcagactggtgaccagacacgccgccagaaccatccagaccgccttcagacagtaccagatgaacaagaacttcgagagactgagaagcagcatgagcgagaacagaatgagcagaagaatcgtgctgagcaacatgagaatgcagttcagcttcgagggccccgagaaggtgcacagcagctacttcgagggcaagcaggtgagcgtgaccaacgacggcagccagctgggcgccctggtgagccccgagtgcggcgacctgagcgagcccaccaccctgaagagccccgcccccagcagcgacttcgccgacgccatcaccgagctggaggacgccttcagcagacaggtgaagagcctggccgagagcatcgacgacgccctgaactgcagaagcctgcacaccgaggaggcccccgccctggacgccgccagagccagagacaccgagccccagaccgccctgcacggcatggaccacagaaagctggacgagatgaccgccagctacagcgacgtgaccctgtacatcgacgaggaggagctgagcccccccctgcccctgagccaggccggcgacagacccagcagcaccgagagcgacctgagactgagagccggcggcgccgcccccgactactgggccctggcccacaaggaggacaaggccgacaccgacaccagctgcagaagcacccccagcctggagagacaggagcagagactgagagtggagcacctgcccctgctgaccatcgagccccccagcgacagcagcgtggacctgagcgacagaagcgagagaggcagcctgaagagacagagcgcctacgagagaagcctgggcggccagcagggcagccccaagcacggcccccacagcggcgcccccaagagcctgcccagagaggagcccgagctgagacccagaccccccagacccctggacagccacctggccatcaacggcagcgccaacagacagagcaagagcgagagcgactacagcgacggcgacaacgacagcatcaacagcaccagcaacagcaacgacaccatcaactgcagcagcgagagcagcagcagagacagcctgagagagcagaccctgagcaagcagacctaccacaaggaggccagaaacagctgggacagccccgccttcagcaacgacgtgatcagaaagagacactacagaatcggcctgaacctgttcaacaagaagcccgagaagggcgtgcagtacctgatcgagagaggcttcgtgcccgacacccccgtgggcgtggcccacttcctgctgcagagaaagggcctgagcagacagatgatcggcgagttcctgggcaacagacagaagcagttcaacagagacgtgctggactgcgtggtggacgagatggacttcagcaccatggagctggacgaggccctgagaaagttccaggcccacatcagagtgcagggcgaggcccagaaggtggagagactgatcgaggccttcagccagagatactgcatctgcaaccccggcgtggtgagacagttcagaaaccccgacaccatcttcatcctggccttcgccatcatcctgctgaacaccgacatgtacagccccaacgtgaagcccgagagaaagatgaagctggaggacttcatcaagaacctgagaggcgtggacgacggcgaggacatccccagagagatgctgatgggcatctacgagagaatcagaaagagagagctgaagaccaacgaggaccacgtgagccaggtgcagaaggtggagaagctgatcgtgggcaagaagcccatcggcagcctgcaccccggcctgggctgcgtgctgagcctgccccacagaagactggtgtgctactgcagactgttcgaggtgcccgaccccaacaagccccagaagctgggcctgcaccagagagagatcttcctgttcaacgacctgctggtggtgaccaagatcttccagaagaagaagaacagcgtgacctacagcttcagacagagcttcagcctgtacggcatgcaggtgctgctgttcgagaaccagtactaccccaacggcatcagactgaccagcagcgtgcccggcgccgacatcaaggtgctgatcaacttcaacgcccccaacccccaggacagaaagaagttcaccgacgacctgagagagagcatcgccgaggtgcaggagatggagaagcacagaatcgagagcgagctggagaagcagaagggcgtggtgagacccagcatgagccagtgcagcagcctgaagaaggagagcggcaacggcaccctgagcagagcctgcctggacgacagctacgccagcggcgagggcctgaagagaagcgccctgagcagcagcctgagagacctgagcgaggccggcaagagaggcagaagaagcagcgccggcagcctggagagcaacgtggagggcagcatcatcagcagcccccacatgagaagaagagccaccagcaccagagagtgccccagcagaccccaccagaccatgcccaacagcagcagcctgctgggcagcctgttcggcagcaagagaggcaagccccccccccaggcccacctgcccagcgcccccgccctgccccccccccacccccccgtggtgctgccccacctgcagcacagcgtggccggccaccacctgggcccccccgagggcctgccccaggccgccatgcacggccaccacacccagtactgccacatgcagaacccccccccctaccaccaccaccaccaccaccaccccccccagcacatccagcacgcccaccagtaccaccacggcccccacggcggccaccccgcctacggcgcccacgcccacggccacccccccctgcccagcgcccacgtgggccacaccgtgcaccaccacggccagccccccgccccccccccccccaccagcagcaaggccaagcccagcggcatcagcaccatcgtgtag

SEQ ID NO: 49401 - DNA, 3483 bp, Artificial Sequence
  derived and/or modified sequence
atggcgtgtcgtcgaagatactttgtcgagggcgaagctccaagctccgagacaggaactagtctggatagcccatccgcgtatccacaggggccattggtgccaggttcttccctgtctcccgatcactatgaacacacaagcgtgggggcatatggcctgtactcgggaccaccaggacagcagcagaggacacgcaggcccaagctgcaacactctactagcattttgagaaagcaggccgaagaggaagcgatcaagcgctcaaggtccctgtcagaaagctacgagctcagctcagacctgcaagacaagcaagttgagatgctggagcggaaatacggcgggcgtcttgtgaccaggcacgctgcccggaccatccagacagcttttcggcagtatcaaatgaacaagaacttcgagagactgcgatctagcatgagcgagaacagaatgtcaagaaggatcgtgctcagcaacatgcggatgcagttttcgtttgagggaccagagaaggttcactcttcctacttcgagggcaagcaggttagcgtcaccaacgacggatcacagcttggagcactggtttctcccgagtgtggggatctatctgaacctactacactgaaaagcccagcccccagttccgacttcgctgatgccatcactgagctcgaagacgccttctccagacaggtgaaatctctcgccgagtctattgacgacgcgctcaattgtcgcagcctgcacaccgaagaagccccagcattagacgccgcgagggcccgagacactgagccccaaaccgcactgcacggtatggaccacaggaagttggatgaaatgacagcctcatactctgatgttaccctctacatcgacgaggaagaactgtctcccccgctgccactgtcccaggcgggtgacaggccttccagtaccgagtctgacttgcggctaagagctgggggggctgccccagattattgggctctcgctcacaaggaagataaagcagatactgatactagctgtagaagtacaccgtcgcttgaacggcaagaacaacggctgagagtagaacatcttccccttctgacaattgaacccccctcggacagctccgtagatctgagcgacagatctgagcgcggaagtctgaagaggcagagcgcttacgaacgctccctcggagggcagcaggggagccctaagcatggcccccactctggggctcctaaatcactgcctagagaggaacctgaactcagaccacgccctcctcgtcccctggactcccacctcgccatcaatggctcggctaaccgacagtccaagtctgagtccgactactccgacggcgacaacgattcaataaatagtactagcaactccaacgataccatcaactgctctagcgaatctagttcccgggactcgttgagagaacagactctgagtaagcagacctaccacaaagaggcccgcaacagctgggacagccccgcgtttagcaacgacgtaattagaaaacgccactataggatagggcttaacttattcaataaaaagcccgagaagggggtgcagtacttaatagaaagggggtttgtccctgatacccccgtcggcgtggcccatttcctcctgcagcgcaaaggcctcagtagacagatgatcggggaattcctaggcaaccgccagaaacagttcaatagagacgtactcgactgtgttgtcgatgaaatggacttcagcactatggagcttgacgaagccctcaggaaattccaagcacacatacgtgtacaaggcgaggcccagaaggtggagcgcctgatagaagccttctcccagaggtattgcatttgcaatcctggagtagtgagacagtttagaaatcccgacaccatctttattctcgctttcgccatcattctactcaatactgacatgtacagccctaatgttaaaccagagcgaaaaatgaagctggaggactttattaagaaccttaggggcgtcgacgacggggaggacatcccgcgcgagatgctgatgggtatttacgaacgaattaggaaacgagaattgaagacaaacgaggatcatgtgtcacaggtacagaaggtggagaaactgatcgttgggaagaagcctatcgggtcactccacccgggcctgggatgcgtcttatcactcccacacagacgcttagtctgttactgtcggctgttcgaagtgccagaccccaacaagccccagaagttgggcctgcatcagcgagagattttcctgtttaacgatctcctggtggttacaaagatctttcagaagaagaagaattctgttacatactcctttagacagtctttttccctgtatggcatgcaagtgttgctcttcgagaaccaatactatcctaatggaatacgcctcacgtcgagcgtgcccggcgcggacatcaaggtgctgattaattttaatgctcccaatcctcaggacagaaagaagtttacagacgacttgagggagagcatagccgaagttcaagaaatggagaagcataggatcgagtccgaactggaaaagcaaaaaggtgtggtaagaccttcaatgtcccaatgctcgtctctgaagaaggaaagtggcaatgggactctgagtcgggcctgcctggacgattcctacgctagtggcgagggactgaaacgctccgctctctccagcagtctccgagatctgtccgaggctgggaagcgcggcaggaggagcagtgcagggtcattagaatccaatgtggaaggctctatcattagcagtccccacatgaggcggcgggctacaagtactagagaatgcccttcgcggccgcaccaaaccatgcctaatagttcctctctgctggggtctcttttcggttccaaaagaggtaaaccacccccccaggcccatcttccaagtgccccagctctagctaccccaccccctacagggggccccgccagcttggcggcattgtgtggatggccaccacccggcgcacctcgaggggcggcagctgggaggcatgcgcgggcttctcaccccgtactgccacacgccgaaccgtcgccagtgccaccttcacccccccctcctccaacccccgcccacccagccaggactcccgtgccacctcgccctccgtggggacccccttccctcaggggcccctgtccacggcccccagccgctgctctgggacctaggggggcccactccgctccgccctgggctgctccttgtccagctgccccgcaccagcaacaaggacagacccaaagacaccagcacaactgcgtcgacagcctgggcagggggccccggctgcctgaaactcccgcacatcataccgggcacgccaggggcagccctgcagcacaccagacaagaggaacttcagtggcaatcagtccgctgtgcccttctaggcctaattag

SEQ ID NO: 49402 - DNA, 3345 bp, Artificial Sequence
  derived and/or modified sequence
atggcctgtcggagacggtatttcgtcgaaggcgaagcgccttccagtgaaactggaacctctcttgattccccatcggcttaccctcaggggcccctggttccggggagctcactctctccggatcattatgaacacacaagcgtaggcgcatatgggctctatagcggacctccagggcagcaacaaagaacaaggaggccaaagctgcagcactccacgtctattctgcgaaaacaagctgaggaggaggctatcaaacgctcccggtcactgtccgaaagctacgagctcagcagtgacctccaggacaaacaggtcgagatgttggagagaaaatatggtggcagactggttacaaggcatgccgctcggacaattcaaacagccttcagacaatatcagatgaacaaaaacttcgagcggctccgcagctctatgagcgaaaaccggatgtcgcggcgcatcgtcttatcaaacatgagaatgcagtttagctttgaaggtccggagaaggtgcactctagctactttgaaggcaagcaggtgtctgttaccaatgatggttctcagctcggggctctggtcagcccagaatgcggtgacttgtcggagccaacgacactaaagtcccctgctccatcctccgacttcgccgatgccattacagagctggaagatgctttcagccgacaggttaagagcctcgcggagtcaattgacgatgcactcaattgtcgtagcctccacaccgaggaagcccctgctctggatgcagcacgggcccgggatacagaaccgcagaccgcattgcacggcatggaccaccggaaactcgatgagatgaccgccagctattccgacgtgactctgtacattgacgaggaggaattgagcccacccctaccattatcccaggcgggggacagaccttcaagtacggagagcgatctcagactccgggccggcggggcagccccggattactgggcgctcgctcataaggaggataaggccgacactgatacctcatgtaggtctaccccatctctggaaaggcaagaacagcggctgagggttgaacatctacctctgctcacgatcgaaccacccagcgatagctcagttgatttatccgacagatccgaacgcggatccctgaagcgtcagagcgcatacgagcggtcgctgggcggccagcaagggtccccgaagcacggaccacattctggcgccccaaagtctcttccgagagaggagcccgaacttcggccgaggccgcctcgccctctcgacagccatctcgcaatcaatggatccgcaaacagacagtctaaatcagagagtgactactccgacggagacaatgacagtatcaactccaccagtaacagcaatgataccattaattgtagttctgagagcagcagtcgagacagtcttagggagcaaacccttagcaaacagacttaccacaaagaggctaggaattcgtgggactcccctgcattctcaaacgacgtgatccgaaaacggcactaccgcattggcctgaatttatttaacaaaaagcccgagaaaggcgttcaatatctaattgagaggggcttcgtaccagacacaccagttggagtggcccatttcttactgcagaggaaaggccttagcagacagatgataggcgagtttctgggcaaccggcagaaacagttcaatcgggatgtgcttgactgcgtggtggatgaaatggatttcagtaccatggaactcgatgaggccttgcgcaagttccaagctcatattcgggtgcaaggagaggcccagaaagtcgagcgactgattgaagcctttagccaaaggtactgcatctgtaatccgggcgtggtgaggcaatttaggaacccagataccatttttatactggctttcgccattatcctactgaacactgatatgtactcacccaacgtgaagccagaacgcaagatgaagctagaggactttatcaagaacctcaggggcgtggacgatggagaggacattcccagggagatgctgatgggcatctatgagcggattcggaaaagagagctaaagacaaatgaggaccacgtgagtcaggttcagaaagtggaaaaattgatcgtgggcaaaaagcctataggctcgcttcatcccggattgggttgcgtgctctcactgcctcataggagactggtctgctactgcaggctgtttgaagtccccgatcctaacaaaccacagaagctggggctgcaccagagggagatttttctatttaatgacctgctggtcgtcactaaaatattccagaagaaaaaaaatagtgttacatatagctttaggcagagctttagcctttatggcatgcaggtgctgctgttcgaaaatcagtattatcctaacgggattcggttaacttcgtccgttcccggggcggacattaaagtgctgatcaatttcaatgcccctaatccacaagaccgaaaaaagttcactgatgacctccgcgaatccatcgccgaggtccaggagatggaaaaacataggatcgagtccgaactcgagaaacagaaaggggtggtcaggccctcaatgtcccagtgcagtagtttgaagaaagagtctgggaacggaactctctcgagggcctgtctcgacgatagttacgcctccggggagggcctgaaaagatcagccctatccagctctctacgagatctttccgaagccggaaaacgcggccgccggtcgagcgctggctcacttgagtctaatgtggaaggctcgattatcagtagcccccatatgaggcgtagggcgacttcaacccgcgaatgtccttctcgaccccatcagaccatgcccaatagctcgtcactcctagggtccctcttcggatccaagcgcggcaagcctcctccccaagcacacttacccagcgcccccgctcttccccccccacacccaccggtggtgctgccccacctgcagcacagcgtcgcagggcaccatctgggcccaccggaaggacttcctcaagctgcaatgcatggccaccacacccagtactgccatatgcagaaccctccgccttaccatcaccatcatcaccaccaccccccacagcatatccagcatgcacatcagtatcaccacggtccccatgggggccacccagcttatggagctcacgctcatggacatccccccttgccctctgcccatgtgggtcacaccgtgcatcaccacggccagcccccagccccaccacccccaactagctcaaaagccaaaccctcgggaattagtactatagtgtag

SEQ ID NO: 49403 - DNA, 3483 bp, Artificial Sequence
  derived and/or modified sequence
atggcctgcagaagacgctactttgtggagggggaggcccccagcagcgagaccggcaccagcctggacagccccagcgcctacccccagggccccctggtgcccggcagcagcctgagcccagaccactatgagcacacctctgtgggcgcctacggcctgtacagcggccccccaggccagcagcagaggacccggcggcccaagctgcagcacagcaccagcatcctgaggaagcaggccgaggaggaggccatcaagaggagccgcagcctgtctgagagctatgagctgagcagtgacctgcaggacaagcaggtggagatgctggagaggaaatatggaggccgcctggtgaccaggcatgctgcccggaccatccagacagccttccggcagtaccagatgaacaagaactttgagcggctgcggagctccatgtctgaaaataggatgagccgccgcatcgtgctgagcaacatgaggatgcagttctcctttgagggccctgagaaggtgcacagcagctactttgagggcaagcaggtgtctgtgaccaatgatggcagccagctgggcgccctggtgtccccagaatgtggggacctgtctgagcccaccaccctgaagagccctgcccccagcagtgactttgctgatgccatcacagagctggaggatgccttcagccggcaggtgaagagcctggccgagagcattgatgatgccctgaactgccgcagcctgcacacagaggaggccccagccctggatgctgcccgggcccgggacacagagccccagacagccctgcacggcatggaccacaggaagctggatgagatgacagccagctacagtgatgtgaccctgtacattgatgaggaggagctgagcccccccctgcccctgagccaggccggggaccggcccagcagcacagaaagtgacctgcggctgcgggccggcggggccgccccagactactgggccctggcccacaaggaggacaaggctgacacagacaccagctgccgcagcacccccagcctggagcggcaggagcagaggctgcgggtggagcacctgcccctgctgaccatcgagccccccagcgacagctctgtggacctgagtgacagaagtgagcggggcagcctgaagaggcagagcgcctatgaaagaagcctgggcggccagcagggcagccccaagcacggcccccacagcggggcccccaagagcctgccccgggaggagcctgagctgcggcccaggcctccccggcccctggacagccacctggccatcaatggcagcgccaaccggcagagcaagtctgagagtgactacagtgatggagacaatgacagcatcaacagcaccagcaacagcaatgacaccatcaactgcagcagcgagagcagcagccgggacagcctgcgggagcagaccctgagcaagcagacctaccacaaggaggccaggaacagctgggacagccctgccttcagcaatgatgtgatcaggaagaggcactaccgcatcggcctgaacctcttcaacaagaagccagagaagggcgtgcagtacctgattgagcggggctttgtgcctgacacccctgtgggcgtggcccacttcctgctgcagaggaagggcctgagccggcagatgattggagagttcctgggcaaccggcagaagcagttcaacagagatgtgctggactgtgtggtggatgagatggacttcagcaccatggagctggatgaggccctgaggaagttccaggcccacatccgggtgcagggcgaggcccagaaggtggagcggctcatcgaggccttcagccagcgctactgcatctgcaaccctggggtggtgcggcagttcagaaatccagacaccatcttcatcctggcctttgccatcatcctgctgaacacagacatgtacagccccaacgtgaagccagagaggaagatgaagctggaggacttcatcaagaacctgcggggcgtggatgatggagaggacatcccccgggagatgctgatgggcatctatgaaagaatcaggaagcgggagctgaagaccaatgaagaccacgtgtcccaggtgcagaaggtggagaagctgattgtgggcaagaagcccatcggcagcctgcaccctggcctgggctgtgtgctgagcctgccccaccggcggctggtgtgctactgccgcctgtttgaggtgcctgaccccaacaagccccagaagctgggcctgcaccagcgggagatcttcctgttcaatgacctgctggtggtgaccaagatcttccagaagaagaagaacagcgtgacctacagcttccggcagagcttcagcctgtatggcatgcaggtgctgctgtttgagaaccagtactacccaaatggcatccggctgaccagctctgtgcctggagctgacatcaaggtgctgatcaacttcaatgcccccaacccccaggacaggaagaagttcacagatgacctgcgggagagcattgctgaggtgcaggagatggagaagcaccgcatcgagagcgagctggagaagcagaagggcgtggtgcggcccagcatgagccagtgcagcagcctgaagaaggagagcggaaatggcaccctgagccgggcctgcctggatgacagctatgccagcggggagggcctgaagaggtctgccctgagcagcagcctgcgggacctgtctgaggccggcaagagaggaagaagaagcagcgctggcagcctggagagcaatgtggagggcagcatcatcagcagcccccacatgagaagaagagccaccagcaccagagaatgtcccagccggccccaccagaccatgcccaacagcagcagcctgctgggcagcctgtttggcagcaagaggggcaagcccccaccccaggcccacctgcccagcgccccagccctggccaccccaccacccaccggcggccctgccagcctggccgccctgtgtggctggcccccacctggggcccccagaggagctgctgctggaagacatgcccgggccagccaccctgtgctgccccatgctgagcccagccctgtgccccccagccccccacctccacccaccccagcccacccagcccggacccctgtgcccccccggcccccctggggcccccccagcctgcggggcccctgcccccggcccccagctgctgccctgggccccaggggggcccacagcgccccaccctgggccgccccctgcccagctgccccccaccagcagcagggccagacccagaggcaccagcacaactgtgtggacagcctgggccggggcccccggctgcctgagaccccagcccaccacacaggccacgcccggggcagccctgctgcccaccagacccggggcacctctgtggccatcagccccctgtgccccagccggcccaactag

SEQ ID NO: 49404 - DNA, 3345 bp, Artificial Sequence
  derived and/or modified sequence
atggcctgcagaagacgctactttgtggagggggaggcccccagcagcgagaccggcaccagcctggacagccccagcgcctacccccagggccccctggtgcccggcagcagcctgagcccagaccactatgagcacacctctgtgggcgcctacggcctgtacagcggccccccaggccagcagcagaggacccggcggcccaagctgcagcacagcaccagcatcctgaggaagcaggccgaggaggaggccatcaagaggagccgcagcctgtctgagagctatgagctgagcagtgacctgcaggacaagcaggtggagatgctggagaggaaatatggaggccgcctggtgaccaggcatgctgcccggaccatccagacagccttccggcagtaccagatgaacaagaactttgagcggctgcggagctccatgtctgaaaataggatgagccgccgcatcgtgctgagcaacatgaggatgcagttctcctttgagggccctgagaaggtgcacagcagctactttgagggcaagcaggtgtctgtgaccaatgatggcagccagctgggcgccctggtgtccccagaatgtggggacctgtctgagcccaccaccctgaagagccctgcccccagcagtgactttgctgatgccatcacagagctggaggatgccttcagccggcaggtgaagagcctggccgagagcattgatgatgccctgaactgccgcagcctgcacacagaggaggccccagccctggatgctgcccgggcccgggacacagagccccagacagccctgcacggcatggaccacaggaagctggatgagatgacagccagctacagtgatgtgaccctgtacattgatgaggaggagctgagcccccccctgcccctgagccaggccggggaccggcccagcagcacagaaagtgacctgcggctgcgggccggcggggccgccccagactactgggccctggcccacaaggaggacaaggctgacacagacaccagctgccgcagcacccccagcctggagcggcaggagcagaggctgcgggtggagcacctgcccctgctgaccatcgagccccccagcgacagctctgtggacctgagtgacagaagtgagcggggcagcctgaagaggcagagcgcctatgaaagaagcctgggcggccagcagggcagccccaagcacggcccccacagcggggcccccaagagcctgccccgggaggagcctgagctgcggcccaggcctccccggcccctggacagccacctggccatcaatggcagcgccaaccggcagagcaagtctgagagtgactacagtgatggagacaatgacagcatcaacagcaccagcaacagcaatgacaccatcaactgcagcagcgagagcagcagccgggacagcctgcgggagcagaccctgagcaagcagacctaccacaaggaggccaggaacagctgggacagccctgccttcagcaatgatgtgatcaggaagaggcactaccgcatcggcctgaacctcttcaacaagaagccagagaagggcgtgcagtacctgattgagcggggctttgtgcctgacacccctgtgggcgtggcccacttcctgctgcagaggaagggcctgagccggcagatgattggagagttcctgggcaaccggcagaagcagttcaacagagatgtgctggactgtgtggtggatgagatggacttcagcaccatggagctggatgaggccctgaggaagttccaggcccacatccgggtgcagggcgaggcccagaaggtggagcggctcatcgaggccttcagccagcgctactgcatctgcaaccctggggtggtgcggcagttcagaaatccagacaccatcttcatcctggcctttgccatcatcctgctgaacacagacatgtacagccccaacgtgaagccagagaggaagatgaagctggaggacttcatcaagaacctgcggggcgtggatgatggagaggacatcccccgggagatgctgatgggcatctatgaaagaatcaggaagcgggagctgaagaccaatgaagaccacgtgtcccaggtgcagaaggtggagaagctgattgtgggcaagaagcccatcggcagcctgcaccctggcctgggctgtgtgctgagcctgccccaccggcggctggtgtgctactgccgcctgtttgaggtgcctgaccccaacaagccccagaagctgggcctgcaccagcgggagatcttcctgttcaatgacctgctggtggtgaccaagatcttccagaagaagaagaacagcgtgacctacagcttccggcagagcttcagcctgtatggcatgcaggtgctgctgtttgagaaccagtactacccaaatggcatccggctgaccagctctgtgcctggagctgacatcaaggtgctgatcaacttcaatgcccccaacccccaggacaggaagaagttcacagatgacctgcgggagagcattgctgaggtgcaggagatggagaagcaccgcatcgagagcgagctggagaagcagaagggcgtggtgcggcccagcatgagccagtgcagcagcctgaagaaggagagcggaaatggcaccctgagccgggcctgcctggatgacagctatgccagcggggagggcctgaagaggtctgccctgagcagcagcctgcgggacctgtctgaggccggcaagagaggaagaagaagcagcgctggcagcctggagagcaatgtggagggcagcatcatcagcagcccccacatgagaagaagagccaccagcaccagagaatgtcccagccggccccaccagaccatgcccaacagcagcagcctgctgggcagcctgtttggcagcaagaggggcaagcccccaccccaggcccacctgcccagcgccccagccctgcccccaccccacccccctgtggtgctgccccacctgcagcacagcgtggccggccaccacctgggccccccagagggcctgccccaggccgccatgcacggccaccacacccagtactgccacatgcagaaccccccaccctaccaccaccaccaccaccaccaccccccccagcacatccagcacgcccaccagtaccaccacggcccccatggaggccacccagcctatggagcccacgcccacggccacccccccctgcccagcgcccacgtgggccacacagtgcaccaccacggccagcccccagcccctcctccacccaccagcagcaaggccaagcccagcggcatcagcaccatcgtgtag

SEQ ID NO: 49405 - DNA, 3483 bp, Artificial Sequence
  derived and/or modified sequence
atggcctgccggcggcggtacttcgtggagggcgaggcccccagcagtgagacaggcacctctctggactcaccctccgcctacccccagggccccctggtgcctgggagctcactgagccccgaccactatgagcacacatctgtcggagcctacggcctctacagcggaccaccaggccagcagcagaggactcggcgtcccaagcttcagcatagtactagtatcctccggaaacaggccgaagaggaagccattaagaggtccaggagcctatcagaatcttacgaactctcaagtgatctgcaggacaaacaggtggagatgctggaacgcaagtacggggggaggctggtgaccaggcacgccgcgagaacaatccagaccgctttccgccagtatcagatgaacaagaactttgaacgtctccgctcttccatgtcagagaaccgcatgtcccggcgcatcgtactaagtaacatgcggatgcaattctccttcgagggaccggagaaagtccatagtagctatttcgagggcaagcaagtatcagtgacgaatgatggctcccagttgggcgctcttgtgtcccctgagtgcggagacctttccgaacctaccactttgaaaagcccagcgccaagttccgactttgcagacgccattacggaattagaagacgccttctcaaggcaggtcaaatcccttgccgaatccattgacgatgccttgaactgtcgctctctacacacagaagaggctcctgctctggacgcagcccgagcccgtgatactgagcctcagaccgcgctgcatggtatggatcatcgtaagctcgatgaaatgactgcctcctatagtgacgtaactctgtacatcgacgaggaggagctcagccccccacttcctctatcccaggccggtgaccggccaagttcaaccgaaagcgacctgcgactgagggctggcggcgcagccccagactattgggcactagcacacaaagaagacaaggccgacacagatacatcttgccgatcaactccttccctcgaaaggcaggagcaacggcttagagtcgagcaccttcctctcctgacaatagaaccaccttcagattcaagtgtggacctcagtgacagaagcgaaaggggttcgctcaagcgccagagcgcgtacgaaagatctctgggaggccagcagggttctcctaaacatggccctcactctggtgccccaaagtcccttccacgcgaagaaccagagctgagacctcggccaccacggcccctggattctcatctggctatcaatggttctgccaatcgacagagtaaatccgaaagcgattacagtgacggtgataacgattccattaatagcaccagcaatagcaatgacactatcaactgctcttccgagtccagctcaagagactctctgagagaacaaactttgagcaagcaaacctaccataaggaggctagaaacagttgggacagtcccgccttttctaacgatgtgatccgtaaacggcattaccgcatcgggctgaacttgttcaataaaaaaccagaaaaaggagttcagtatctcattgagaggggctttgtgccagacacaccagttggcgtcgctcactttcttctccagcgaaaaggcctctcaagacaaatgattggagaattcttaggcaataggcagaaacaatttaatcgggacgtactggactgcgtggtggacgaaatggatttctccacaatggagctcgacgaagcactgcggaagtttcaggcccatattcgcgtccagggtgaggctcagaaagtcgagaggctgatcgaagcctttagccaacgttattgcatttgcaaccccggagtagtcagacagttcagaaaccctgatactatcttcatcctggcctttgctatcatcctgctaaacactgatatgtatagccccaatgtcaaacccgagagaaaaatgaagctcgaagacttcattaagaatcttagaggcgtcgatgatggcgaggacatcccccgagaaatgcttatggggatatatgagagaatacggaagagggagcttaaaactaacgaggaccacgtgtctcaggtgcagaaggtcgagaagctcatcgtcggaaaaaaacctataggctctctgcacccagggctcggttgcgtgctgtctcttccccacaggaggcttgtatgttactgtagactgttcgaggtgcctgatccgaataaaccgcagaagctcggcttgcaccagcgggaaatcttcctattcaatgatctcctggtagtgaccaaaatctttcagaagaaaaagaatagtgttacctatagtttccgacaatcctttagcctttatggtatgcaggttctccttttcgagaaccagtactatccaaatggcatccggcttactagttccgtacccggcgccgatatcaaagttctgattaatttcaacgcccccaacccacaggacagaaaaaagtttaccgacgacctgcgcgagtctatcgcggaagttcaggaaatggaaaaacaccggatagaaagcgagctggagaaacagaagggggtggtgcggccatcgatgtcccaatgcagctctttaaagaaagagtccggaaacggaactctgtcacgggcatgtcttgatgactcatacgcttccggcgaaggcttaaaaaggagcgctctatccagctctcttcgtgatttgtcagaggccggcaaacgtggccggcgctcaagcgccggctctctcgaatcgaacgtggagggctcgattatatcctctccccacatgcgaaggcgcgcaacctcaaccagggaatgcccttctcgccctcatcaaacaatgcctaacagcagctcattgctcgggagtctgtttggctccaagaggggcaagcccccaccacaggcgcatctgccatccgctcctgctttagcaacaccgccaccaacaggtggtccggccagccttgctgccctgtgcggctggcctccgcccggagcccctcggggagccgccgccggcaggcacgcgcgggcatcacacccagtcctgccccacgcagaaccctcacccgttcccccatcaccacctccaccgcccactcctgctcatcccgctagaacacctgtgccccctagaccgccctggggtcctccctctttgcggggcccctgtccacgccctccagctgcggcactggggccccggggagcacattcagcccctccatgggcagccccgtgcccagcagccccccaccaacagcagggtcagacacagagacatcagcataactgcgtcgattcactgggcaggggacctcgtctgccggaaacccccgctcatcatactggacacgcccgaggaagtcctgctgcgcatcaaacccggggaacatcagtggccatcagtccgctgtgtccttcgaggccaaactag

SEQ ID NO: 49406 - DNA, 3345 bp, Artificial Sequence
  derived and/or modified sequence
atggcctgccggcggcggtacttcgtggagggcgaggcccccagctccgaaaccgggacctccctggattcccctagcgcgtatccgcagggtcctctagtgcccggcagctctttatcgcccgaccattatgagcacacttcggtgggggcgtacggcctgtacagtggcccacctggacagcagcagcggaccaggcggcctaagcttcaacatagtaccagcatcctgcggaagcaggcagaggaagaagccatcaagcgcagccgaagtctatcagagtcgtatgaattgagtagtgaccttcaggacaaacaagtggaaatgctggagcggaagtacggaggacggctggtgactaggcacgcagctcgtactatacagaccgccttcaggcaatatcaaatgaacaagaattttgaaaggctgaggagtagcatgtcagagaatagaatgagccggcggatagtgttaagtaatatgcggatgcagttcagctttgaggggccagagaaagtgcatagtagttacttcgaaggcaaacaggttagcgtcactaacgatgggtctcagctcggtgcgctggtgtcgccagaatgcggagacctaagtgagccgacaacattaaagagtcccgcacccagcagcgatttcgctgacgctatcaccgagctggaggacgcgttttcccgacaggtaaagagcctggcggagagtatagacgacgctctcaactgtcggtctcttcataccgaggaggcccccgcactggacgctgccagagctcgggatacagaacctcagacagctctgcatggaatggaccaccggaagctagacgagatgaccgcttcctattcagatgtgaccttgtatattgacgaagaagaactcagccctcctttacctctttcccaggccggtgatcggccttcttctacagaatccgatctccgcctacgtgctggaggtgcagctccagattattgggcgctagcccataaggaagataaggctgacaccgacaccagctgcagatccaccccctctttggaacggcaggagcagaggctaagggtggaacacttaccccttctgaccatcgaaccaccctctgattcttcggtggacttgtccgatagaagtgaacgggggtccctgaagaggcagtctgcctatgagcgatcactgggtggacagcaggggtctccgaaacacggaccccattccggggcacctaagagtttgcccagggaggagcctgagctgaggcctcgaccacctcggcccctcgacagccacctcgctatcaatggctccgctaatcggcagagcaaaagtgagtcagattatagtgacggcgataacgatagtatcaactccacctccaatagcaacgacaccattaattgctccagcgaatctagcagcagggacagtctacgcgagcaaacacttagcaaacagacttaccataaggaggcaagaaatagttgggatagcccagcgtttagtaatgacgtcatcaggaagagacactaccgcattgggctcaatctgtttaataaaaagcccgaaaagggcgtccagtatctgatagaaagaggcttcgtccccgacacccccgtgggggtcgcccatttcctcctgcagcgaaagggtttgtcaaggcagatgatcggagaattcctcgggaatcgccagaaacagttcaacagggatgtactggactgtgtagtggacgaaatggacttctcgaccatggagttggatgaagccctccgcaagtttcaggcccacataagggttcaaggggaagcccagaaggtggaaagactgatcgaggcattctcacaaagatattgcatctgtaacccaggggtggtgcgccaatttcgcaaccccgacaccatatttatcctagccttcgctatcatcctgttgaataccgacatgtacagtcctaacgtcaagcctgagcggaagatgaagctagaggattttattaagaatctccggggcgtagacgacggagaagacatcccacgcgaaatgctgatgggcatttatgaaaggatccggaagagggaactgaagaccaatgaagaccacgttagccaggtccaaaaagtggagaagctgatcgtgggaaagaaacctatagggtcactccaccccggcctgggttgcgtactgtcacttcctcacagaaggctagtgtgttactgtaggctctttgaagtgcctgaccctaataagccacagaagcttggtctccaccagagggagattttcctctttaatgatctgctggtggttaccaaaatcttccagaagaaaaaaaacagcgtgacgtattccttcaggcagtcattcagcctgtacggcatgcaagtcctcctatttgagaaccagtactatcccaatggcatcaggctcacctcctctgtcccaggggctgacatcaaggtcctaattaactttaatgctcctaacccacaggatcggaagaagtttactgatgatcttagagagtctattgcagaggtacaggagatggaaaagcaccgtattgagtccgagttggagaaacagaaaggggttgttcggcccagtatgtctcagtgctcttcccttaagaaggagtcagggaatggaaccctgagccgcgcctgcttagacgatagctacgcaagtggtgaaggccttaagcggtcagccttgagctcctccctccgcgatctaagcgaggctggcaaaagaggacggaggtctagcgcaggttccctggaaagcaatgtggaaggctctattattagtagtccgcacatgagacggagagctactagtactcgtgagtgcccaagccggccacaccagaccatgcctaattcctcctcgctgctgggcagcttgtttggttccaaaagagggaagccaccaccgcaggcacacctgccatccgcccctgcactgccccctccccatccacccgtggtgctgccccatcttcagcactccgtggccggacatcacctgggaccacctgaaggtctgccccaggcagccatgcatgggcaccatacacagtactgccacatgcagaatccacctccttaccatcatcaccatcaccatcaccccccccagcatatacagcatgcacaccaatatcaccacggaccccacggaggccatcctgcctacggggcccacgcccacgggcacccccctctccctagcgctcatgttggacacaccgtgcaccaccacggacagccacccgccccccctccaccaacaagctcgaaggccaagccctccgggataagcaccatcgtgtag

SEQ ID NO: 49407 - DNA, 3483 bp, Artificial Sequence
  derived and/or modified sequence
atggcttgccggaggaggtatttcgtcgagggtgaagctccttcctcagagaccggaacctccctagacagtccgtctgcctaccctcaaggccctctagtgcccggttcttccctgtctcctgatcattatgagcatacctctgtgggagcttatgggctctacagtgggccacccggtcaacaacagcgcactaggagacccaagttgcagcactctacatctatacttcgcaaacaagctgaggaagaggccatcaaacgctctaggagtctcagcgagtcatacgaactgagttctgacttacaagacaagcaggtggagatgctagaaaggaagtatgggggtcgactcgtaacaaggcatgcagctcgaacaatacagacagcatttcgacagtaccagatgaacaagaacttcgaacggctgcgctcctctatgtctgagaacagaatgtcccggcgaattgtgcttagcaacatgaggatgcagttttctttcgagggccctgaaaaagtgcatagctcttactttgaaggtaaacaggtcagtgtaacaaacgatggctcacagctcggcgctttagtgtcgcccgagtgtggggacctctcagagcctaccactctgaagtcacccgcaccctcttcagattttgcagacgcaatcacagagctggaggatgcattcagtcgccaggtgaagtctctggcggagagcattgacgatgctttgaactgccgatccctgcacactgaggaggcgccagcgctggacgcagccagggcccgagatactgaaccgcagaccgccttacacgggatggaccacagaaaacttgatgaaatgacagcgtcatattctgatgtcacgctctacatcgatgaggaggagctttcccctccactgcctctatcccaagctggcgaccgcccatccagcaccgagagtgatctccgactgcgcgcaggaggggcagctcccgactactgggcgttagcgcataaggaagataaggctgatacggacacgagctgcaggtcgactccatctctggagcgccaggaacagcgcttacgggttgaacacctgcctctgctgacaatagagccacccagcgactcaagcgtggacctcagtgatcgatctgagcgcggttctcttaaacgccaaagtgcctacgagagatctctcggcggacagcagggatcccctaagcacggcccacattcaggggcaccaaaaagtctgccacgcgaagagcctgagctgcgccctagaccaccgcgaccgctcgattcgcatctggccattaatggcagtgctaaccgacagagtaagagcgagagtgattattcagacggcgataacgactctatcaactctacctctaactcgaacgataccattaattgttcttccgagtcatcatcgcgagatagccttagagagcagacattatcaaaacagacataccataaggaagcacgtaattcttgggatagtcctgcgttctctaacgatgtgatccgaaagcgccactatcgaatcgggctcaatctatttaacaaaaagcctgagaaaggtgtgcagtacctgatcgagagaggttttgtacctgatactcctgtgggcgtggcccactttctcctgcagagaaaaggcctgtcacgccagatgatcggagagtttttgggcaatcgccagaaacaatttaatcgtgatgtgctcgattgtgtcgtggatgaaatggacttttccacaatggagctggacgaagcgctgagaaagtttcaggcacatatccgcgtgcaaggcgaagcacagaaggtagaaaggcttatagaggcgttttcacagcggtattgcatctgcaatcccggagttgttaggcagttccgtaaccccgacacaatcttcattctggcatttgctattattctgctgaatacagatatgtacagccctaatgtcaaacccgagaggaaaatgaagctggaggattttattaaaaaccttaggggggtcgacgacggagaagatatacctcgtgagatgttgatgggcatctacgaaaggatcaggaaaagagaactgaaaacaaacgaagaccatgtctcccaagttcagaaggtcgagaagctcattgtaggcaagaagccaatcggcagtctgcacccaggcctcggctgtgtgctaagcctcccacacaggagattagtgtgctattgtcgattgttcgaagtgcccgaccctaacaaaccacagaagctgggcctccaccaacgggaaatatttctgttcaacgatctactggtggtaacgaagatctttcagaaaaagaagaactccgtgacatattcattcagacagtccttcagcctgtatgggatgcaagtgctcctgttcgaaaaccagtattatccaaatggcatcaggctcacatcttccgtccccggagcagatatcaaggtccttattaatttcaacgcaccaaaccctcaagacagaaagaagtttactgacgatctgagagaaagcatagccgaagtgcaagaaatggagaaacatcgcatcgaatctgagcttgagaagcaaaagggcgtggtccggccaagcatgtctcagtgctcaagtttgaaaaaggagtccggaaatgggaccctcagcagagcctgtctcgatgattcctatgcctctggtgaggggcttaaaagaagcgccttgtcatcctctttacgggatctgtctgaggccggtaaaagaggcagaagatcttctgccggatcactggagtccaatgtagagggatcaattatcagtagccctcacatgcgaaggagggccacaagtaccagagagtgcccttcgagacctcaccaaaccatgcccaacagctcctctttgctggggagtcttttcggcagtaagcgaggcaaaccaccgcctcaggcacacttgcccagcgccccagccctcgccacccccccacctacagggggaccagctagccttgcagctctgtgtggttggcctccccctggagccccaaggggcgcagccgcaggacgccacgccagagcatctcaccccgtcctgccccatgccgagccaagccccgtgcctccctcaccccctccaccgcctacaccagcccatcccgctaggacaccagtgccgcctaggccaccatggggaccacctagcctgagagggccatgtccgagacctcctgctgcagcgctcggaccacgtggggctcattcagcaccaccctgggcagctccgtgccctgccgcaccccatcagcagcaggggcaaactcaacggcaccagcacaattgtgtggactccctgggcagaggccctcgtctgcccgaaactccggcacaccatacggggcacgctcgcggaagccctgccgcacaccagacgcgcggaaccagtgtggcaatttcacctctgtgtcccagccgccctaattag

SEQ ID NO: 49408 - DNA, 3345 bp, Artificial Sequence
  derived and/or modified sequence
atggcttgccgccgaaggtactttgtcgagggcgaggccccaagctccgagaccgggacttccctggacagcccctctgcataccctcagggacccctggttccagggtcaagcctctccccggatcactacgagcacaccagcgtgggagcctatggtctgtattctgggcctccagggcagcagcagcgcacgagaagaccgaagctccagcattcaaccagtatcctcaggaagcaggcagaggaggaagcaatcaagcgcagtcgcagtttgagcgagtcttatgagctgtctagtgatctccaagataaacaagtggagatgctggagagaaaatacggaggacggctggtcacgcggcatgcagctcgcaccattcaaacagccttcagacagtatcaaatgaataagaatttcgaacgcctgcggagcagtatgtcagagaacaggatgagcagacggatagtcctgagtaatatgaggatgcagttctcttttgagggccctgaaaaggtgcactctagttatttcgaggggaaacaggtttccgtaacgaacgacggaagtcaattaggggctcttgtgtccccggagtgcggcgacctgtcagagcctacgacactaaaaagccccgctccaagcagcgatttcgctgatgccattaccgagcttgaggatgccttttcccgtcaagtgaagtcattggcagagtcaatcgatgacgctctgaattgtaggtcactgcacaccgaagaagcccctgccctggatgcggctcgggctagagacaccgaacctcagaccgctcttcacggaatggatcataggaaactcgatgagatgacagcgagctacagcgacgtcacactgtatattgacgaagaagagctgagccccccactgcccttgtcccaggctggggatcgaccatctagtacagaaagcgatctcagactaagggccggaggcgctgcacctgattactgggctctagctcacaaagaagacaaggcagacactgatacctcttgcaggagtaccccatcactggaaaggcaggagcagcgcctaagggttgagcacttgcccctgctgactattgagccgccaagcgactcttctgtggacctctccgatagatctgaaagaggcagcttgaaaagacaatctgcctacgagagatcactgggaggccagcagggcagtcctaagcacggccctcattcaggggctcctaagagtttgcccagagaagagcccgagttgaggccccgacccccaaggcccctggacagccatcttgccattaacggttccgccaatcgtcagtctaagagtgaatccgattattctgatggcgacaacgatagcattaacagtactagtaatagtaatgatacgattaactgttcctccgaaagtagttcgagagactctcttcgggagcagacgctgtctaaacagacgtatcacaaagaggcccgtaattcttgggattctcccgctttcagcaacgacgtaatcagaaaacgacactaccggatcggactgaacctcttcaataagaagcctgaaaaaggggtacagtatctcatcgaaagaggtttcgtacctgacaccccagttggtgttgcccactttctgctgcagcgcaaaggcctgagccgccaaatgatcggcgaattccttggcaatcggcagaagcaattcaacagggatgtgttggactgtgttgtcgatgaaatggacttttcgacgatggaactggacgaggccctgcggaaattccaggcccacatacgcgtgcaaggagaagcccagaaagtagagcgtctgatagaggcgttctcccagagatattgtatctgtaacccaggagtcgtccgccaatttcgcaaccctgatacaatcttcatcctcgctttcgctatcattctgctgaacaccgacatgtatagtccaaacgtaaagccagagcggaagatgaagttggaggatttcataaagaaccttcggggagttgatgacggtgaggacatccccagggaaatgcttatgggaatttacgaacgcataaggaagcgtgagctgaagactaatgaggatcatgtcagccaggtgcagaaagtagagaagctcatcgtgggcaagaaacccatcgggagccttcaccctgggctcggctgcgtgctcagtttgccccacaggcggctggtttgttactgtcgactttttgaggttcctgatcccaataaaccacagaaattagggctgcaccagagagagatatttctgtttaacgacttgctggtagtgacaaaaatcttccaaaaaaaaaaaaattctgtgacctatagcttccgacagtcattttccctttatggcatgcaggtgttgttgtttgaaaatcaatactaccctaacgggatccgcttaaccagctcagtgcctggggctgacattaaggtgttgatcaactttaatgcacctaatccccaggataggaagaagtttaccgacgatcttcgggaatctatcgcagaagtacaggaaatggaaaagcacaggattgagagtgagttagagaaacagaaaggagtagtacgtccatctatgagccagtgttctagtctgaagaaagagtccggcaacggaactttaagcagagcatgcctcgatgactcttatgcaagtggggaaggcttgaaacgctccgcattgtcatcttctctgcgggacttaagcgaggctgggaagagaggccgacgttcttccgcaggctccctggaatccaatgtggaaggctccattatctcttcccctcacatgagacgaagagccacctcaacccgagagtgccctagccgcccacatcagaccatgcccaactcgtcaagcctgctgggatcgctgtttggtagtaaaagaggtaagccaccccctcaggcgcatttgcctagcgctccggctctgcctccccctcacccaccagtagtcctgccacacttacaacattcggttgctggccaccatcttggcccaccagagggccttccgcaggcggctatgcatgggcaccacactcaatattgtcacatgcagaaccctcctccatatcaccatcaccaccaccatcaccccccacagcatattcaacatgcccatcagtaccatcacgggccacatggaggacacccggcatacggcgctcacgcacacgggcacccccctttaccttccgcccatgtgggccataccgtgcaccatcacggtcagcctcctgccccaccccctccaaccagtagcaaagcaaagccttcgggtatctcgacaatagtttag

SEQ ID NO: 49409 - DNA, 3583 bp, Artificial Sequence
  derived and/or modified sequence
attcccctccacttcttgcctgagccgcctgctcctcttggaaacacgttgagcctccccgctggagagggagccagaacagggaagaacggattcacacaggatggcttgcagaagacgctatttcgtcgagggcgaggcccccagcagtgagactggcacatccctggacagcccctcagcctacccccagggccccttggtgcccggttccagcctgagcccggatcactacgagcacacgtcagtgggagcctatgggctgtactcggggccgccggggcaacagcagcgcacgcggaggcccaagctgcagcactcgacctccatcctgcgcaagcaggctgaggaggaggccatcaagcgctcacgctcactctccgagagctatgagctctcctcggacctgcaggacaagcaggtggagatgctagaacgaaagtatggggggcgcctggtaacccgccatgcggcccgcaccatccagacggcgtttcgccagtaccagatgaacaagaacttcgagcgcttgcgcagctccatgtcagagaaccgcatgtcacgccggattgtgctgtccaacatgaggatgcagttctcctttgaggggcctgagaaagtgcacagctcctacttcgaggggaagcaggtctcagtgactaacgacggctcccagctgggagccctggtgtcccctgagtgtggtgacctcagcgagcccaccaccctcaagtctccggccccctccagtgactttgcggacgccatcaccgagctggaggacgccttctctaggcaagtgaaatcactggccgagtccatcgacgatgccctcaactgccgcagcctgcacactgaggaggcaccggccctggatgcggcgcgggcccgggacaccgaaccccagacagccctgcacggcatggaccaccgcaaactggacgagatgacggcctcgtacagtgatgtcaccctgtacatcgatgaggaggagctgtcgccccctctgcccctctcgcaggcaggggaccggccgtccagcaccgagtcggacctgcggctacgggctgggggcgcagccccagactactgggccctggcccacaaagaggacaaggctgacacggacacgagctgccggagcacgccgtcgctggagcggcaggagcagcggctgcgggtggagcatctgccgctgctcaccatcgagccacccagcgacagctctgtggaccttagtgaccgctcggagcgggggtcactcaagaggcagagtgcttacgagcgcagccttggcgggcagcagggcagtcccaagcatggtccccacagcggcgcccccaagagcctcccccgggaggagcctgagttgcggccccggccccccaggcccctggacagccacttggccatcaatggctcagccaaccggcagagcaagtctgagtcggactactcagacggtgacaatgacagcatcaacagcacgtccaactccaacgataccatcaactgcagctccgagtcatcgtcccgtgacagcctgcgggagcagacgctcagcaagcagacctaccacaaggaggcccgcaacagctgggactcgcctgcctttagcaacgatgtcatccgcaagaggcactaccgcatcggcctgaacctcttcaacaagaagcctgagaagggagtccagtacctcatcgagcgtggctttgtgcccgacacgcccgtcggggtggcccacttcctgctgcagcgcaagggcctcagccggcagatgatcggcgagttcctgggcaaccggcagaagcagttcaaccgtgacgtgctcgactgcgtcgtggacgagatggacttctctaccatggagctggatgaggccctcaggaaattccaggcgcacatccgtgtccaaggggaggctcagaaagtggagcggctcatagaggcgttcagccagcgctactgcatctgcaaccctggggtggtgcggcaattccggaacccagacaccattttcatcctggccttcgccatcatcctgctgaacaccgacatgtacagccccaatgtcaagcccgagcggaaaatgaagctagaggacttcatcaagaacctccgaggtgtggacgatggtgaggacattccccgtgagatgctgatggggatctatgaacggatccgtaagcgagagctaaagaccaatgaggaccatgtgtcccaggtgcagaaggtggagaagctcattgtggggaaaaagccgatcggatccctgcatcccgggctcggctgtgtgctctctctgccccaccgtcggttggtctgctactgccggctctttgaggttccagacccaaacaagccccagaaactcggactacaccagcgagaaatcttcctgttcaacgacctcctggtggtcaccaagatcttccagaagaagaagaactcggtgacgtacagcttccgacagtccttctccttgtacggcatgcaggtcctgctcttcgagaaccagtactaccccaatggcatccggctcacctcgtctgtccccggagcagatatcaaagtgttaataaacttcaacgcccccaaccctcaagaccggaagaaattcaccgatgacctgcgggagtccattgcggaagtccaagagatggagaagcacaggatagagtcggagctcgagaagcagaaaggcgtcgtgcggcccagcatgtcccagtgctctagcctcaaaaaggagtcgggcaacggaacactgagccgggcctgcctggacgacagctatgccagcggtgagggcctcaagcgcagcgccctcagcagctccctgcgggacctctcggaagccgggaagcgagggcgtcgcagcagtgcgggatcgctagagagcaatgtggaagggtccatcattagcagtcctcacatgcgccggagagctacatcaacacgagagtgtccatctcgcccacaccagactatgcccaactcatcttccctcctgggctccttattcgggagcaagagagggaagccccctccccaggcccacctgccctcagccccagccctggccacccccccacccaccggtggtcctgcctcacttgcagcactctgtggctggccaccacctggggcccccagaggggctgccgcaggccgccatgcacgggcatcacacccagtactgccacatgcagaaccctcccccgtaccaccatcaccaccaccaccacccaccccagcacatccagcacgcacaccagtaccaccacggcccccatgggggccacccagcctacggggcccatgcccacggccacccgccgctgccctcggcccacgtggggcacacagtgcaccaccatgggcagccccctgccccgccgccccccaccagcagcaaggccaaacccagcggcatcagcacaattgtgtagacagcctgggtaggggtcccaggctccctgaaacacctgcacaccacacagggcacgcccgggggtcgccagccgcacaccaaacccggggcacttctgttgccatctctcccctctgcccctcacggcccaac

SEQ ID NO: 49410 - DNA, 7211 bp, Artificial Sequence
  derived and/or modified sequence
attcccctccacttcttgcctgagccgcctgctcctcttggaaacacgttgagcctccccgctggagagggagccagaacagggaagaacggattcacacaggatggcttgcagaagacgctatttcgtcgagggcgaggcccccagcagtgagactggcacatccctggacagcccctcagcctacccccagggccccttggtgcccggttccagcctgagcccggatcactacgagcacacgtcagtgggagcctatgggctgtactcggggccgccggggcaacagcagcgcacgcggaggcccaagctgcagcactcgacctccatcctgcgcaagcaggctgaggaggaggccatcaagcgctcacgctcactctccgagagctatgagctctcctcggacctgcaggacaagcaggtggagatgctagaacgaaagtatggggggcgcctggtaacccgccatgcggcccgcaccatccagacggcgtttcgccagtaccagatgaacaagaacttcgagcgcttgcgcagctccatgtcagagaaccgcatgtcacgccggattgtgctgtccaacatgaggatgcagttctcctttgaggggcctgagaaagtgcacagctcctacttcgaggggaagcaggtctcagtgactaacgacggctcccagctgggagccctggtgtcccctgagtgtggtgacctcagcgagcccaccaccctcaagtctccggccccctccagtgactttgcggacgccatcaccgagctggaggacgccttctctaggcaagtgaaatcactggccgagtccatcgacgatgccctcaactgccgcagcctgcacactgaggaggcaccggccctggatgcggcgcgggcccgggacaccgaaccccagacagccctgcacggcatggaccaccgcaaactggacgagatgacggcctcgtacagtgatgtcaccctgtacatcgatgaggaggagctgtcgccccctctgcccctctcgcaggcaggggaccggccgtccagcaccgagtcggacctgcggctacgggctgggggcgcagccccagactactgggccctggcccacaaagaggacaaggctgacacggacacgagctgccggagcacgccgtcgctggagcggcaggagcagcggctgcgggtggagcatctgccgctgctcaccatcgagccacccagcgacagctctgtggaccttagtgaccgctcggagcgggggtcactcaagaggcagagtgcttacgagcgcagccttggcgggcagcagggcagtcccaagcatggtccccacagcggcgcccccaagagcctcccccgggaggagcctgagttgcggccccggccccccaggcccctggacagccacttggccatcaatggctcagccaaccggcagagcaagtctgagtcggactactcagacggtgacaatgacagcatcaacagcacgtccaactccaacgataccatcaactgcagctccgagtcatcgtcccgtgacagcctgcgggagcagacgctcagcaagcagacctaccacaaggaggcccgcaacagctgggactcgcctgcctttagcaacgatgtcatccgcaagaggcactaccgcatcggcctgaacctcttcaacaagaagcctgagaagggagtccagtacctcatcgagcgtggctttgtgcccgacacgcccgtcggggtggcccacttcctgctgcagcgcaagggcctcagccggcagatgatcggcgagttcctgggcaaccggcagaagcagttcaaccgtgacgtgctcgactgcgtcgtggacgagatggacttctctaccatggagctggatgaggccctcaggaaattccaggcgcacatccgtgtccaaggggaggctcagaaagtggagcggctcatagaggcgttcagccagcgctactgcatctgcaaccctggggtggtgcggcaattccggaacccagacaccattttcatcctggccttcgccatcatcctgctgaacaccgacatgtacagccccaatgtcaagcccgagcggaaaatgaagctagaggacttcatcaagaacctccgaggtgtggacgatggtgaggacattccccgtgagatgctgatggggatctatgaacggatccgtaagcgagagctaaagaccaatgaggaccatgtgtcccaggtgcagaaggtggagaagctcattgtggggaaaaagccgatcggatccctgcatcccgggctcggctgtgtgctctctctgccccaccgtcggttggtctgctactgccggctctttgaggttccagacccaaacaagccccagaaactcggactacaccagcgagaaatcttcctgttcaacgacctcctggtggtcaccaagatcttccagaagaagaagaactcggtgacgtacagcttccgacagtccttctccttgtacggcatgcaggtcctgctcttcgagaaccagtactaccccaatggcatccggctcacctcgtctgtccccggagcagatatcaaagtgttaataaacttcaacgcccccaaccctcaagaccggaagaaattcaccgatgacctgcgggagtccattgcggaagtccaagagatggagaagcacaggatagagtcggagctcgagaagcagaaaggcgtcgtgcggcccagcatgtcccagtgctctagcctcaaaaaggagtcgggcaacggaacactgagccgggcctgcctggacgacagctatgccagcggtgagggcctcaagcgcagcgccctcagcagctccctgcgggacctctcggaagccgggaagcgagggcgtcgcagcagtgcgggatcgctagagagcaatgtggaagggtccatcattagcagtcctcacatgcgccggagagctacatcaacacgagagtgtccatctcgcccacaccagactatgcccaactcatcttccctcctgggctccttattcgggagcaagagagggaagccccctccccaggcccacctgccctcagccccagccctgccacccccccacccaccggtggtcctgcctcacttgcagcactctgtggctggccaccacctggggcccccagaggggctgccgcaggccgccatgcacgggcatcacacccagtactgccacatgcagaaccctcccccgtaccaccatcaccaccaccaccacccaccccagcacatccagcacgcacaccagtaccaccacggcccccatgggggccacccagcctacggggcccatgcccacggccacccgccgctgccctcggcccacgtggggcacacagtgcaccaccatgggcagccccctgccccgccgccccccaccagcagcaaggccaaacccagcggcatcagcacaattgtgtagacagcctgggtaggggtcccaggctccctgaaacacctgcacaccacacagggcacgcccgggggtcgccagccgcacaccaaacccggggcacttctgttgccatctctcccctctgcccctcacggcccaaccggagccccaggagcccacagggctggtgttgtgtggaacaaaggcccagatttcatttcttgttggcaccctgggctctgctcacctcagtctgagggatgggtgggcctcagacaccatcagccttgaaacggtgagccagccaagtagtgttgaactgcctcccccactccagctctcagctccctgtgccctaatgtacatgcatatgaaaacccaacctagaaaacgaagaaatgagatacaaaaacagacaaaacaaaccccaaaacttgctgcattattgctcttttattgacaatgggcaaaaaaataagtagacctgatatggttgatgaaaatacgtaagtaaactttatataaatatataaatatataaatatatatatatatatactgtataggtagtacttgtgtgtgaaaggcaggcgtttcagtccacattagcaatacccaccttacaaggagctccacttacctaataggaagacagtaccttagctgggtgtgtgagacaatagaccaaaccctaaatgctaggaacaaattcagatacttcatattttcatacaaagaagtccctctaggactggctaaaatctttacacaatcattactaactgtgccaagtaacatagcatctaactgtttaaaaagtccagtattgctttgtataaatccttattttattaacagaatactatcataaatagtattataatgctgttatttcaggtaagcaaatagctaaactgcagtacactctacagtagcaactcaggacagctggttacaagctggttgtcttaggacattggttacacggattcttagacactttaatggctgcgataactgtgactctccatgatccatgtttcttttatgcgcatatgatttgacgcacactcattcagagtcctccgagaggggcacccatacacggcagaagtgttcatctccaacatgaaagtgaccagctctcatcctcgtctccccaacaccataacgtcctcatcccgcctccaacccacaccaggccgaagccctcagagagtgttttcatcaggaaccactctcgaacctgaaggttgactttagcgtttagcaacccagggcggtgtgtgtgtttcccgttttgttttctgagtggtagcagtgatcaccgtaattccatgtagccatgtgctagcagaacccctgtgtcctcaccgtggcccgtgtgaccccagccgacgagtgcccggcggagcccccgctgccttcccatggtccagtgagctgccagggcatcacatgactctcagctgtgctcttgtcgcttctgtgttgtggtgacaccatgcgctccccagggccagacctgcacgcggcaggtctgtgcccgagtcacccacgggccatactttgtagtttcagcctttcgagccactgcagccgtcagtgctgtgctcctaagccatgggacccgaggactgccccccggcgcctgcccaggcggaggccctttcagaaagggcgaagctcacgcctgactctgcgggccgcggggccgcgttcccagtggacagcgtggtgagccgtggccggacggcaggaggagaggggagccccctctggctgtgtgtcaccttggctggctggctggccagggttttgccgatttccctcctcacatccctcccaccctcggtcatatcattgagatcaccgtaccagcaaatctgcaaaccaagcactttgttaatctccagagagagcaaatacagcaatctagagtttagcctttttaaaaatgtgactttaacccgcccacctgtgtcctcccattggcgtggcatttctttggtgtctgctcagaaagaaacagcatgggaccgtgtgattgggtccaggctgggctgtcagggaagcgccctggtgtctccgactcatcaattctcgggtcttttttaaaagccaggctccccaaagcactctgtctcgcaattttgaggaggctgttccgacctggaagcgttaaactgctgcatgtcatctggcgtcagctgtgaggctgcgctctgcgtgttgtgcgtttgcaaaatgtattggcgtgactgtaaacacatcgttgaagtaaagcgattacatattgagtatgtcagcttttctcaccctcttctgtgctgggaggagagtctaactgtaacctttaggttgttccagaaaagattcaggccgtttggcacagaattgctctttctgaagggtagcagtaatgaataggaacagacagaaaaccccaggaggggctttcaggaaactctccctctccatcgccatcctgcaagctccacagcctcgggctgccagcctgtggcactgtcctcggtgtgtcctggagctgtgctgggcagcagggcctcgcgtaaggaactgctggaacccactgagcccttcccggggtttcccgccgcactcagtgtgttccttcaggctagtgaggtttcattctgttttatttgcaagcttatcaaaagtttgtggaagatacattgttgggttccagaggctggagtcatgctgcccacatcttgtttgggaaagcaaaagctcccagtgagctggtgtccccgtgtgtctttcatgggactgtcccctttagagatcccacctgtcagagccacagcttcggggtcctgtcatcacatcccctgggaggggaggcaggaggaggccgagggccccaggatgtctgcctggtcccttctcactgtgaggacgcccttggcacacctttctcaagtcacacaaattactgcagttacatacagaattgctgacaggagcaggagacgctgagggaaacagctggcaatgtgacaaaagtcttttctgggacaacaatcaaatcatgtatttgtatttttttaagtttaccaatgaattgtacaacaatgtaaaaataaagttcatcctaatatgctgtgcacatcttgcttaaaaatgtcttcagcacccagtgcagtgatctttccctcacacactgcatgcagcaggagcctcttgtttttcttaatgagctgaaaagacagcagatgttcacagctgatgctgggtgttgactcagcgccacgggaagctctgtgcccgcaggtaagcacgcacagtcttacagttctccttgtaaaatatcatcacccttcctgcctgagaaacgagtacatttgtattttatgtaacaacaatagtcaaggcagcattgcaacactgagcagggtgaggtgggggtgctgagcacaggacaagagggaggaggcctgccctccattcagatgcatctgcatcgcccttctgtgtgcagtcacatcgagactgcacacagcatgcatctcctcttggaaaatatcttttgcctccgagttgttttaagcaattagaatcaggtcctgaatccccagactgttcagagacttcaagggacacctccctcacaagaagcctggcacccccactgtgtacctttgagaggaaaggagtgcgtttgttttcatctgcattctgtttgtcagtggcaacagactctatcaatgtaaaaccatggttgtgatcatgtggggaaatcaaataaatcctttgaaactct

SEQ ID NO: 49411 - protein, 878 aa, Artificial Sequence
  derived and/or modified sequence
MEQWRQCGRWLIDCKVLPPNHRVVWPSAVVFDLAQALRDGVLLCQLLHNLSPGSIDLKDINFRPQMSQFLCLKNIRTFLKVCHDKFGLRNSELFDPFDLFDVRDFGKVISAVSRLSLHSIAQNKGIRPFPSEETTENDDDVYRSLEELADEHDLGEDIYDCVPCEDGGDDIYEDIIKVEVQQPMIRYMQKMGMTEDDKRNCCLLEIQETEAKYYRTLEDIEKNYMSPLRLVLSPADMAAVFINLEDLIKVHHSFLRAIDVSVMVGGSTLAKVFLDFKERLLIYGEYCSHMEHAQNTLNQLLASREDFRQKVEECTLKVQDGKFKLQDLLVVPMQRVLKYHLLLKELLSHSAERPERQQLKEALEAMQDLAMYINEVKRDKETLRKISEFQSSIENLQVKLEEFGRPKIDGELKVRSIVNHTKQDRYLFLFDKVVIVCKRKGYSYELKEIIELLFHKMTDDPMNNKDVKKSHGKMWSYGFYLIHLQGKQGFQFFCKTEDMKRKWMEQFEMAMSNIKPDKANANHHSFQMYTFDKTTNCKACKMFLRGTFYQGYMCTKCGVGAHKECLEVIPPCKFTSPADLDASGAGPGPKMVAMQNYHGNPAPPGKPVLTFQTGDVLELLRGDPESPWWEGRLVQTRKSGYFPSSSVKPCPVDGRPPISRPPSREIDYTAYPWFAGNMERQQTDNLLKSHASGTYLIRERPAEAERFAISIKFNDEVKHIKVVEKDNWIHITEAKKFDSLLELVEYYQCHSLKESFKQLDTTLKYPYKSRERSASRASSRSPASCASYNFSFLSPQGLSFASQGPSAPFWSVFTPRVIGTAVARYNFAARDMRELSLREGDVVRIYSRIGGDQGWWKGETNGRIGWFPSTYVEEEGIQ

SEQ ID NO: 49412 - DNA, 2637 bp, Artificial Sequence
  derived and/or modified sequence
atggagcagtggagacagtgcggcagatggctgatcgactgcaaggtgctgccccccaaccacagagtggtgtggcccagcgccgtggtgttcgacctggcccaggccctgagagacggcgtgctgctgtgccagctgctgcacaacctgagccccggcagcatcgacctgaaggacatcaacttcagaccccagatgagccagttcctgtgcctgaagaacatcagaaccttcctgaaggtgtgccacgacaagttcggcctgagaaacagcgagctgttcgaccccttcgacctgttcgacgtgagagacttcggcaaggtgatcagcgccgtgagcagactgagcctgcacagcatcgcccagaacaagggcatcagacccttccccagcgaggagaccaccgagaacgacgacgacgtgtacagaagcctggaggagctggccgacgagcacgacctgggcgaggacatctacgactgcgtgccctgcgaggacggcggcgacgacatctacgaggacatcatcaaggtggaggtgcagcagcccatgatcagatacatgcagaagatgggcatgaccgaggacgacaagagaaactgctgcctgctggagatccaggagaccgaggccaagtactacagaaccctggaggacatcgagaagaactacatgagccccctgagactggtgctgagccccgccgacatggccgccgtgttcatcaacctggaggacctgatcaaggtgcaccacagcttcctgagagccatcgacgtgagcgtgatggtgggcggcagcaccctggccaaggtgttcctggacttcaaggagagactgctgatctacggcgagtactgcagccacatggagcacgcccagaacaccctgaaccagctgctggccagcagagaggacttcagacagaaggtggaggagtgcaccctgaaggtgcaggacggcaagttcaagctgcaggacctgctggtggtgcccatgcagagagtgctgaagtaccacctgctgctgaaggagctgctgagccacagcgccgagagacccgagagacagcagctgaaggaggccctggaggccatgcaggacctggccatgtacatcaacgaggtgaagagagacaaggagaccctgagaaagatcagcgagttccagagcagcatcgagaacctgcaggtgaagctggaggagttcggcagacccaagatcgacggcgagctgaaggtgagaagcatcgtgaaccacaccaagcaggacagatacctgttcctgttcgacaaggtggtgatcgtgtgcaagagaaagggctacagctacgagctgaaggagatcatcgagctgctgttccacaagatgaccgacgaccccatgaacaacaaggacgtgaagaagagccacggcaagatgtggagctacggcttctacctgatccacctgcagggcaagcagggcttccagttcttctgcaagaccgaggacatgaagagaaagtggatggagcagttcgagatggccatgagcaacatcaagcccgacaaggccaacgccaaccaccacagcttccagatgtacaccttcgacaagaccaccaactgcaaggcctgcaagatgttcctgagaggcaccttctaccagggctacatgtgcaccaagtgcggcgtgggcgcccacaaggagtgcctggaggtgatccccccctgcaagttcaccagccccgccgacctggacgccagcggcgccggccccggccccaagatggtggccatgcagaactaccacggcaaccccgccccccccggcaagcccgtgctgaccttccagaccggcgacgtgctggagctgctgagaggcgaccccgagagcccctggtgggagggcagactggtgcagaccagaaagagcggctacttccccagcagcagcgtgaagccctgccccgtggacggcagaccccccatcagcagaccccccagcagagagatcgactacaccgcctacccctggttcgccggcaacatggagagacagcagaccgacaacctgctgaagagccacgccagcggcacctacctgatcagagagagacccgccgaggccgagagattcgccatcagcatcaagttcaacgacgaggtgaagcacatcaaggtggtggagaaggacaactggatccacatcaccgaggccaagaagttcgacagcctgctggagctggtggagtactaccagtgccacagcctgaaggagagcttcaagcagctggacaccaccctgaagtacccctacaagagcagagagagaagcgccagcagagccagcagcagaagccccgccagctgcgccagctacaacttcagcttcctgagcccccagggcctgagcttcgccagccagggccccagcgcccccttctggagcgtgttcacccccagagtgatcggcaccgccgtggccagatacaacttcgccgccagagacatgagagagctgagcctgagagagggcgacgtggtgagaatctacagcagaatcggcggcgaccagggctggtggaagggcgagaccaacggcagaatcggctggttccccagcacctacgtggaggaggagggcatccagtag

SEQ ID NO: 49413 - DNA, 2637 bp, Artificial Sequence
  derived and/or modified sequence
atggaacaatggaggcagtgcggacggtggctgattgactgtaaggtcctcccaccgaatcatcgggtggtttggccttctgcagtcgtgtttgacttggcacaggccctgagagacggagtccttctgtgccagctacttcataacttgtctcctgggtccattgaccttaaggatataaactttagaccacaaatgagtcagtttttatgtctgaagaacatccgcacgtttctgaaggtatgccacgataagtttggccttcgaaactcagagctgttcgatccatttgatctattcgatgtgcgggatttcggaaaggttatttctgctgtgtcccggctgtcgctccatagcattgcccaaaacaaaggaatccgtcccttcccttccgaggaaaccaccgaaaatgacgatgacgtgtatcgaagtttagaggaactggctgacgaacatgacctgggtgaggatatctatgactgcgttccatgcgaggatggcggcgacgatatctacgaggatatcatcaaggttgaggtgcaacagcctatgattcggtatatgcagaaaatgggcatgactgaggacgacaagaggaattgttgcctccttgaaattcaagagaccgaggcaaagtattataggacactcgaggacatcgaaaaaaattatatgtctcctctgaggctggtgttatcgcccgcagacatggccgcagtgtttattaaccttgaagacctaattaaggtgcaccacagctttttacgggcaattgacgtgtccgtgatggtggggggatctacattggcgaaggtcttccttgacttcaaggaaaggttgctgatttatggtgaatactgcagccacatggaacacgcccagaataccctgaatcaacttctggcctcccgggaggattttcgacagaaggtggaggagtgcaccctgaaagttcaggatggaaaatttaagctgcaggatctgctcgtggtacccatgcagagggtccttaagtaccatctgctgctcaaagaactgctgtcacattcagccgaaaggccagaaagacagcaactaaaggaagcgcttgaggcaatgcaggacctcgctatgtatatcaacgaggtgaaacgagacaaagaaacactgcggaagatctcggagttccagtctagtattgagaatctccaggtgaagctggaggagttcggcagaccaaaaatagacggggagctgaaggtgcggagtatcgttaaccacacaaaacaggaccgttacttgttcctcttcgacaaggtagtgatcgtctgtaaaaggaaggggtattcatacgaactcaaggaaatcattgagcttctctttcacaagatgactgacgatccaatgaacaataaagacgtcaagaagtcccacggcaaaatgtggtcttacgggttttatctcatacacctgcagggaaaacaaggcttccagtttttttgcaaaactgaagatatgaagcgcaagtggatggagcagttcgagatggctatgtctaacattaaacctgataaggccaacgctaatcaccactccttccagatgtacacgttcgataaaacgacgaattgcaaggcgtgtaagatgtttctgcgcggcactttttaccaaggctacatgtgtaccaaatgcggagtcggtgcacacaaagaatgcctggaagtaattcctccctgcaaatttacttctccagcggacctggatgcatcaggtgccggcccaggaccaaagatggttgcaatgcagaattaccatggaaatcccgcccccccaggcaaacccgtgctaacctttcagactggcgatgtcctggaactgctgcgcggcgatccggagtcgccatggtgggagggtagactggtgcaaacacgaaaaagcggatatttccccagttcctctgtgaagccttgtcccgtggacggcagaccccctatctccagaccgccatccagggagatagactatacagcctatccgtggtttgcgggcaatatggaacgacagcaaaccgacaatctgctcaagtcacatgcatccggaacatatctgatcagggaaagaccagccgaagccgaaaggtttgcaatatcaatcaagtttaacgatgaggtgaagcacatcaaggtggtggaaaaggataactggattcacattaccgaggcgaagaagtttgactcattgttagagctggttgagtactatcaatgccatagcctgaaagagagcttcaagcagctggacaccaccttaaaatatccttataaatcacgcgagcgaagcgccagccgggcctccagtagaagcccagctagttgcgccagctataatttctcttttctctccccccagggactttcatttgcaagtcagggacccagcgcacctttctggagtgtcttcacaccacgtgtgattggcacagcggttgcaaggtataacttcgccgctcgtgacatgagagaactatctctccgagagggggatgtcgtgagaatctactctaggataggcggggaccagggatggtggaagggtgaaacgaatggccgcattggctggtttccctcaacatatgtggaggaggaagggattcagtag

SEQ ID NO: 49414 - DNA, 2637 bp, Artificial Sequence
  derived and/or modified sequence
atggagcagtggaggcagtgtggccgctggctgattgactgcaaggtgctgccccccaaccaccgggtggtgtggcccagcgctgtggtgtttgacctggcccaggccctgagagatggagtgctgctgtgccagctgctgcacaacctgagccctggcagcattgacctgaaggacatcaacttccggccccagatgagccagttcctgtgcctgaagaacatccgcaccttcctgaaggtgtgccacgacaagtttggcctgagaaattctgagctgtttgacccctttgacctgtttgatgtgcgggactttgggaaggtgatctctgctgtgtcccggctgagcctgcacagcatcgcccagaacaagggcatccggcccttccccagcgaggagaccacagaaaatgatgatgatgtgtaccgcagcctggaggagctggctgatgaacatgacctgggggaggacatctatgactgtgtgccctgtgaagatggaggagatgacatctatgaggacatcatcaaggtggaggtgcagcagcccatgatccgctacatgcagaagatgggcatgacagaagatgacaagaggaactgctgcctgctggagatccaggagacagaggccaagtactaccgcaccctggaggacatcgagaagaactacatgagccccctgcggctggtgctgagccctgctgacatggctgctgtgttcatcaacctggaggacctgatcaaggtgcaccacagcttcctgcgggccattgatgtgtctgtgatggtgggcggcagcaccctggccaaggtgttcctggacttcaaggagcggctgctgatctatggagagtactgcagccacatggagcacgcccagaacaccctgaaccagctgctggccagccgggaggacttccggcagaaggtggaggagtgcaccctgaaggtgcaggacggcaagttcaagctgcaggacctgctggtggtgcccatgcagagggtgctgaagtaccacctgctgctgaaggagctgctgagccacagcgctgagaggcctgagcggcagcagctgaaggaggccctggaggccatgcaggacctggccatgtacatcaatgaggtgaagagggacaaggagaccctgaggaagatcagcgagttccagagcagcattgagaacctgcaggtgaagctggaggagtttggccggcccaagattgatggagagctgaaggtgcgcagcatcgtgaaccacaccaagcaggaccgctacctgttcctgtttgacaaggtggtgattgtgtgcaagaggaagggctacagctatgagctgaaggagatcatcgagctgctcttccacaagatgacagatgaccccatgaacaacaaggatgtgaagaagagccacggcaagatgtggagctatggcttctacctgatccacctgcagggcaagcagggcttccagttcttctgcaagacagaggacatgaagaggaagtggatggagcagtttgagatggccatgagcaacatcaagccagacaaggccaatgccaaccaccacagcttccagatgtacacctttgacaagaccaccaactgcaaggcctgcaagatgttcctgcggggcaccttctaccagggctacatgtgcaccaagtgtggggtgggcgcccacaaggagtgcctggaggtgatccccccctgcaagttcaccagccctgctgacctggatgccagcggggccggccctggccccaagatggtggccatgcagaactaccacggcaacccagcccctcctgggaagcctgtgctgaccttccagacaggagatgtgctggagctgctgcggggggaccctgagagcccctggtgggagggccgcctggtgcagaccaggaagagcggctacttccccagcagctctgtgaagccctgccctgtggatggccggccccccatcagcaggcctcccagccgggagattgactacacagcctacccctggtttgctggcaacatggagcggcagcagacagacaacctgctgaagagccacgccagcggcacctacctgatccgggagaggcctgctgaggccgagagatttgccatcagcatcaagttcaatgatgaggtgaagcacatcaaggtggtggagaaggacaactggatccacatcacagaggccaagaagtttgacagcctgctggagctggtggagtactaccagtgccacagcctgaaggagagcttcaagcagctggacaccaccctgaagtacccctacaagagccgggagaggtctgccagccgggccagcagccgcagccctgccagctgtgccagctacaacttctccttcctgagcccccagggcctgagctttgccagccagggccccagcgcccccttctggagcgtcttcacccccagggtcatcggcacagctgtggcccgctacaactttgctgcccgggacatgagggagctgagcctgcgggagggagatgtggtgcgcatctacagcagaattggaggagaccagggctggtggaagggggagaccaacggccgcatcggctggttccccagcacctacgtggaggaggagggcatccagtag

SEQ ID NO: 49415 - DNA, 2637 bp, Artificial Sequence
  derived and/or modified sequence
atggagcagtggcggcagtgcggccggtggctgatcgactgcaaggtgttaccccctaaccatcgtgtggtgtggccctctgctgtggtgttcgacttggcccaggccttacgggatggggtgcttctgtgccaattattgcacaacctgagtcctggatctattgatctgaaagatatcaattttaggccccagatgagccagtttctttgcctgaagaatatacggacttttctgaaagtgtgtcacgacaaatttggactcagaaattccgaactgttcgatccgttcgacctttttgatgtgcgagatttcggcaaggtcatatccgctgtctcacgattgtccctccactctatcgcacaaaacaaagggattcggccatttccgtctgaggaaaccaccgagaacgatgacgatgtgtaccgctccctggaggagctggcagacgagcacgacctgggcgaggatatatacgactgtgtgccctgcgaagatggcggggatgacatatacgaggacatcatcaaggttgaggttcagcagcccatgatccgctatatgcagaaaatggggatgacggaagacgataaacggaattgttgcctgctcgaaattcaggagaccgaagccaagtactatcgtacactggaggatatcgagaaaaactacatgagtcctcttcgattagtactgtcacctgccgatatggccgcagtctttattaacctcgaggatttaattaaggtgcaccactccttcctccgggctattgacgtctcagtcatggttggagggtccaccctagcaaaagtgttcttagattttaaagaaaggttgctgatctacggtgagtattgcagccacatggaacatgcacagaacacgttgaatcagctcctggccagtcgtgaagatttccggcagaaggtcgaagagtgtacccttaaggtgcaggacggtaaatttaagctacaggatctgctagtcgtcccaatgcaacgcgtgcttaagtatcacttgctgctcaaagaactccttagccattctgccgagaggccagagcgtcagcaattgaaagaggctctcgaagcaatgcaggacttagctatgtacatcaacgaagtgaagagggacaaggaaacactgcgaaagatttcggaatttcagtcctccatcgagaacctgcaggtgaaactcgaagaattcggtcgccctaaaatagatggcgagctgaaggttaggtcaattgtcaaccacacaaaacaggatagatatctcttcctttttgacaaagtggtgattgtgtgtaaacggaagggatactcatatgaactcaaggaaattatagagctactttttcacaagatgacagatgatcccatgaacaataaagatgtgaaaaagtcccatggcaagatgtggtcgtacgggttttatctgattcacctgcagggcaagcaagggttccagtttttctgcaagacagaagatatgaagagaaagtggatggagcagttcgagatggcaatgtcaaatatcaaacctgataaggctaatgctaaccaccatagtttccagatgtatacatttgataagactacaaactgcaaagcttgtaagatgttcctccgtggaactttctatcagggatatatgtgtactaagtgtggcgtcggcgcccacaaggaatgtctcgaagtgatcccaccctgtaagttcacttccccggctgacctggatgcttctggcgctgggccaggcccaaagatggtggctatgcagaattaccatggtaatccggccccgcccggtaagcccgtcctgacatttcagactggggacgtcttagaactgctgcggggagatccagaatcaccgtggtgggaaggaaggttggtacagacacgcaagtctggctatttcccaagctcttctgtgaaaccttgtcctgtggacggccgtcctccaatttctaggcccccttcacgggagatcgactacacagcatacccttggttcgctgggaacatggaacgacagcaaactgacaacttactgaagtctcatgccagcggtacctatttgatccgtgagaggcctgctgaagcggaacggtttgctatatccatcaagttcaatgatgaggtgaaacacataaaagtcgtagagaaagacaattggatccacattaccgaggctaagaaattcgacagcctactcgagctggtggaatactatcaatgtcactccctgaaagaatctttcaagcagctggatacgacgctcaagtatccatacaagtctcgggagcggtccgcgagccgagccagcagccgctcccccgcaagttgtgcctcatataatttcagctttctgtctccacagggtctttcctttgcctcccagggcccatctgctcccttctggagcgtcttcactccacgtgttataggcacagctgtagctcggtataacttcgctgcaagagatatgagggagctctcactaagggagggcgacgtggtaagaatctatagccggatcgggggcgatcaaggctggtggaagggggagaccaacggcagaatcgggtggttcccatctacatacgtggaagaggagggcatccaatag

SEQ ID NO: 49416 - DNA, 2637 bp, Artificial Sequence
  derived and/or modified sequence
atggaacaatggcgccaatgtgggagatggctaattgactgtaaggtgcttcccccaaaccatcgagtggtgtggccatctgccgtggtgttcgaccttgctcaggcgctgagagacggagttctcctttgtcagctcttacataacctctcacctggctccatagatctcaaagatatcaactttcgtcctcagatgtctcagtttctgtgcttgaaaaatatcagaaccttcctgaaggtgtgccatgacaagttcggcctcagaaacagcgagctattcgatcctttcgatcttttcgatgttcgagacttcgggaaagtgataagcgctgtaagtcgactgagtctgcattctatcgcacaaaacaaaggtattaggccttttccatcagaggagacaacagagaatgacgatgacgtatatagatccttggaggagctggcagatgagcacgatctaggggaggacatttacgattgtgtaccttgtgaagatgggggagacgatatctatgaagacattataaaggtcgaggttcagcagccaatgataagatatatgcaaaagatgggaatgacagaggacgacaagaggaattgctgtctgctggaaatacaggaaactgaggcaaagtactatcggacactagaggatattgaaaaaaattacatgtcccccctacggctagtgttaagcccggctgacatggcagcagtattcatcaacctagaggacttgattaaagtgcaccactcattcttgagagctatcgatgtaagtgtaatggtagggggatcaaccctggccaaggtgttcctcgacttcaaagagcgtctgctgatctacggcgaatattgttctcatatggagcacgcccagaacaccctgaatcagctcctcgctagccgggaggatttccggcagaaggtcgaggaatgtacactgaaggtgcaggatggcaaattcaagctgcaagacttactggttgtccctatgcagcgcgtgctcaagtatcacctgctgttgaaggaacttctgtcacactcggcagagcgccctgaaaggcaacagctgaaggaggctctggaggccatgcaggatctggccatgtacataaacgaggttaagagagataaggagacgttgcgcaagatcagcgaatttcagtcaagtatcgaaaatttacaggtgaagcttgaggaatttgggcgaccgaagatcgacggcgagctgaaggtcaggagtatcgttaatcatactaagcaggaccgctatctgtttctgttcgacaaagtggtgatcgtctgcaaacgcaaggggtactcctacgagttaaaggagatcatcgagctattgttccataagatgacggacgatcccatgaataacaaggacgttaagaagagtcatgggaaaatgtggtcttacggcttttatctgatccaccttcaaggaaagcaggggtttcaatttttctgtaaaacagaggatatgaaacggaaatggatggaacagttcgagatggcgatgagcaacatcaagcctgataaagctaatgctaaccaccattctttccaaatgtatacatttgataagacaaccaactgcaaagcctgcaaaatgttcctaaggggcactttttatcagggatacatgtgcacaaaatgcggggttggggctcacaaggagtgtctggaggtgatccctccgtgcaagttcacatctcctgccgatctcgacgcttctggcgcaggtccagggcctaagatggtggccatgcagaactatcacgggaacccagcccctcctgggaagcccgtcctcacttttcagaccggcgatgtactcgagctgttgaggggggatccagagtccccctggtgggagggcagattggtccaaacgcgtaagtcagggtacttcccctcaagctctgtaaagccttgccctgtggacggacgaccaccaatttctcgacccccttcccgggaaatcgattacacggcatatccttggtttgctggtaacatggaacgccagcagactgataaccttcttaagtcacatgcatcaggtacatatctgatcagggaaagacccgctgaggccgagagatttgccatttccattaagtttaacgatgaggtgaagcatataaaagttgtggaaaaagataactggatccacattacggaggcaaaaaaattcgatagtctgcttgaactggtggagtattaccagtgccactcgttgaaagaatcattcaaacagctcgacactacactgaaatacccgtacaagtctcgtgagcgctctgcctcccgggcttcctctcggtccccagccagttgtgcctcctacaacttttcatttctgtcacctcaggggctctcatttgcttcacaaggcccatccgcccctttctggagtgtctttactcctcgtgtcatagggaccgcagtcgctcggtataacttcgcagccagagacatgcgggaactgagcttaagagagggcgatgttgtgcgtatctacagcaggattggaggcgatcagggatggtggaaaggtgagacaaacgggaggattggctggtttccctcaacatatgtggaagaagagggcatccaatag

SEQ ID NO: 49417 - DNA, 4837 bp, Artificial Sequence
  derived and/or modified sequence
actgccctgagccggtcgggcccgcgggcgccatggagcagtggcggcagtgcggccgctggctcatcgattgcaaggtcctgccgcccaaccaccgggtggtgtggccctcggccgtggtcttcgacctggcgcaggcgctgcgcgacggggtccttctgtgccagctgctgcacaacctctcccccggctccatcgacctcaaggacatcaacttccggccgcagatgtcccagtttctgtgtttgaagaacatacgcaccttcctgaaagtctgccacgataaatttggattaaggaacagcgagctgtttgacccctttgacctcttcgatgtgcgagactttggaaaggtcatctccgcggtgtcgaggctctccctgcacagcatcgcgcagaacaaagggatcaggccttttccctcagaggagaccacagagaatgacgatgacgtctaccgcagcctggaggagctggccgacgagcatgacctgggggaggacatctacgactgcgtcccgtgtgaggatggaggggacgacatctacgaggacatcatcaaggtggaggtgcagcagcccatgattagatacatgcagaaaatgggcatgactgaagatgacaagaggaactgctgcctgctggagatccaggagaccgaggccaagtactaccgcaccctggaggacattgagaagaactacatgagccccctgcggctggtgctgagcccggcggacatggcagctgtcttcattaacctggaggacctgatcaaggtgcatcacagcttcctgagggccatcgacgtgtccgtgatggtggggggcagcacgctggccaaggtcttcctcgatttcaaggaaaggcttctgatctacggggagtactgcagccacatggagcacgcccagaacacactgaaccagctcctggccagccgggaggacttcaggcagaaagtcgaggagtgcacactgaaggtccaggatggaaaatttaagctgcaagacctgctggtggtccccatgcagagggtgctcaaataccacctgctcttgaaggagcttctgagccattctgcggaacggcctgagaggcagcagctcaaagaagcactggaagccatgcaggacttggcgatgtacatcaatgaagttaaacgggacaaggagaccttgaggaaaatcagcgaatttcagagttctatagaaaatttgcaagtgaaactggaggaatttggaagaccaaagattgacggggaactgaaagtccggtccatagtcaaccacaccaagcaggacaggtacttgttcctgtttgacaaggtggtcatcgtctgcaagcggaagggctacagctacgagctcaaggagatcatcgagctgctgttccacaagatgaccgacgaccccatgaacaacaaggacgtcaagaagtctcacgggaaaatgtggtcctacggcttctacctaattcaccttcaaggaaagcagggcttccagtttttctgcaaaacagaagatatgaagaggaagtggatggagcagtttgagatggccatgtcaaacatcaagccagacaaagccaatgccaaccaccacagtttccagatgtacacgtttgacaagaccaccaactgcaaagcctgcaaaatgttcctcaggggcaccttctaccagggatacatgtgtaccaagtgtggcgtcggggcacacaaggagtgcctggaagtgatacctccctgcaagttcacttctcctgcagatctggacgcctccggagcgggaccaggtcccaagatggtggccatgcagaattaccatggcaacccagcccctcccgggaagcctgtgctgaccttccagacgggcgacgtgcttgagctgctgaggggcgaccctgagtctccgtggtgggagggtcgtctggtacaaaccaggaagtcagggtatttccccagctcatctgtgaagccctgccctgtggatggaaggccgcccatcagccggccgccatcccgggagatcgactacactgcatacccctggtttgcaggtaacatggagaggcagcagacggacaacctgctcaagtcccacgccagcgggacctacctgatcagggagcggcctgccgaggctgagcgctttgcaataagcatcaagttcaatgatgaggtgaagcacatcaaggtggtggagaaggacaactggatccacatcacagaggccaagaaattcgacagcctcctggagttggtggagtactaccagtgccactcactgaaggagagcttcaagcagctggacaccacactcaagtacccctacaagtcccgggaacgttcggcctccagggcctccagccggtccccagcttcctgtgcttcctacaacttttcttttctcagtcctcagggcctcagctttgcttctcagggcccctccgctcccttctggtcagtgttcacgccccgcgtcatcggcacagctgtggccaggtataactttgccgcccgagatatgagggagctttcgctgcgggagggtgacgtggtgaggatctacagccgcatcggcggagaccagggctggtggaagggcgagaccaacggacggattggctggtttccttcaacgtacgtagaagaggagggcatccagtgacggcaggaacgtggacaagactcgcagattttcttgggagagtcactccagccctgaagtctgtctctagctcctctgtgactcagaggggaaataccaacctcccagtcttccactgcccacagggatagggagggtgttgagaatcctaaactcgaaccgtttcactgtcagcctgccctcggcgacccatcactgggtatgctattgtacatagaggaaacctgggctagccccacccagagcgcagaggagggggcaccgacagcgctgcgagccaggctctgggtagtggctgaggccagaggcccatcgcctgcccctgtccaactgagatggccttcaggagcctaggtttgaacagcagatgctgtcccaggaagggctagggacatcggaggggacctgcccccacaccctctgctcagcccctggactcagccttgcctgtcttttcctgctgctcccagggggaggtgtcagacctcgggaggcagacgggaccagagccaggctgttcactgtgggcccacttgccccactgtgctagggcgcgggaggagagagcactgtggtcgccctctgcagccactctggctcccaagacttccctgactcccccactcccctccttgccaggggcacacccggaccccacacggcaggcccctctcttgggaggggcctttggaatgatgaaattccaaccctgctgcccggtcagcggtaccgtttcctgccctctctctgagaggccctttctggagtcctgggaaggtgtctgcctggccgcgctgccagatcagtacatcttttgtaaaaaccctgaaatgggcagggaagaaaacagggatttcccctctctagatccctgccaggtccctctccaggaggcccctctgctctcctgaagggtggtccctgagggtctgcccagccttggcacgagaggttggttccagcccctggcagggcttccttccaagggcccctgcagcctacaaactgggcctcgggcgactcaaaataagtgctcttgggggtggctctaccccattacctcccccagccacaactcctggccttcgacttctggctgggttagccagaccctggtttctctaccctgatgttgcatgagacctggtaacagtgtctccctcccagctccttgccaaagcctctgttgagacctgggcttcttgtagccccttctccctctggccagctgcacagcctgtgggaggtgcccggcccaggctgggtgtgggggaagctggtccctgctgtgggtggcgctggggacctaggggctccttctgaggttggccttgtggcctctgggctgtatgcctctggggtgtagggaagaggcgggaggagtcatggggatggggagcggcagggggagagaggggccctcgacaaaggcttgggaaatgaggggaggtggaggcagggcaggggaagcgaagagtcagccttggagagagcaccctggggcctccgtgtcggggtacacccagcactttgcgacctgcggcccagcaggcgcggaggatggcggggaggaagccagcagcccctgtgtttactgtcgtcagaaaggtcttgtgttttggttttggggtttttgttttgtttgtgttttgtttggcttgtttgttttttaaggggaaaaaagtttgtaattatttcatccaaatctcccgttatatatctgtgaataataagagattttataatagcaagaaaatgatgtatattttagtttgttgacaaataagtcatcatgatcacgaaggacactgagaaaaaataatttagaaccctggtttttgtgaatttttttgttttgtgtttctttgttttgagatttgtgtttggtttggtttttgcactgcactaaggcaggagggttggagggctgggtgcagcctgggagtccgatggttttcagcaggagacggggtgtcccctgcagggggctaaactgcaggggcctgagattagctgtgaacatgtgggagcccgatgcatgtgggtcagggatctgggggcccccccagctggcgggaaccccaaatggacacaaactgtacatttgccaatgggtttttttcagaccatggtttttacttgcaaataaacctgagttcttttctgca

SEQ ID NO: 49418 - protein, 456 aa, Artificial Sequence
  derived and/or modified sequence
MASRSLGGLSGIRGGGGGGGKKSLSARNAAVERRNLITVCRFSVKTLIDRSCFETIDDSSPEFNNFAAILEQILSHRLKGQVTWFGYESPRSFWDYIRVACRKVSQNCICSIENMENVSSSRAKGRAWIRVALMEKHLSEYISTALRDFKTTRRFYEDGAIVLGEEANMLAGMLLGLNAIDFSFCLKGEGLDGSFPAVIDYTPYLKYIQSSDSISSDEEELRTLGSSGSESSTPENVGPPFLMDENSWFNKCKRVKQKYQLTLEQKGYLEELLRLRENQLSESVSQNKILLQRIEDSDLAHKLEKEQLEYIIVELQDQLTVLKNNDLRSRQELTAHLTNQWPSPGALDVNAVALDTLLYRKHNKQWYEKSYQSLDQLSAEVSLSQTSLDPGQSQEGDGKQDTLNVMSEGKEDTPSLLGLCGSLTSVASYKSLTSLKSNDYLASPTTEMTSPGLTPS

SEQ ID NO: 49419 - DNA, 1371 bp, Artificial Sequence
  derived and/or modified sequence
atggccagcagaagcctgggcggcctgagcggcatcagaggcggcggcggcggcggcggcaagaagagcctgagcgccagaaacgccgccgtggagagaagaaacctgatcaccgtgtgcagattcagcgtgaagaccctgatcgacagaagctgcttcgagaccatcgacgacagcagccccgagttcaacaacttcgccgccatcctggagcagatcctgagccacagactgaagggccaggtgacctggttcggctacgagagccccagaagcttctgggactacatcagagtggcctgcagaaaggtgagccagaactgcatctgcagcatcgagaacatggagaacgtgagcagcagcagagccaagggcagagcctggatcagagtggccctgatggagaagcacctgagcgagtacatcagcaccgccctgagagacttcaagaccaccagaagattctacgaggacggcgccatcgtgctgggcgaggaggccaacatgctggccggcatgctgctgggcctgaacgccatcgacttcagcttctgcctgaagggcgagggcctggacggcagcttccccgccgtgatcgactacaccccctacctgaagtacatccagagcagcgacagcatcagcagcgacgaggaggagctgagaaccctgggcagcagcggcagcgagagcagcacccccgagaacgtgggcccccccttcctgatggacgagaacagctggttcaacaagtgcaagagagtgaagcagaagtaccagctgaccctggagcagaagggctacctggaggagctgctgagactgagagagaaccagctgagcgagagcgtgagccagaacaagatcctgctgcagagaatcgaggacagcgacctggcccacaagctggagaaggagcagctggagtacatcatcgtggagctgcaggaccagctgaccgtgctgaagaacaacgacctgagaagcagacaggagctgaccgcccacctgaccaaccagtggcccagccccggcgccctggacgtgaacgccgtggccctggacaccctgctgtacagaaagcacaacaagcagtggtacgagaagagctaccagagcctggaccagctgagcgccgaggtgagcctgagccagaccagcctggaccccggccagagccaggagggcgacggcaagcaggacaccctgaacgtgatgagcgagggcaaggaggacacccccagcctgctgggcctgtgcggcagcctgaccagcgtggccagctacaagagcctgaccagcctgaagagcaacgactacctggccagccccaccaccgagatgaccagccccggcctgacccccagctag

SEQ ID NO: 49420 - DNA, 1371 bp, Artificial Sequence
  derived and/or modified sequence
atggcgtccagatccctgggtggtctgagtggcattaggggaggcggtggaggcggtgggaagaagtctctaagtgccagaaatgccgctgtcgaacggaggaaccttatcactgtgtgcagattttctgtcaaaactcttatcgataggtcctgctttgagaccattgatgattcttcccccgaattcaataatttcgccgcaatacttgaacagatcctttcacacaggctcaagggtcaggtgacatggtttggctacgaatccccccgaagtttttgggactacattagagtagcctgtcgtaaagtctcacagaattgcatctgttcgatagaaaatatggaaaatgtgagtagttctagagcaaagggacgagcctggatccgggtcgcactcatggagaagcatctgtcagagtacatcagcacagcccttagggattttaagacaacgcggagattttatgaagatggcgctatcgtcctgggggaagaagctaacatgctggccggcatgctcctgggcttgaacgcgatagactttagcttttgcttgaagggtgagggcctggacggcagttttccagccgttatcgactatacaccctacctgaaatacatccagtcttctgactcaatctcttccgatgaggaagagctcagaacccttggtagctctgggagcgagtcctctacccccgagaacgttggtcctccttttcttatggatgagaactcctggttcaataagtgcaagagggttaaacagaagtaccagctgacactggagcaaaaagggtatctcgaagaactgctgcggcttcgggagaatcagctgagtgaatctgtgtctcagaataagatccttctgcaaagaattgaggattcagacctggcacataagttagaaaaggaacagctcgaatacatcatcgtcgaacttcaggatcagttaacagtgctgaaaaataacgacttgcgctccaggcaggagttgactgcgcacctgactaaccaatggcctagcccaggagctttagatgtaaatgcagtggccctggacaccttactctatcggaagcataataagcagtggtacgaaaagtcataccaaagtctggatcaattaagcgccgaagtctctcttagtcaaacgtctctggatccaggacagtcccaggaaggtgatgggaagcaggacaccctgaacgttatgagcgaaggaaaggaggataccccctctctgttaggactgtgtgggtcccttacgtccgtggctagctacaaatcactgacttcactgaagagcaatgattacttggctagtcctacaactgagatgacctcccctggcctgacccctagttag

SEQ ID NO: 49421 - DNA, 1371 bp, Artificial Sequence
  derived and/or modified sequence
atggccagccgcagcctgggcggcctgagcggcatccggggcggcggcggcggcggcggcaagaagagcctgagcgccagaaatgctgctgtggagaggaggaacctgatcaccgtgtgccgcttctctgtgaagaccctgattgacaggagctgctttgagaccattgatgacagcagccctgagttcaacaactttgctgccatcctggagcagatcctgagccaccggctgaagggccaggtgacctggtttggctatgagagccccaggagcttctgggactacatccgggtggcctgcaggaaggtgtcccagaactgcatctgcagcattgagaacatggagaatgtgagcagcagccgggccaagggccgggcctggatccgggtggccctgatggagaagcacctgtctgagtacatcagcacagccctgcgggacttcaagaccacccggcgcttctatgaagatggagccatcgtgctgggggaggaggccaacatgctggccggcatgctgctgggcctgaatgccatcgacttctccttctgcctgaagggggagggcctggatggcagcttccctgctgtgattgactacaccccctacctgaagtacatccagagcagtgacagcatcagcagtgatgaggaggagctgcggaccctgggcagcagcggcagcgagagcagcaccccagaaaatgtgggcccccccttcctgatggatgaaaattcctggttcaacaagtgcaagagggtgaagcagaagtaccagctgaccctggagcagaagggctacctggaggagctgctgcggctgcgggagaaccagctgtctgagagcgtgtcccagaacaagatcctgctgcagagaattgaagattctgacctggcccacaagctggagaaggagcagctggagtacatcatcgtggagctgcaggaccagctgactgtgctgaagaacaatgacctgcggagccggcaggagctgacagcccacctgaccaaccagtggcccagccctggggccctggatgtgaatgctgtggccctggacaccctgctgtacaggaagcacaacaagcagtggtatgagaagagctaccagagcctggaccagctgtctgctgaggtgtccctgagccagaccagcctggaccccggccagagccaggagggagatggcaagcaggacaccctgaatgtgatgtctgagggcaaggaggacacccccagcctgctgggcctgtgtggcagcctgacctctgtggccagctacaagagcctgaccagcctgaagagcaatgactacctggccagccccaccacagagatgaccagccctggcctgacccccagctag

SEQ ID NO: 49422 - DNA, 1371 bp, Artificial Sequence
  derived and/or modified sequence
atggccagccggagcctgggcggcctgagcggcatccggggcggcggaggaggaggaggcaaaaaaagcctgagcgccagaaacgccgctgttgagcgtcgtaacctaattaccgtatgccgattctccgtgaagacgctgattgaccggtcttgtttcgagactattgatgatagcagccccgagttcaataatttcgccgctattttagaacagattctctctcaccggctgaagggccaggtgacatggttcggttacgagagtccgagatccttctgggactatatccgcgttgcctgtaggaaggtttcccaaaattgcatttgcagtattgagaacatggaaaacgtgagttctagcagggctaaagggcgcgcttggatccgcgtggctttgatggaaaagcatctgagcgagtatatctccaccgcactccgtgacttcaagacgactaggcggttctatgaggacggcgcaatcgttctaggcgaggaggctaatatgcttgccggcatgctgttggggcttaacgcaattgattttagcttttgcttaaagggggaggggctcgacgggtccttccctgcagttatcgactacactccctatctgaaatacatacagagcagcgacagtatttcaagtgatgaggaagagctccggactcttggctctagcggctctgaatcttccactcctgagaatgtgggacctccattcctcatggacgagaatagctggtttaacaagtgcaagcgcgtgaaacaaaagtatcaacttactctggagcagaaggggtatctcgaggaactcctgcgactgagggagaatcagctgagcgaaagtgtttcccagaacaaaattctccttcagcggattgaggacagcgatcttgcccacaaactggagaaggaacagctggaatatattattgtggaactgcaggaccagttaactgtgcttaaaaacaatgacctgcgatcacggcaggagttgaccgcacatctgacgaaccaatggccctctcctggcgcactggatgtgaatgctgtagccctggatacgctgctttacagaaaacataacaagcagtggtacgagaagagttatcagtccctggaccaactgagtgcagaagtctcacttagccagacctccttggatcccggccagtcccaagaaggggacgggaaacaagatactctgaatgtgatgagtgaagggaaagaagatacaccgtccctcctgggcctctgcggctcactcacatcggtagcctcatacaaatcactgactagcctgaagagcaacgactatctggccagtcctaccaccgaaatgacatctccgggcctcaccccttcctag

SEQ ID NO: 49423 - DNA, 1371 bp, Artificial Sequence
  derived and/or modified sequence
atggcttccagatccctgggaggcttgagcggaattcgaggtgggggaggcggaggcggaaagaagtccctcagcgctaggaacgccgcagttgaaagaaggaacctgattacagtctgcaggttttccgtgaaaacccttatcgatagatcctgtttcgagactatcgacgactcatctcccgaattcaataacttcgccgcaattctcgagcaaattctctctcatcgcctcaaggggcaggtcacctggttcgggtatgaatcccccagatcattttgggactatattcgggtggcctgtaggaaggtatctcagaactgcatctgttccatcgaaaacatggagaacgtgagtagttctagggccaagggtagagcatggattcgcgtagcactgatggaaaaacatctctctgaatacattagcacggctctgagggatttcaagaccactcgtaggttctatgaggatggggcaatcgtgctgggcgaggaggctaacatgctagctgggatgttgctggggcttaatgcaatcgatttctcattttgcctgaagggcgaagggctcgatgggagcttccccgctgttatcgactatactccttatctgaagtatattcaatccagtgacagcatctcatcggatgaagaagagctgaggaccctcgggagcagcggcagtgagagtagcaccccagagaatgtgggaccacctttcttaatggatgagaattcatggttcaataaatgtaagcgagtcaagcagaagtaccagttaactctggaacagaaggggtacctcgaggagttactccgtttaagagagaaccaactatcagagtctgtgagccagaataagatcctcctgcaaagaatagaggactccgacctggcccacaaactcgaaaaagaacagttggaatacatcatcgtggagttacaagaccagctgaccgtacttaaaaataacgaccttaggagcagacaggagctgacagctcatttgacaaaccagtggccttctccgggtgctctggacgtaaacgctgtcgctttagacacactactgtatagaaaacataacaaacagtggtacgaaaagtcctatcagagcctggaccagctgtctgctgaagtgtccttatcacaaacgagcctagacccagggcagtcccaggagggagatgggaagcaagacacactgaatgtaatgtccgagggcaaggaggacactccttcactgttggggctttgcgggtctctgacatccgtcgcctcctacaagtctctgacctccctcaagtccaacgattatctagcctcacccaccacggaaatgacctcccccggtctgacaccatcatag

SEQ ID NO: 49424 - DNA, 2064 bp, Artificial Sequence
  derived and/or modified sequence
gtgtgtgtgtggagctcgggtgccaagggcgagccgtcagtccccgggtgcgagtccctgctgtcttccacacccttcctccctccaggctcctttcctacatccttcccgcgcccccacggttgcggaccgagcgagaacccccttaagcaggtgtggggggcgtgcggggtggcacgagacaaaaggggcacgggggtaagcccgccatggcctcccggagcctggggggcctgagcgggatccgcggcggtggcggcggaggcggcaagaaaagcctgagcgcccgcaatgctgcggtggagaggaggaacctgatcaccgtgtgcaggttttctgtgaagaccctgattgatcggtcttgctttgagacaattgatgattcttctcctgaatttaacaattttgcagctattttggaacagattttaagccaccggctaaaaggtcaagtaacctggtttggttatgaaagtcctcgtagcttctgggactatatcagagtggcttgccggaaagtttcacagaattgtatctgcagcattgaaaatatggaaaatgtcagttcttctagagctaagggtagagcctggatcagagtagcactcatggaaaaacatttatctgaatacatctctacagctctgagagacttcaaaacaaccaggagattttatgaagatggagcaattgtcttgggtgaagaagcaaatatgcttgctggcatgcttctaggactcaatgctattgatttcagtttctgcctaaagggagaggggctggatggcagttttcctgctgtaatagactatacaccatatttgaagtatatccaaagttctgatagtatcagcagtgatgaggaggagctaaggactttgggaagcagtggtagcgaaagcagtactccagagaatgtcggacctcctttcctcatggatgagaacagttggttcaacaagtgtaagagagttaaacaaaagtatcagcttaccctggaacagaagggttaccttgaagaactcttacgacttcgagagaaccaactatctgaatctgtctcccagaataaaatactacttcaaaggattgaagattccgatctggctcataaactggagaaggaacaattagaatatataattgtggagcttcaagatcagctgactgtgctaaagaataatgatttaagatcgagacaagagttaactgcccatctcaccaaccagtggccttctccaggagctctggatgtcaatgctgttgccttggatacgttgctttaccgaaaacacaataaacagtggtatgagaaaagttatcaaagtcttgaccagttatcagcagaagttagcctttctcagacttcactagatccaggccagtcacaagaaggagatggaaaacaagacacattaaatgtaatgagtgaaggtaaggaagatactccctcattacttggcctctgtggatctctaacgtcagtggcaagttacaagtctctaacaagcttaaaatctaatgactaccttgcaagtcctacaacagagatgacaagtccaggcctaactccatcctgaaaatttttgtgtaaaagccaaaactttttatgttgtaaatgtttaatttacatgtttgactgctgggaagacctttgaaattttatattgttctggtacatgtctgaaattctattgcttggagagaatcccctccagataagagattttgagtgaaaaacataatgatcctgccatttttcatttttaaaattcttacatttgtcattgagaaagttcaaaatggaataggctttaaaaaaaaaaaaactttcaaagatccgccaaatcattcatagcaaattgtacatattgttcagctgatttttatatatttaaatacaccttagtggccagagactgacttcaaggttttattccagagactccagagacttaagctaagtattttttcattctttcagattttcaaaaaaaaaaaaaaaaaaagttaatttcattttttcattaatgtcttcctaagttctatgctttaaatgccttg

SEQ ID NO: 49425 - protein, 407 aa, Artificial Sequence
  derived and/or modified sequence
MASRSLGGLSGIRGGGGGGGKKSLSARNAAVERRNLITVCRFSVKTLIDRSCFETIDDSSPEFNNFAAILEQILSHRLKGQVTWFGYESPRSFWDYIRVACRKVSQNCICSIENMENVSSSRAKGRAWIRVALMEKHLSEYISTALRDFKTTRRFYEDGAIVLGEEANMLAGMLLGLNAIDFSFCLKGEGLDGSFPAVIDYTPYLKYIQSSDSISSDEEELRTLGSSGSESSTPENVGPPFLMDENSWFNKCKRVKQKYQLTLEQKGYLEELLRLRENQLSESVSQNKILLQRIEDSDLAHKLEKEQLEYIIVELQDQLKSYQSLDQLSAEVSLSQTSLDPGQSQEGDGKQDTLNVMSEGKEDTPSLLGLCGSLTSVASYKSLTSLKSNDYLASPTTEMTSPGLTPS

SEQ ID NO: 49426 - DNA, 1224 bp, Artificial Sequence
  derived and/or modified sequence
atggccagcagaagcctgggcggcctgagcggcatcagaggcggcggcggcggcggcggcaagaagagcctgagcgccagaaacgccgccgtggagagaagaaacctgatcaccgtgtgcagattcagcgtgaagaccctgatcgacagaagctgcttcgagaccatcgacgacagcagccccgagttcaacaacttcgccgccatcctggagcagatcctgagccacagactgaagggccaggtgacctggttcggctacgagagccccagaagcttctgggactacatcagagtggcctgcagaaaggtgagccagaactgcatctgcagcatcgagaacatggagaacgtgagcagcagcagagccaagggcagagcctggatcagagtggccctgatggagaagcacctgagcgagtacatcagcaccgccctgagagacttcaagaccaccagaagattctacgaggacggcgccatcgtgctgggcgaggaggccaacatgctggccggcatgctgctgggcctgaacgccatcgacttcagcttctgcctgaagggcgagggcctggacggcagcttccccgccgtgatcgactacaccccctacctgaagtacatccagagcagcgacagcatcagcagcgacgaggaggagctgagaaccctgggcagcagcggcagcgagagcagcacccccgagaacgtgggcccccccttcctgatggacgagaacagctggttcaacaagtgcaagagagtgaagcagaagtaccagctgaccctggagcagaagggctacctggaggagctgctgagactgagagagaaccagctgagcgagagcgtgagccagaacaagatcctgctgcagagaatcgaggacagcgacctggcccacaagctggagaaggagcagctggagtacatcatcgtggagctgcaggaccagctgaagagctaccagagcctggaccagctgagcgccgaggtgagcctgagccagaccagcctggaccccggccagagccaggagggcgacggcaagcaggacaccctgaacgtgatgagcgagggcaaggaggacacccccagcctgctgggcctgtgcggcagcctgaccagcgtggccagctacaagagcctgaccagcctgaagagcaacgactacctggccagccccaccaccgagatgaccagccccggcctgacccccagctag

SEQ ID NO: 49427 - DNA, 1224 bp, Artificial Sequence
  derived and/or modified sequence
atggcatctcgttcactaggtggcctgtcaggcattcgtggagggggaggaggcgggggcaaaaaatcgctgtctgcaaggaatgctgccgtggaaagacggaatttaatcacagtgtgccggttcagtgtgaagaccttgatagacagaagctgcttcgagaccattgatgatagttcaccagaattcaataacttcgccgctatcctggagcagatcctgtcgcatcgcctgaaagggcaggtgacatggtttggatacgagtccccacggagtttttgggactatattagggtggcctgcagaaaagtgtctcagaactgtatctgttccatcgagaacatggagaacgtttcgtcctctagggccaagggtcgtgcttggattcgcgtggccctgatggagaagcacctttctgaatacatttcaactgccctgcgagactttaaaacgactaggaggttctacgaggatggtgcgatcgtacttggggaggaggctaatatgctggctgggatgttattgggattaaacgccattgatttctcattctgtctgaaaggcgagggactcgatggttcttttcccgccgtcatcgattatacaccctacctgaaatatatacagtccagcgacagcatcagtagcgatgaggaggagctcaggacgttaggctcttccgggtccgagagctcaacccccgagaatgtgggtccaccttttctgatggatgagaacagttggtttaataagtgcaaacgtgttaagcagaaatatcagcttaccctggaacagaaaggatatcttgaagagctgttaaggctcagagagaaccagctatccgaatccgttagtcagaacaagatcctgttgcagaggattgaggactctgacctggcacataagctggagaaagagcagctggagtacataatcgtcgaactgcaggatcagctcaaatcttaccagtcccttgatcagctctctgcggaagtgagcctgagtcagacatcactggaccccggccagagccaagaaggcgatggcaagcaggataccctcaatgtgatgagcgagggtaaggaggacacaccttccctgttggggctgtgtggatctttgacaagtgtcgcttcttataagtctctaacatccctcaagtccaacgattaccttgcctcccccactaccgagatgacatcacccggccttacaccttcgtag

SEQ ID NO: 49428 - DNA, 1224 bp, Artificial Sequence
  derived and/or modified sequence
atggccagccgcagcctgggcggcctgagcggcatccggggcggcggcggcggcggcggcaagaagagcctgagcgccagaaatgctgctgtggagaggaggaacctgatcaccgtgtgccgcttctctgtgaagaccctgattgacaggagctgctttgagaccattgatgacagcagccctgagttcaacaactttgctgccatcctggagcagatcctgagccaccggctgaagggccaggtgacctggtttggctatgagagccccaggagcttctgggactacatccgggtggcctgcaggaaggtgtcccagaactgcatctgcagcattgagaacatggagaatgtgagcagcagccgggccaagggccgggcctggatccgggtggccctgatggagaagcacctgtctgagtacatcagcacagccctgcgggacttcaagaccacccggcgcttctatgaagatggagccatcgtgctgggggaggaggccaacatgctggccggcatgctgctgggcctgaatgccatcgacttctccttctgcctgaagggggagggcctggatggcagcttccctgctgtgattgactacaccccctacctgaagtacatccagagcagtgacagcatcagcagtgatgaggaggagctgcggaccctgggcagcagcggcagcgagagcagcaccccagaaaatgtgggcccccccttcctgatggatgaaaattcctggttcaacaagtgcaagagggtgaagcagaagtaccagctgaccctggagcagaagggctacctggaggagctgctgcggctgcgggagaaccagctgtctgagagcgtgtcccagaacaagatcctgctgcagagaattgaagattctgacctggcccacaagctggagaaggagcagctggagtacatcatcgtggagctgcaggaccagctgaagagctaccagagcctggaccagctgtctgctgaggtgtccctgagccagaccagcctggaccccggccagagccaggagggagatggcaagcaggacaccctgaatgtgatgtctgagggcaaggaggacacccccagcctgctgggcctgtgtggcagcctgacctctgtggccagctacaagagcctgaccagcctgaagagcaatgactacctggccagccccaccacagagatgaccagccctggcctgacccccagctag

SEQ ID NO: 49429 - DNA, 1224 bp, Artificial Sequence
  derived and/or modified sequence
atggccagccggagcctgggcggcctgagcggcatccggggcggcgggggcgggggagggaagaagtcacttagcgccaggaacgcggcagtggagcggagaaatctcattaccgtatgccgatttagtgtcaaaactcttatcgacaggtcatgctttgagaccatcgacgacagtagccccgaattcaataactttgcagccatcctggagcaaatattgagccatagattaaagggacaggtaacttggttcggctatgaaagccctcgtagcttttgggactatatccgcgtggcatgtcggaaggtaagtcagaattgcatctgtagcatcgaaaacatggaaaatgtctccagctctagggcgaaggggagagcgtggatcagggtggcattaatggagaaacaccttagcgaatatatatccacagccctgagagactttaaaacaacacggcgcttttacgaggatggtgccatcgtgcttggcgaagaggctaatatgctggccggcatgctcctcggcctcaacgccattgattttagcttctgcttaaagggagaaggtcttgacgggtccttcccagctgtgatcgactatacaccatatctcaagtacatccagtctagtgatagtatttcctctgatgaggaggagctcaggacgctcgggtcttctggctccgagtcctctacacccgaaaatgtggggcctccctttctgatggatgagaattcatggttcaacaaatgtaaaagagtgaaacaaaagtatcagctcaccctagagcagaagggctacctcgaagagttgttacgcctgagggaaaaccagctgagtgagagcgtttctcagaacaaaattctgctgcagaggatcgaggatagtgatttggcccacaaattagaaaaagagcagcttgagtatattatcgtggagctgcaggatcagctcaaatcttaccagtccctagaccaactgtcggctgaggtatccctcagccagacatcattggatcccggacagagccaggagggagacggcaagcaggacactctgaatgtgatgtccgaaggcaaagaggataccccaagtctactaggcttgtgcggcagcctgaccagtgtggcatcgtacaaatctctgacatcgctaaaatccaacgactatctcgctagcccgacaactgagatgacaagtcccgggctgacaccgagctag

SEQ ID NO: 49430 - DNA, 1224 bp, Artificial Sequence
  derived and/or modified sequence
atggcctcaaggagcttgggcggactctccgggattagagggggaggtgggggtggaggaaaaaaatcacttagcgctcggaacgccgctgtggagaggagaaacctgattacagtctgccgcttttcagtgaagacactcatcgatagatcatgtttcgaaactatcgatgattctagccccgaatttaacaactttgctgccatcctcgagcaaatcctttctcaccgactgaaaggccaagtcacttggtttgggtacgagtctcccagatctttctgggactatattagagttgcctgtcgaaaggtttcacagaattgtatctgtagtatcgagaacatggagaacgtgtcctcttctagagccaagggtcgcgcttggatcagggtggcgctaatggagaaacaccttagtgaatatatcagtaccgcactgagagacttcaagaccacccggcgattttacgaggacggggctatcgtcctgggagaggaagccaacatgcttgccggaatgttattgggcctgaacgccatcgatttcagcttctgtctgaaaggtgaaggcctggatggatcttttccggctgtgattgattatacaccttatctgaagtacattcagtcaagtgacagcatctctagtgacgaagaggagttgcgcaccctcggttcttctggtagtgaatcatcaacaccagaaaacgtcggaccgccattcctcatggacgaaaactcctggtttaacaagtgtaaacgggtaaaacaaaagtaccagctgaccttagagcagaaaggatacctagaggagctgctccgcctgcgcgagaatcagctgtcagaatctgtgtcacagaacaagatcttattacagagaattgaggactcagacttggcgcacaaactggagaaagaacagttagaatacatcattgtggaattgcaggaccagctcaaatcctatcagagcctagatcaactgtccgctgaagtgagtctgtctcagacatcactcgatccgggtcaatcacaggagggggatgggaagcaagatactctcaacgtcatgagtgaaggaaaagaggacactccctcactactaggcctctgcgggtctctgacaagtgtagctagttataagagtctgacatccctgaaatcaaacgattacctggcatctcccacgacagagatgaccagccccggtctgacgccatcttag

SEQ ID NO: 49431 - DNA, 2020 bp, Artificial Sequence
  derived and/or modified sequence
gaggggccgacgggctcgcgcgcgcgccgtctgctgaggtccctcgggaaggaggagagcgcctgacgccgacccgcaggcgcagcccggcagtcggcggcgcgccgagggcggaggtggtgcgtgcgtgcgtgtgtgtgtgtgtgtgtgtgtgtgtgtgtgtgtgtgtgtggagctcgggtgccaagggcgagccgtcagtccccgggtgcgagtccctgctgtcttccacacccttcctccctccaggctcctttcctacatccttcccgcgcccccacggttgcggaccgagcgagaacccccttaagcaggtgtggggggcgtgcggggtggcacgagacaaaaggggcacgggggtaagcccgccatggcctcccggagcctggggggcctgagcgggatccgcggcggtggcggcggaggcggcaagaaaagcctgagcgcccgcaatgctgcggtggagaggaggaacctgatcaccgtgtgcaggttttctgtgaagaccctgattgatcggtcttgctttgagacaattgatgattcttctcctgaatttaacaattttgcagctattttggaacagattttaagccaccggctaaaaggtcaagtaacctggtttggttatgaaagtcctcgtagcttctgggactatatcagagtggcttgccggaaagtttcacagaattgtatctgcagcattgaaaatatggaaaatgtcagttcttctagagctaagggtagagcctggatcagagtagcactcatggaaaaacatttatctgaatacatctctacagctctgagagacttcaaaacaaccaggagattttatgaagatggagcaattgtcttgggtgaagaagcaaatatgcttgctggcatgcttctaggactcaatgctattgatttcagtttctgcctaaagggagaggggctggatggcagttttcctgctgtaatagactatacaccatatttgaagtatatccaaagttctgatagtatcagcagtgatgaggaggagctaaggactttgggaagcagtggtagcgaaagcagtactccagagaatgtcggacctcctttcctcatggatgagaacagttggttcaacaagtgtaagagagttaaacaaaagtatcagcttaccctggaacagaagggttaccttgaagaactcttacgacttcgagagaaccaactatctgaatctgtctcccagaataaaatactacttcaaaggattgaagattccgatctggctcataaactggagaaggaacaattagaatatataattgtggagcttcaagatcagctgaaaagttatcaaagtcttgaccagttatcagcagaagttagcctttctcagacttcactagatccaggccagtcacaagaaggagatggaaaacaagacacattaaatgtaatgagtgaaggtaaggaagatactccctcattacttggcctctgtggatctctaacgtcagtggcaagttacaagtctctaacaagcttaaaatctaatgactaccttgcaagtcctacaacagagatgacaagtccaggcctaactccatcctgaaaatttttgtgtaaaagccaaaactttttatgttgtaaatgtttaatttacatgtttgactgctgggaagacctttgaaattttatattgttctggtacatgtctgaaattctattgcttggagagaatcccctccagataagagattttgagtgaaaaacataatgatcctgccatttttcatttttaaaattcttacatttgtcattgagaaagttcaaaatggaataggctttaaaaaaaaaaaaactttcaaagatccgccaaatcattcatagcaaattgtacatattgttcagctgatttttatatatttaaatacaccttagtggccagagactgacttcaaggttttattccagagactccagagacttaagctaagtattttttcattctttcagattttcaaaaaaaaaaaaaaaa

SEQ ID NO: 49432 - protein, 527 aa, Artificial Sequence
  derived and/or modified sequence
MEMQQNIENYRATAGVEALQLVDREAKPHMESYNAGVKHYEADDFEMAIRHFEQALREYFVEDTECRTLCEGPQRFEEYEYLGYKAGLYEAIADHYMQVLVCQHECVRELATRPGRLSPIENFLPLHYDYLQFAYYRVGEYVKALECAKAYLLCHPDDEDVLDNVDYYESLLDDSIDPASIEAREDLTMFVKRHKLESELIKSAAEGLGFSYTEPNYWIRYGGRQDENRVPSGVNVEGAEVHGFSMGKKLSPKIDRDLREGGPLLYENITFVYNSEQLNGTQRVLLDNVLSEEQCRELHSVASGIMLVGDGYRGKTSPHTPNEKFEGATVLKALKSGYEGRVPLKSARLFYDISEKARRIVESYFMLNSTLYFSYTHMVCRTALSGQQDRRNDLSHPIHADNCLLDPEANECWKEPPAYTFRDYSALLYMNDDFEGGEFIFTEMDAKTVTASIKPKCGRMISFSSGGENPHGVKAVTKGKRCAVALWFTLDPLYRELERIQADEVIAILDQEQQGKHELNINPKDEL

SEQ ID NO: 49433 - protein, 213 aa, Artificial Sequence
  derived and/or modified sequence
MAETEERSLDNFFAKRDKKKKKERSNRAASAAGAAGSAGGSSGAAGAAGGGAGAGTRPGDGGTASAGAAGPGAATKAVTKDEDEWKELEQKEVDYSGLRVQAMQISSEKEEDDNEKRQDPGDNWEEGGGGGGGMEKSSGPWNKTAPVQAPPAPVIVTETPEPAMTSGVYRPPGARLTTTRKTPQGPPEIYSDTQFPSLQSTAKHVESRNRYLK

SEQ ID NO: 49434 - DNA, 642 bp, Artificial Sequence
  derived and/or modified sequence
atggccgagaccgaggagagaagcctggacaacttcttcgccaagagagacaagaagaagaagaaggagagaagcaacagagccgccagcgccgccggcgccgccggcagcgccggcggcagcagcggcgccgccggcgccgccggcggcggcgccggcgccggcaccagacccggcgacggcggcaccgccagcgccggcgccgccggccccggcgccgccaccaaggccgtgaccaaggacgaggacgagtggaaggagctggagcagaaggaggtggactacagcggcctgagagtgcaggccatgcagatcagcagcgagaaggaggaggacgacaacgagaagagacaggaccccggcgacaactgggaggagggcggcggcggcggcggcggcatggagaagagcagcggcccctggaacaagaccgcccccgtgcaggccccccccgcccccgtgatcgtgaccgagacccccgagcccgccatgaccagcggcgtgtacagaccccccggcgccagactgaccaccaccagaaagaccccccagggcccccccgagatctacagcgacacccagttccccagcctgcagagcaccgccaagcacgtggagagcagaaacagatacctgaagtag

SEQ ID NO: 49435 - DNA, 642 bp, Artificial Sequence
  derived and/or modified sequence
atggcagagaccgaggagaggtcactcgacaatttcttcgcaaagcgggataaaaaaaagaaaaaggagaggagcaatcgcgccgctagtgccgcaggcgcggctggctccgctggcgggagctctggagcggccggggccgctggaggaggcgctggcgccggaactcggcccggagacggcggcaccgccagcgcgggcgcggcaggtccaggcgcggccactaaagccgtgacaaaagatgaagatgaatggaaggaactggagcagaaggaggtggactacagtggcttgcgtgtgcaggcaatgcagatcagttccgagaaagaggaagatgacaatgagaaaagacaggatccgggcgataactgggaggagggtgggggcggaggcggtggcatggagaagtctagtggaccatggaataagacagcaccagtgcaagctccacctgctcctgttatcgtgaccgaaacgcccgaacctgccatgactagcggggtctaccgcccacccggcgcccggctgaccacaactcggaagactccccaaggcccccctgaaatctattctgacactcagtttccctccctgcagagcacggctaaacatgtggagtcccgcaatcgctacctgaaatag

SEQ ID NO: 49436 - DNA, 642 bp, Artificial Sequence
  derived and/or modified sequence
atggccgagacagaggagaggagcctggacaacttctttgccaagagggacaagaagaagaagaaggagaggagcaacagagctgccagcgctgctggagctgctggcagcgctgggggcagcagcggggctgctggagctgctgggggcggggccggggccggcaccaggcctggagatggcggcacagccagcgctggagctgctggccctggagctgccaccaaggctgtgaccaaggatgaagatgagtggaaggagctggagcagaaggaggtggactacagcggcctgcgggtgcaggccatgcagatcagcagcgagaaggaggaggatgacaatgagaagaggcaggaccccggggacaactgggaggagggcggcggcggcggcggcggcatggagaagagcagcggcccctggaacaagacagcccctgtgcaggcccccccagcccctgtgattgtgacagagaccccagagcccgccatgaccagcggcgtgtacagacctcctggggcccggctgaccaccaccaggaagaccccccagggccccccagagatctacagcgacacccagttccccagcctgcagagcacagccaagcacgtggagagcaggaaccgctacctgaagtag

SEQ ID NO: 49437 - DNA, 642 bp, Artificial Sequence
  derived and/or modified sequence
atggccgagaccgaggagcggagcctggacaacttcttcgccaagcgggataaaaaaaagaaaaaggaacggtccaatcgagccgctagcgccgctggtgccgcaggaagtgctggaggctcctccggggccgctggcgctgctggtggaggtgccggtgcgggtacccggcccggcgatggtggaacagcctctgcaggggccgccgggccaggggccgctacaaaagccgttaccaaggacgaagatgagtggaaagaacttgagcaaaaagaagtggattattcaggcctgagggtgcaggcaatgcaaatttccagtgagaaagaggaggacgacaacgagaagaggcaggacccaggggataactgggaagaaggaggagggggcggaggggggatggaaaaatcatccggaccttggaacaaaaccgctcctgtgcaggcccctcccgcccctgttatcgtaactgagacacctgaaccagcaatgacgtccggtgtatatagaccccctggcgcccgtcttacaaccacacggaagacacctcaggggcctcctgagatatacagcgatacacagttcccaagtttacaatctaccgcgaaacacgtggaatccagaaaccggtacttaaaatag

SEQ ID NO: 49438 - DNA, 642 bp, Artificial Sequence
  derived and/or modified sequence
atggctgagaccgaggaaaggtctctggacaacttctttgcaaagcgggacaaaaagaagaagaaggagcggtcgaacagagccgcttcagctgccggagccgctgggtccgctggtggttccagtggcgctgcgggtgccgcagggggaggagcaggcgctgggacacggcctggcgatgggggtaccgcaagtgccggagctgcgggtccaggggctgcaacgaaggctgttactaaggacgaggatgagtggaaggaacttgagcaaaaggaggtcgattactctggcctgagagtgcaggccatgcaaatcagtagcgagaaagaagaggacgacaatgagaaacgccaggaccctggcgataattgggaagaaggcggaggtggaggaggaggaatggaaaagagtagtggcccttggaataaaactgccccagttcaagcccctccagctcctgtaattgtaactgagacccccgagcctgccatgactagtggcgtgtacaggccacccggtgcacgtcttacgaccactcggaagacaccacagggtcccccagaaatctacagcgatacccaattcccctccctgcagagcacggcgaaacacgtggaatcccggaacagatacttaaagtag

SEQ ID NO: 49439 - DNA, 955 bp, Artificial Sequence
  derived and/or modified sequence
ccgagctcggagccccgcgggccgcgcccgccgccggccccacccatccgggtcgaggaggccgaggccatggctgagacggaggagcggagcctggacaacttctttgccaagagggacaagaagaagaagaaggagcggagcaaccgggcggcgagtgccgcgggcgcagcgggcagcgccggcggaagcagtggagccgcgggtgcggcgggcggcggggcgggcgcggggacccggccgggtgacggcgggaccgccagcgcgggggctgcgggcccaggggccgccaccaaggctgtgacgaaggacgaagatgaatggaaagaattggagcaaaaagaggttgattacagcggcctcagggttcaggcaatgcaaataagcagtgaaaaggaagaagacgataatgaaaagagacaagatccaggtgataactgggaagaaggtggaggtggtggtggaggtatggaaaaatcttcaggtccctggaataaaacagctccagtacaagcacctcctgctccagtaattgttacagaaaccccagaaccagcgatgactagtggtgtgtataggcctcctggggccaggttaaccacaacaaggaaaacaccacaaggaccaccagaaatctacagtgatacacagttcccatccctgcagtcaactgccaagcatgtagaaagccggaacaggtacttaaaatgaatgctacctggaattaaatgactacatatggcacatctacatcttactttagggacatgaattttttaaaataaataaaatgggaagaaatgtaaatgacatcagatggaaatgtgttttttggggtggcttttagaataaatcccagccttttcaccactttgagagcacagctggcttgaatttaaacctccacgtggacttgctcctctgctctgtcttaaaaaatgtgtaagggaccttg

SEQ ID NO: 49440 - DNA, 333 bp, Artificial Sequence
  derived and/or modified sequence
atgcagatcagcagcgagaaggaggaggacgacaacgagaagagacaggaccccggcgacaactgggaggagggcggcggcggcggcggcggcatggagaagagcagcggcccctggaacaagaccgcccccgtgcaggccccccccgcccccgtgatcgtgaccgagacccccgagcccgccatgaccagcggcgtgtacagaccccccggcgccagactgaccaccaccagaaagaccccccagggcccccccgagatctacagcgacacccagttccccagcctgcagagcaccgccaagcacgtggagagcagaaagtacctgaagtag

SEQ ID NO: 49441 - DNA, 333 bp, Artificial Sequence
  derived and/or modified sequence
atgcaaatatcaagcgagaaggaggaggacgataacgagaagaggcaggaccccggtgataattgggaggaggggggggggggtggaggtggcatggagaaaagcagtggcccgtggaacaaaacagcccccgtacaggcccctcctgcgcccgtgatagtcacagaaacccctgaacctgcaatgaccagtggcgtttaccggccccctggggccaggctgactacaacgaggaaaaccccccagggccctcctgagatctattctgacacccagtttccaagcctgcaaagtaccgcaaaacacgtggagtcacgaaaatatctgaagtag

SEQ ID NO: 49442 - DNA, 333 bp, Artificial Sequence
  derived and/or modified sequence
atgcagatcagcagcgagaaggaggaggatgacaatgagaagaggcaggaccccggggacaactgggaggagggcggcggcggcggcggcggcatggagaagagcagcggcccctggaacaagacagcccctgtgcaggcccccccagcccctgtgattgtgacagagaccccagagcccgccatgaccagcggcgtgtacagacctcctggggcccggctgaccaccaccaggaagaccccccagggccccccagagatctacagcgacacccagttccccagcctgcagagcacagccaagcacgtggagagcaggaagtacctgaagtag

SEQ ID NO: 49443 - DNA, 333 bp, Artificial Sequence
  derived and/or modified sequence
atgcagatcagcagcgagaaggaggaggacgacaacgagaagcggcaggaccccggtgataactgggaggaaggagggggggggggtggggggatggagaagtcaagcggtccctggaacaagaccgcccccgtgcaggctcccccagcccccgttatcgttactgaaactcctgaacctgctatgacatccggcgtgtatcgacctcctggagctcggttaaccaccactcgtaaaactccacagggccctcctgagatatacagcgatactcagttcccctctctgcaaagcacagctaagcacgtagagagccgcaagtacctgaaatag

SEQ ID NO: 49444 - DNA, 333 bp, Artificial Sequence
  derived and/or modified sequence
atgcaaatttcaagcgagaaggaagaggatgacaatgagaaacgtcaggacccgggtgataattgggaggaggggggaggcggtggcggtggcatggagaagtcctctggcccatggaacaagaccgctcctgtccaagccccacctgccccagtcattgtcactgagactcctgagcccgcaatgacttccggggtatacagaccccctggcgctaggctgactaccacacggaaaactccacagggccctcccgagatttactctgatactcaatttccctcattgcagtccacggccaagcacgtggaaagccggaagtacctcaagtag

SEQ ID NO: 49445 - protein, 242 aa, Artificial Sequence
  derived and/or modified sequence
MAAATRGCRPWGSLLGLLGLVSAAAAAWDLASLRCTLGAFCECDFRPDLPGLECDLAQHLAGQHLAKALVVKALKAFVRDPAPTKPLVLSLHGWTGTGKSYVSSLLAHYLFQGGLRSPRVHHFSPVLHFPHPSHIERYKKDLKSWVQGNLTACGRSLFLFDEMDKMPPGLMEVLRPFLGSSWVVYGTNYRKAIFIFIRWLLKLGHHGRAPPRRSGALPPAPAAPRPALRAQRAGPAGPGAKG

SEQ ID NO: 49446 - DNA, 729 bp, Artificial Sequence
  derived and/or modified sequence
atggctgcagctacaaggggctgccgcccttgggggtccttgctcggcctcctcggactcgtgagcgccgctgccgcagcctgggatcttgcttccctccggtgcacgctcggcgctttctgtgaatgtgattttcgtccagatctccccggactcgagtgtgacctggcccagcacctggctggccagcaccttgccaaagcgctggtggtgaaggcccttaaggcattcgtgcgcgatccagcccctaccaagcctctggttctgagcctgcatggctggactgggacagggaagagctatgtcagctccctgctagcccactatttatttcagggaggattgcggagtccgagggtgcatcacttcagccccgtgttgcatttcccccatcccagtcatatcgagcgatacaaaaaagacttgaaatcttgggtccagggaaacctcacagcctgcggacgaagcttgtttctctttgatgagatggataagatgccaccagggcttatggaagtacttaggcccttcctcggttcctcatgggtagtctatggcaccaattaccgtaaagctatatttatattcattcgctggctgcttaaactgggtcatcatggtagggcccctccgcgtaggagcggagccttgccacctgctcctgcagctccccgaccagcactgcgcgcacaacgggcagggccagctgggcctggcgcaaagggctag

SEQ ID NO: 49447 - DNA, 729 bp, Artificial Sequence
  derived and/or modified sequence
atggctgccgccaccagggggtgtagaccttggggttccttgttaggactgttgggcctggtatccgccgcggccgccgcatgggacctcgcgtctctgagatgcacgttaggggcattttgtgaatgtgacttcagacccgatttaccaggcctcgagtgcgacctcgcgcagcacctggcgggacagcacttagccaaggctttggtcgttaaggcacttaaagcgtttgtccgcgacccagccccaaccaaaccattagtactaagcctgcacgggtggaccggcacagggaaatcatacgtatcctccttgctggcccactacctcttccagggtgggctgcgaagcccaagggttcatcacttcagtcccgtgctccactttccacaccctagccacatcgagcggtataaaaaggatttgaaaagttgggtacagggaaatctgaccgcctgtggccgctccctgtttctgtttgatgaaatggacaagatgccacctggactcatggaggtgctgcgacctttcctaggctccagttgggttgtctatggcactaactaccgcaaagcaatatttatttttatcaggtggcttctaaaacttggacaccacggacgggccccccccagacgcagtggtgcacttcctcctgcacctgcagcacctcgccccgcgttaagagcacaaagggctgggcccgcaggccctggcgcgaaaggctag

SEQ ID NO: 49448 - DNA, 729 bp, Artificial Sequence
  derived and/or modified sequence
atggctgccgccacccgcggatgtcggccatggggttccctgcttgggttgctcgggctcgtgtctgccgccgctgcagcatgggacctcgccagtttaagatgtacattaggagcattttgtgagtgtgactttcgccctgacttaccaggactggagtgtgatctggctcagcaccttgccgggcagcacttggctaaggccctcgttgtcaaagcccttaaggcgtttgtacgggatcccgctcctaccaaaccacttgttctgtcactgcacggatggacaggaaccggtaagagctacgtgtcatctcttctggcccattatttgttccagggtggacttcgttcaccacgagtgcatcatttctccccagttctccacttcccccacccaagtcatatagagagatacaagaaagatctgaaaagttgggtccaaggaaaccttactgcttgtgggaggagtctgttcctttttgatgagatggacaagatgccccctggcttaatggaagtgcttcgcccgtttctgggaagttcatgggtggtatacgggactaactataggaaggccatatttatttttatccgctggcttttgaaactaggccatcacgggagggctccaccacgaagaagcggtgcgctgcctcctgcccctgctgcacctagaccggcacttagagctcaacgggctggtcctgctggcccaggcgccaaaggatag

SEQ ID NO: 49449 - DNA, 729 bp, Artificial Sequence
  derived and/or modified sequence
atggccgccgccaccagaggctgcagaccctggggcagcctgctgggcctgctgggcctggtgagcgccgccgccgccgcctgggacctggccagcctgagatgcaccctgggcgccttctgcgagtgcgacttcagacccgacctgcccggcctggagtgcgacctggcccagcacctggccggccagcacctggccaaggccctggtggtgaaggccctgaaggccttcgtgagagaccccgcccccaccaagcccctggtgctgagcctgcacggctggaccggcaccggcaagagctacgtgagcagcctgctggcccactacctgttccagggcggcctgagaagccccagagtgcaccacttcagccccgtgctgcacttcccccaccccagccacatcgagagatacaagaaggacctgaagagctgggtgcagggcaacctgaccgcctgcggcagaagcctgttcctgttcgacgagatggacaagatgccccccggcctgatggaggtgctgagacccttcctgggcagcagctgggtggtgtacggcaccaactacagaaaggccatcttcatcttcatcagatggctgctgaagctgggccaccacggcagagccccccccagaagaagcggcgccctgccccccgcccccgccgcccccagacccgccctgagagcccagagagccggccccgccggccccggcgccaagggctag

SEQ ID NO: 49450 - DNA, 1370 bp, Artificial Sequence
  derived and/or modified sequence
aacgagctcgggcctcacccggatggcggctgcgacgcgcggctgccggccctggggctcgctcctcgggctgctcgggctggtctcggccgcggccgccgcctgggacctggcttccctgcgctgcaccttgggcgccttttgcgaatgcgacttccggcccgacttgccgggtctggagtgtgacctggctcagcacctggccggccagcatctggccaaggcgctggtggtgaaggcgctgaaggcctttgtgcgggacccagcccccaccaagccgctggtcctctccctgcacggctggaccggcaccggcaaatcctatgtcagctccctgctggcgcactacctcttccagggcggcctccgcagcccccgcgtgcaccacttttctcccgtcctccacttcccccaccccagccacatcgagcgctacaagaaggatctgaagagctgggtccaagggaacctcactgcctgtggccgctccctcttcctcttcgatgagatggacaagatgcccccaggcctgatggaagtcctgcggcctttcctgggctcctcctgggtggtatacgggaccaattaccgcaaagccatcttcatcttcatcagatggcttctcaaactcgggcatcatggaagagcgcctcctagacgcagtggtgcccttcctcccgctccagcggcaccacgtccggcactgcgtgctcaacgagctggcccagctgggcctggagccaagggatgaggttgtccaggctgtgctggacagcaccaccttcttccctgaagacgagcagctcttctcctccaacggctgcaagaccgtggcctcccgaatcgccttcttcctctgactctctgagtggtgtcctcggcccccctgatggccaggccatgcaggaaaggccaggggcctctgtcacaggaacccagagcaccaagtgagatgaacggagtgtcggctaggccacgggacagatggccaggaagggccctggcctctaaactggctcgagagcatcttggccccggccaccttccccagggaaacccctggtcaccccagaacctcactgagccttgacctccccctgcagcctgagccttcttactgtgaattataactcagggactgtggctcgtggcggtgctccctcctcagtctgccacccttgccccttgcctccttggtcgggcaccatacctcctcccctccaccccacaccctgtgtccatatcaagccaggtggagccttctcagtttccagaaatggagggactcaagctgccacttgggcctggttttagatgtttttaattttgtaaaagaaaacaagtataataaactcagctgtgggaccaga

SEQ ID NO: 49451 - DNA, 729 bp, Artificial Sequence
  derived and/or modified sequence
atggccgccgcaacacgaggttgtagaccctggggttcacttctgggccttctgggtctggtgtccgcagcagctgctgcatgggatttggcgagtcttaggtgtaccctcggcgctttttgcgagtgtgactttcgccccgacctgcccggcctggaatgtgacctggcacaacacttggcagggcagcacctggctaaggccctggtggtgaaggcattgaaggccttcgttagagaccccgcacccaccaaacccctcgttttatcactgcacggttggacaggcaccggcaagagctatgtgtccagcctgctggcacactacctgttccagggcggactgcggtcccctcgcgtccaccatttttctcccgtgctgcacttcccccacccttctcatattgaaaggtacaaaaaggatctgaaatcctgggtgcagggcaaccttacagcctgcgggaggagcctcttcctctttgacgaaatggacaagatgccacctggactgatggaagtgctgaggccgttcctggggagcagctgggttgtctacggcacaaactaccgaaaggccatatttatttttatcagatggttgttgaagttaggacatcacggtagggcccctccccgcaggtccggagctctgccacccgcccccgctgcgccacggcctgctctgcgggcacaacgagccggacccgccggacccggggccaaggggtag

SEQ ID NO: 49452 - DNA, 729 bp, Artificial Sequence
  derived and/or modified sequence
atggctgctgccacccggggctgccggccctggggcagcctgctgggcctgctgggcctggtgtctgctgctgctgctgcctgggacctggccagcctgcgctgcaccctgggcgccttctgtgaatgtgacttccggccagacctgcccggcctggagtgtgacctggcccagcacctggccggccagcacctggccaaggccctggtggtgaaggccctgaaggcctttgtgcgggaccctgcccccaccaagcccctggtgctgagcctgcacggctggacaggaacaggcaagagctatgtgagcagcctgctggcccactacctgttccagggcggcctgcggagcccccgggtgcaccacttcagccctgtgctgcacttcccccaccccagccacatcgagcgctacaagaaggacctgaagtcctgggtgcagggcaacctgacagcctgtggccgcagcctcttcctgtttgatgagatggacaagatgcctcctggcctgatggaggtgctgcggcccttcctgggcagctcctgggtggtgtatggcaccaactacaggaaggccatcttcatcttcatccgctggctgctgaagctgggccaccacggccgggccccaccccggcgcagcggggccctgcccccagccccagctgcccccaggcctgccctgcgggcccagagagctggccctgctggccctggggccaagggctag

SEQ ID NO: 49453 - DNA, 729 bp, Artificial Sequence
  derived and/or modified sequence
atggccgccgccacccggggctgccggccctggggcagcctgctgggactgctaggcctggtatccgccgccgcagccgcatgggatcttgcatccctgcggtgtacacttggggccttctgcgagtgcgactttcgccctgatctcccaggtctggaatgcgatcttgcacagcatctggccggacaacacttggctaaggctttagttgtgaaagccttgaaggcattcgtgcgggatcctgctcccacaaaacctttagtgttaagtcttcacggttggacaggaacaggaaagtcttacgtgagctcccttttggctcactacctgttccagggtgggctgcgatcacctagggttcaccatttcagtcctgtgttgcacttccctcatcccagccatatagagcgctacaagaaagatctcaaatcttgggtgcaggggaacttgaccgcttgtgggcgctccctctttttgttcgacgagatggacaagatgcctcccggcttgatggaggtgctcagaccgttcctgggatctagctgggtagtgtacgggactaactatagaaaggccattttcattttcattcgctggctccttaaacttggccaccatggccgtgctcctcccaggcgctcaggcgccctgccgccagctcctgccgcacctcggcctgcgttacgcgcccagagggccggccctgcggggcccggggctaaggggtag

SEQ ID NO: 49454 - RNA, 729 nt, Artificial Sequence
  derived and/or modified sequence
auggcugccgccaccaggggguguagaccuugggguuccuuguuaggacuguugggccugguauccgccgcggccgccgcaugggaccucgcgucucugagaugcacguuaggggcauuuugugaaugugacuucagacccgauuuaccaggccucgagugcgaccucgcgcagcaccuggcgggacagcacuuagccaaggcuuuggucguuaaggcacuuaaagcguuuguccgcgacccagccccaaccaaaccauuaguacuaagccugcacggguggaccggcacagggaaaucauacguauccuccuugcuggcccacuaccucuuccagggugggcugcgaagcccaaggguucaucacuucagucccgugcuccacuuuccacacccuagccacaucgagcgguauaaaaaggauuugaaaaguuggguacagggaaaucugaccgccuguggccgcucccuguuucuguuugaugaaauggacaagaugccaccuggacucauggaggugcugcgaccuuuccuaggcuccaguuggguugucuauggcacuaacuaccgcaaagcaauauuuauuuuuaucagguggcuucuaaaacuuggacaccacggacgggccccccccagacgcaguggugcacuuccuccugcaccugcagcaccucgccccgcguuaagagcacaaagggcugggcccgcaggcccuggcgcgaaaggcuag

SEQ ID NO: 49455 - RNA, 729 nt, Artificial Sequence
  derived and/or modified sequence
auggcugccgccacccgcggaugucggccaugggguucccugcuuggguugcucgggcucgugucugccgccgcugcagcaugggaccucgccaguuuaagauguacauuaggagcauuuugugagugugacuuucgcccugacuuaccaggacuggagugugaucuggcucagcaccuugccgggcagcacuuggcuaaggcccucguugucaaagcccuuaaggcguuuguacgggaucccgcuccuaccaaaccacuuguucugucacugcacggauggacaggaaccgguaagagcuacgugucaucucuucuggcccauuauuuguuccaggguggacuucguucaccacgagugcaucauuucuccccaguucuccacuucccccacccaagucauauagagagauacaagaaagaucugaaaaguuggguccaaggaaaccuuacugcuugugggaggagucuguuccuuuuugaugagauggacaagaugcccccuggcuuaauggaagugcuucgcccguuucugggaaguucaugggugguauacgggacuaacuauaggaaggccauauuuauuuuuauccgcuggcuuuugaaacuaggccaucacgggagggcuccaccacgaagaagcggugcgcugccuccugccccugcugcaccuagaccggcacuuagagcucaacgggcugguccugcuggcccaggcgccaaaggauag

SEQ ID NO: 49456 - protein, 72 aa, Artificial Sequence
  derived and/or modified sequence
MAAATRGCRPWGSLLGLLGLVSAAAAAWDLASLRCTLGAFCECDFRPDLPEGSEELGPREPHCLWPLPLPLR

SEQ ID NO: 49457 - DNA, 219 bp, Artificial Sequence
  derived and/or modified sequence
atggcagcagccacacgtggctgcaggccttggggctcccttctcggccttctggggctagtgagcgccgcagcagccgcttgggatctggcgagcctcaggtgtacgctgggagcattctgtgaatgtgacttcagacccgatctgccagagggttccgaggagttgggacctcgcgaaccccactgtctgtggcccttgccactgcccctccgttag

SEQ ID NO: 49458 - DNA, 219 bp, Artificial Sequence
  derived and/or modified sequence
atggccgctgctacgagagggtgtagaccatggggcagcctcctcgggctcctcggattagtgagtgccgccgccgctgcttgggatttggctagtctgcgctgtaccctgggcgccttctgcgagtgcgactttcgacctgatttgcctgagggatccgaagagcttgggcctcgggaaccgcactgcctttggcccctgccactccctctgcgttag

SEQ ID NO: 49459 - DNA, 219 bp, Artificial Sequence
  derived and/or modified sequence
atggccgccgccaccagaggctgcagaccctggggcagcctgctgggcctgctgggcctggtgagcgccgccgccgccgcctgggacctggccagcctgagatgcaccctgggcgccttctgcgagtgcgacttcagacccgacctgcccgagggcagcgaggagctgggccccagagagccccactgcctgtggcccctgcccctgcccctgagatag

SEQ ID NO: 49460 - DNA, 219 bp, Artificial Sequence
  derived and/or modified sequence
atggcagccgcaactcgtgggtgtagaccttggggctctctgctgggactgttaggccttgtcagcgcggccgctgccgcctgggatcttgctagcttacggtgcacccttggggccttttgcgaatgtgacttcaggcctgatctgcctgaggggagtgaagaactcggcccacgggaaccccactgtctgtggcccctgccattgccgttgcggtag

SEQ ID NO: 49461 - DNA, 219 bp, Artificial Sequence
  derived and/or modified sequence
atggctgctgccacccggggctgccggccctggggcagcctgctgggcctgctgggcctggtgtctgctgctgctgctgcctgggacctggccagcctgcgctgcaccctgggcgccttctgtgaatgtgacttccggccagacctgcctgagggcagcgaggagctgggcccccgggagccccactgcctgtggcccctgcccctgcccctgaggtag

SEQ ID NO: 49462 - DNA, 219 bp, Artificial Sequence
  derived and/or modified sequence
atggccgccgccacccggggctgccggccctggggcagcctgctgggactccttgggctcgtctcagccgccgccgccgcctgggatcttgcatctctgcgttgtacgctgggggcattctgcgagtgcgacttccgtcctgacttgccggagggttctgaagagcttggtcctagggagcctcactgcctgtggccacttcctctgccactcaggtag

SEQ ID NO: 49463 - RNA, 219 nt, Artificial Sequence
  derived and/or modified sequence
auggccgcugcuacgagaggguguagaccauggggcagccuccucgggcuccucggauuagugagugccgccgccgcugcuugggauuuggcuagucugcgcuguacccugggcgccuucugcgagugcgacuuucgaccugauuugccugagggauccgaagagcuugggccucgggaaccgcacugccuuuggccccugccacucccucugcguuag

SEQ ID NO: 49464 - DNA, 732 bp, Artificial Sequence
  derived and/or modified sequence
atggacgccctcgttgaagatgacatctgcattctgaatcatgagaaagctcacaaacgtgacacagttactcccgtctcgatctactcaggcgatgagagcgtcgcatcccacttcgcgctggttaccgcatatgaggacataaagaagcgactgaaggacagtgagaaagagaatagtttgcttaagaagagaatccgattcttagaggaaaagctcatcgcaagatttgaggaagagacctcgtccgtcgggcgcgaacaagtgaataaggcttaccacgcctatagagaagtgtgcatcgaccgggataacctcaaatctaagctggataaaatgaataaggataatagcgagtcgttaaaagtacttaacgaacaactacaaagcaaagaggtggagcttcttcagctgcgcactgaagtcgagacccaacaggtcatgcggaatctgaacccaccttcatctaattgggaggttgaaaagctgtcatgtgatctgaagatccatgggttagagcaggaactagagctcatgcgaaaagagtgttccgatttgaagattgagctacagaaagcgaagcagaccgatccttaccaggaagataacctgaagtctcgtgacctgcagaagctctctatttcgcggcagtccatctgtagcacagcatggagcgctgtcgcacagagttgggacagcatgaacttcgaggactgctcactgtttgcatag

SEQ ID NO: 49465 - DNA, 732 bp, Artificial Sequence
  derived and/or modified sequence
atggacgccttagtggaggatgatatctgcattctcaatcacgaaaaggcccataagcgagatacggtgacaccggtgagcatttactccggggacgaaagcgtcgcatcacattttgcccttgtcactgcctatgaagacatcaaaaagagactcaaagactcagagaaggaaaactccctgctgaagaaaaggatccgcttcctggaggagaaactaatcgcacgcttcgaagaggagacctcctccgtgggccgagaacaggtgaacaaagcctatcatgcatatcgggaggtttgtatcgaccgggataatctgaagtccaaattggataaaatgaataaggataatagcgagtcccttaaagtcttaaacgagcagctccagtccaaggaggtcgagcttttacaactgaggacagaagtcgagacacagcaggtaatgcggaatctgaatcccccctcgagtaactgggaggtcgaaaagctatcctgcgatcttaagattcacggactggagcaggagcttgaacttatgaggaaagagtgtagcgatctcaaaattgagttgcagaaagcaaaacaaactgatccgtatcaggaagataatctgaagagtcgcgatctccagaaactgtctatcagtcgacagtctatctgtagtaccgcatggagcgctgtggctcagtcatgggacagcatgaactttgaagattgcagcctgttcgcttag

SEQ ID NO: 49466 - DNA, 732 bp, Artificial Sequence
  derived and/or modified sequence
atggatgccctggtggaggatgacatctgcatcctgaaccacgagaaggcccacaagagggacacagtgacccctgtgtccatctacagcggagatgagagcgtggccagccactttgccctggtgacagcctatgaggacatcaagaagaggctgaaggacagcgagaaggagaacagcctgctgaagaagaggatccgcttcctggaggagaagctgattgccaggtttgaggaggagaccagctctgtgggccgggagcaggtgaacaaggcctaccacgcctaccgggaggtgtgcatcgaccgggacaacctgaagagcaagctggacaagatgaacaaggacaacagcgagagcctgaaggtgctgaatgagcagctgcagagcaaggaggtggagctgctgcagctgaggacagaggtggagacccagcaggtgatgaggaacctgaacccccccagcagcaactgggaggtggagaagctgagctgtgacctgaagatccacggcctggagcaggagctggagctgatgaggaaggagtgcagcgacctgaagattgagctgcagaaggccaagcagacagacccctaccaggaggacaacctgaagagccgggacctgcagaagctgagcatcagccggcagagcatctgcagcacagcctggagcgctgtggcccagagctgggacagcatgaactttgaggactgcagcctgtttgcctag

SEQ ID NO: 49467 - DNA, 732 bp, Artificial Sequence
  derived and/or modified sequence
atggacgccctggtggaggacgacatctgcatcctgaaccacgagaaggcccacaagcgtgatactgtcaccccggttagcatttattcaggcgatgagagcgtagcaagtcatttcgccctcgtcacagcttatgaagacatcaagaagcggctgaaagactcggaaaaggagaactctcttttgaagaaacgcattcggtttctggaagagaaattgatcgctcgctttgaggaggagacatcctcagtgggacgggagcaggtcaacaaagcctaccatgcatatcgggaggtgtgtattgaccgcgacaacttaaaatccaaactcgacaaaatgaacaaggataactccgaaagtctgaaggttctgaacgagcagctgcagtcgaaggaggtggaactcctgcagttgcgcactgaggtggaaactcaacaagtaatgagaaatcttaacccacccagcagcaattgggaggttgagaaactttcttgcgacctgaaaatccatggactggagcaggaactggagctcatgaggaaggagtgttctgacctcaagatcgagttacagaaagcaaaacagacggatccatatcaggaggacaatctgaaatctcgggacctgcagaagttgtctatctcacggcagagcatttgctcgaccgcttggtccgccgtcgcccagagctgggacagtatgaacttcgaggactgttctctattcgcctag

SEQ ID NO: 49468 - DNA, 732 bp, Artificial Sequence
  derived and/or modified sequence
atggacgccctggtggaggacgacatctgcatcctgaaccacgagaaagctcataagcgtgacacggttacgcctgtttccatttattccggagatgagtcagtggcatctcattttgcactggtgactgcatatgaggacataaaaaagcggctgaaggactccgagaaagagaattcactcctgaagaagcgcatcagattcctcgaagaaaagcttattgcccgtttcgaggaagaaaccagttctgtgggaagggagcaagtgaacaaggcttatcatgcctaccgggaagtgtgtattgacagggacaacttgaaatccaagcttgataagatgaacaaggacaatagtgagtcactcaaagtattaaacgagcaactgcagtctaaagaggtggaactactacaattaaggaccgaagtggaaacacagcaggtcatgagaaacttgaatccaccatccagcaattgggaagtggaaaagctctcttgcgacctgaaaatacacggcctcgagcaggagcttgaactgatgagaaaagaatgtagtgacttgaagatcgagctccagaaggcaaagcagacggatccttaccaagaggataacttgaagagccgcgaccttcagaaactgtctatttcacgccagtccatatgtagcactgcctggtccgccgtggcacagtcctgggactcaatgaacttcgaagattgtagccttttcgcttag

SEQ ID NO: 49469 - DNA, 732 bp, Artificial Sequence
  derived and/or modified sequence
atggatgccctggtagaggatgatatttgtattctcaatcacgagaaggcacacaagagggatactgttacacccgtgagcatatatagcggcgacgaatctgtggcctctcacttcgccctggtgaccgcgtatgaggatattaaaaaacgcctcaaggattcagagaaagagaactcgctgctcaaaaagagaatccgattcctggaggagaaactgattgctcggtttgaggaagagacttcaagtgtgggcagggagcaggtcaataaggcataccatgcgtatcgggaagtgtgtatcgaccgggacaacttaaaatcgaaactcgataagatgaacaaggacaatagcgagtctctgaaggtgctgaatgagcagctgcaaagtaaagaggtcgagctgctgcagctgcggaccgaggttgaaacacagcaggttatgcggaatttgaaccctccctcctctaattgggaagtagagaagctatcttgcgacttaaagattcatggcctagaacaggagctggaacttatgcggaaagaatgttccgatctgaagatcgagttacaaaaagcaaagcaaacagatccgtatcaggaggataacttgaagtctagggacctgcaaaagctgtctatctccagacagtcaatctgctccactgcctggtcagccgtcgcccagtcatgggacagcatgaacttcgaagactgttcgctgttcgcctag

SEQ ID NO: 49470 - DNA, 732 bp, Artificial Sequence
  derived and/or modified sequence
atggatgcattggtcgaagacgatatctgtattttgaaccatgagaaggcacacaaacgggacacggtcacaccagtctccatctactccggggatgagtcagtggcctcgcattttgccttggttactgcgtatgaggatattaagaagcgactcaaagacagcgagaaggaaaacagtttacttaaaaaaaggataagattcttggaggagaaactgattgctcggttcgaagaggagacttcgtccgtaggcagggagcaggtgaacaaagcttatcacgcctaccgcgaggtgtgtatagacagggataacctcaagtccaagctcgacaagatgaataaggataactccgagagcctgaaggtcttgaatgaacagctgcagagcaaagaggtcgagctcctccagttgaggactgaggtggagacgcagcaggttatgcgaaaccttaaccccccatcctctaactgggaggtcgagaagttaagttgtgacctcaaaatccatggcttggagcaagagctggagcttatgcggaaagaatgtagcgatttaaaaatcgaactccagaaagccaaacaaacagatccataccaagaagataatttaaaatctagggacctgcagaaactcagtattagtaggcagagtatatgttcaactgcctggtctgccgtggcccaatcctgggacagtatgaacttcgaagactgctccctatttgcatag

SEQ ID NO: 49471 - DNA, 732 bp, Artificial Sequence
  derived and/or modified sequence
atggacgccctggtggaggacgacatctgcatcctgaaccacgagaaggcccacaagagagacaccgtgacccccgtgagcatctacagcggcgacgagagcgtggccagccacttcgccctggtgaccgcctacgaggacatcaagaagagactgaaggacagcgagaaggagaacagcctgctgaagaagagaatcagattcctggaggagaagctgatcgccagattcgaggaggagaccagcagcgtgggcagagagcaggtgaacaaggcctaccacgcctacagagaggtgtgcatcgacagagacaacctgaagagcaagctggacaagatgaacaaggacaacagcgagagcctgaaggtgctgaacgagcagctgcagagcaaggaggtggagctgctgcagctgagaaccgaggtggagacccagcaggtgatgagaaacctgaacccccccagcagcaactgggaggtggagaagctgagctgcgacctgaagatccacggcctggagcaggagctggagctgatgagaaaggagtgcagcgacctgaagatcgagctgcagaaggccaagcagaccgacccctaccaggaggacaacctgaagagcagagacctgcagaagctgagcatcagcagacagagcatctgcagcaccgcctggagcgccgtggcccagagctgggacagcatgaacttcgaggactgcagcctgttcgcctag

SEQ ID NO: 49472 - DNA, 699 bp, Artificial Sequence
  derived and/or modified sequence
atggacgcattggttgaagacgacatttgcatactaaatcatgaaaaggcccacaagcgcgatacggtgaccccagtatcaatatacagcggtgacgagtccgtcgcctcacactttgctctcgtcacagcctacgaggatatcaagaaacgcctgaaggattcagaaaaggagaactctctcctcaaaaagagaatcaggtttctggaggagaagctcattgcccggttcgaagaagaaaccagttcagttggaagggagcaggttaataaggcatatcacgcgtacagagaagtatgtatcgatagagacaacttaaagtccaagctcgacaagatgaacaaggataattcagaaagtctgaaggtgctgaacgagcagctacagagcaaggaggtggaactcctccagttgcgtacggaggtcgaaacccagcaggttatgcgcaaccttaatcccccttctagtaactgggaggttgaaaagctctcttgtgatttgaagatacatggcctggagcaggaactggagctgatgcgaaaagagtgttcagatttgaaaattgagctgcagaaagctaagcaaactgacccctaccaagaagataaccttaagagcagagatctccaaaagcttagtatctcgagggtgagtgtggcccagcctggcgtgcagtggcgcaatcatggaatcgcttag

SEQ ID NO: 49473 - DNA, 648 bp, Artificial Sequence
  derived and/or modified sequence
atggatgctttagttgaggacgacatttgcatcttaaatcacgaaaaggcgcacaaaagagatactgtgacccccgtctcgatctactcaggagacgagtccgtggctagccacttcgccctcgtcaccgcttatgaggatatcaagaagagactaaaggactccgaaaaggagaactctctcctgaaaaagcgcatccgcttcctggaagagaaactgatcgccagatttgaggaggaaacctctagtgtggggcgcgagcaggtgaacaaagcctaccatgcatacagagaagtttgcattgatcgtgacaatcttaagtctaaactggacaagatgaacaaagacaacagtgagtcactgaaggtgcttaacgagcaactccagtcgaaagaggtcgagttgttgcagctgagaaccgaagttgaaacacagcaggtcatgagaaaccttaatcccccatccagcaactgggaggtggaaaagttgagctgcgacctgaaaatccacggcctggaacaggagctagagctgatgaggaaggaatgctccgacttgaagattgagctgcaaaaggccaagcagaccgacccataccaagaggacaacctcaaatcccgtgatctgcagaagttgagcatatcctag

SEQ ID NO: 49474 - DNA, 288 bp, Artificial Sequence
  derived and/or modified sequence
atggacgcattggtggaagacgacatctgtatcctgaaccatgagaaggctcacaagagagataccgttactcccgtctcaatatatagtggcgacgagtctgtggcaagccattttgccctggttacagcctacgaagatatcaagaaacggttaaaggattctgagaaggagaacagcctactgaagaagaggatccgttttctggaggaaaagcttatcgcccggttcgaggaagagacttcctctgtcggtcgggaacaagtgaacaaagcctaccatgcctag

SEQ ID NO: 49475 - DNA, 699 bp, Artificial Sequence
  derived and/or modified sequence
atggatgccctggtggaggatgacatctgcatcctgaaccacgagaaggcccacaagagggacacagtgacccctgtgtccatctacagcggagatgagagcgtggccagccactttgccctggtgacagcctatgaggacatcaagaagaggctgaaggacagcgagaaggagaacagcctgctgaagaagaggatccgcttcctggaggagaagctgattgccaggtttgaggaggagaccagctctgtgggccgggagcaggtgaacaaggcctaccacgcctaccgggaggtgtgcatcgaccgggacaacctgaagagcaagctggacaagatgaacaaggacaacagcgagagcctgaaggtgctgaatgagcagctgcagagcaaggaggtggagctgctgcagctgaggacagaggtggagacccagcaggtgatgaggaacctgaacccccccagcagcaactgggaggtggagaagctgagctgtgacctgaagatccacggcctggagcaggagctggagctgatgaggaaggagtgcagcgacctgaagattgagctgcagaaggccaagcagacagacccctaccaggaggacaacctgaagagccgggacctgcagaagctgagcatcagccgggtgtctgtggcccagcccggggtgcagtggagaaatcatggaattgcctag

SEQ ID NO: 49476 - DNA, 648 bp, Artificial Sequence
  derived and/or modified sequence
atggatgccctggtggaggatgacatctgcatcctgaaccacgagaaggcccacaagagggacacagtgacccctgtgtccatctacagcggagatgagagcgtggccagccactttgccctggtgacagcctatgaggacatcaagaagaggctgaaggacagcgagaaggagaacagcctgctgaagaagaggatccgcttcctggaggagaagctgattgccaggtttgaggaggagaccagctctgtgggccgggagcaggtgaacaaggcctaccacgcctaccgggaggtgtgcatcgaccgggacaacctgaagagcaagctggacaagatgaacaaggacaacagcgagagcctgaaggtgctgaatgagcagctgcagagcaaggaggtggagctgctgcagctgaggacagaggtggagacccagcaggtgatgaggaacctgaacccccccagcagcaactgggaggtggagaagctgagctgtgacctgaagatccacggcctggagcaggagctggagctgatgaggaaggagtgcagcgacctgaagattgagctgcagaaggccaagcagacagacccctaccaggaggacaacctgaagagccgggacctgcagaagctgagcatctcctag

SEQ ID NO: 49477 - DNA, 288 bp, Artificial Sequence
  derived and/or modified sequence
atggatgccctggtggaggatgacatctgcatcctgaaccacgagaaggcccacaagagggacacagtgacccctgtgtccatctacagcggagatgagagcgtggccagccactttgccctggtgacagcctatgaggacatcaagaagaggctgaaggacagcgagaaggagaacagcctgctgaagaagaggatccgcttcctggaggagaagctgattgccaggtttgaggaggagaccagctctgtgggccgggagcaggtgaacaaggcctaccacgcctag

SEQ ID NO: 49478 - DNA, 699 bp, Artificial Sequence
  derived and/or modified sequence
atggacgccctggtggaggacgacatctgcatcctgaaccacgagaaggcacacaagcgggatacagtgacgcccgtgtccatctattcaggagacgaaagcgtcgcctcccacttcgctctggtgacagcttatgaagatatcaaaaagaggctgaaagatagcgagaaggaaaactcgttacttaaaaagcggatacggttcctggaggagaaactcatcgcccggttcgaggaggagacctcgtccgttggccgggagcaggtgaacaaggcctatcacgcctaccgagaggtgtgtatcgatcgcgataacctgaaaagcaaactggacaagatgaacaaagacaactccgaatctctgaaagtgctgaacgaacagcttcagtccaaggaagtggagctgctgcagctccgcaccgaggttgagacacaacaggtcatgaggaatctcaacccgccctcctccaactgggaggttgaaaaactttcgtgtgatttgaaaatccacggcttggagcaagagctcgagctgatgagaaaggagtgcagcgaccttaagatagaactgcagaaggctaaacagacggacccctaccaggaggataaccttaagtccagagatctgcagaaactgagtataagcagagtctccgttgcacaacccggcgttcaatggcggaaccacggcattgcctag

SEQ ID NO: 49479 - DNA, 648 bp, Artificial Sequence
  derived and/or modified sequence
atggacgccctggtggaggacgacatctgcatcctgaaccacgagaaggctcacaagcgggatactgttactcctgtgtcaatttatagcggcgacgagtcagtcgcatctcacttcgcccttgttactgcctatgaggatattaaaaagagactcaaggattccgagaaggagaacagcctgctgaagaagcgaatacgctttttggaagaaaaattgatcgccagatttgaagaggaaacatcaagcgttggtcgggaacaagtaaacaaagcttaccatgcctatagagaggtgtgtattgatcgggataatctcaagagcaaattagacaagatgaataaagataatagtgagtcgctgaaggttctcaatgagcaattacaaagcaaagaggtggaactcctacagttgcgcacagaggtggagactcagcaggttatgagaaaccttaaccccccctcatccaattgggaggtggagaaactctcttgcgatttaaagattcatggacttgagcaggaattggagttgatgaggaaggaatgcagcgatctcaaaatcgaattgcagaaagcgaagcagactgatccataccaggaggataatctaaagtcccgcgaccttcagaagctgagtatttcatag

SEQ ID NO: 49480 - DNA, 288 bp, Artificial Sequence
  derived and/or modified sequence
atggacgccctggtggaggacgacatctgcatcctgaaccacgagaaagctcacaagcgggacactgtaactccagtctccatttattctggtgatgagtcagtcgcgtcacattttgcactggtgaccgcttatgaagatatcaaaaaacggttgaaagattccgagaaggaaaatagcctcctgaaaaaaagaattcggtttctggaggagaagcttatcgctcggttcgaagaggaaacctctagtgtaggccgggagcaagtaaataaagcatatcacgcctag

SEQ ID NO: 49481 - DNA, 699 bp, Artificial Sequence
  derived and/or modified sequence
atggatgcattggttgaggacgatatctgcatcctcaatcatgaaaaagcacataagagggacaccgtcacacctgtgagtatttattccggcgacgagtcagtcgcatctcattttgcgctggtgactgcatacgaggacatcaaaaagcgcctgaaggattccgaaaaagagaactcactcctgaaaaagcgcatccggtttctggaagagaagctgatcgcaaggtttgaggaggagactagttccgtgggacgcgaacaggtgaataaggcttatcatgcctatcgggaggtgtgtattgacagagataatctcaagagcaaactggacaagatgaataaggataactccgaaagtttaaaagtcttgaacgaacagcttcaatcaaaggaggtggagttgctgcagctgaggacggaggtcgagacacagcaggttatgagaaacttaaacccaccctcttccaattgggaagtggagaagctgagctgcgacctcaagatccatggactggagcaggagctcgagctcatgcggaaggagtgttccgaccttaaaatagaactccaaaaagcaaagcaaactgatccttaccaagaggacaatctcaaatctagggatttgcagaagctgtctatttcacgcgtaagcgtagcgcagccaggagtgcagtggcggaaccacggtatcgcatag

SEQ ID NO: 49482 - DNA, 648 bp, Artificial Sequence
  derived and/or modified sequence
atggacgcactggtggaggacgacatctgtatcctgaatcacgaaaaggcccataagagagatacagtgacccctgtgtctatttactccggtgacgaatctgtggcctcccacttcgccctcgtgactgcttatgaagatatcaaaaagcgactcaaagatagtgagaaagagaacagcctgctgaaaaagcgtattagattcctggaagagaagctcattgctagatttgaagaggaaacgtctagcgtaggccgagaacaggtgaacaaagcttaccacgcatatagggaggtgtgcatagatagggataatttgaagtctaagttagataaaatgaacaaggacaattcggaatctctgaaggtgcttaatgaacaactgcaaagcaaggaggtcgagcttctgcagctccggacagaggttgagacacaacaggtgatgagaaatttgaacccgccatcctcaaattgggaggtggaaaagttatcatgcgatctgaaaatccacggtttggaacaggagctcgagctgatgagaaaagaatgctctgacttaaaaattgagcttcagaaagctaagcagactgatccttaccaagaagataacttaaagtcgagagatctccagaaactgtccatctcttag

SEQ ID NO: 49483 - DNA, 288 bp, Artificial Sequence
  derived and/or modified sequence
atggatgccctggtcgaggacgacatctgcattcttaatcatgagaaagctcacaaacgggatacagtgacacccgtatctatatacagcggagatgagtctgttgcctcccatttcgcattagttaccgcttacgaggatattaaaaaacgcctcaaagacagcgagaaagagaattcccttttgaagaagcggattagattcctcgaggaaaaactcatcgccagatttgaggaggagacctctagtgtcggtagagagcaggtgaacaaggcttatcatgcttag

SEQ ID NO: 49484 - DNA, 699 bp, Artificial Sequence
  derived and/or modified sequence
atggacgccctggtggaggacgacatctgcatcctgaaccacgagaaggcccacaagagagacaccgtgacccccgtgagcatctacagcggcgacgagagcgtggccagccacttcgccctggtgaccgcctacgaggacatcaagaagagactgaaggacagcgagaaggagaacagcctgctgaagaagagaatcagattcctggaggagaagctgatcgccagattcgaggaggagaccagcagcgtgggcagagagcaggtgaacaaggcctaccacgcctacagagaggtgtgcatcgacagagacaacctgaagagcaagctggacaagatgaacaaggacaacagcgagagcctgaaggtgctgaacgagcagctgcagagcaaggaggtggagctgctgcagctgagaaccgaggtggagacccagcaggtgatgagaaacctgaacccccccagcagcaactgggaggtggagaagctgagctgcgacctgaagatccacggcctggagcaggagctggagctgatgagaaaggagtgcagcgacctgaagatcgagctgcagaaggccaagcagaccgacccctaccaggaggacaacctgaagagcagagacctgcagaagctgagcatcagcagagtgagcgtggcccagcccggcgtgcagtggagaaaccacggcatcgcctag

SEQ ID NO: 49485 - DNA, 648 bp, Artificial Sequence
  derived and/or modified sequence
atggacgccctggtggaggacgacatctgcatcctgaaccacgagaaggcccacaagagagacaccgtgacccccgtgagcatctacagcggcgacgagagcgtggccagccacttcgccctggtgaccgcctacgaggacatcaagaagagactgaaggacagcgagaaggagaacagcctgctgaagaagagaatcagattcctggaggagaagctgatcgccagattcgaggaggagaccagcagcgtgggcagagagcaggtgaacaaggcctaccacgcctacagagaggtgtgcatcgacagagacaacctgaagagcaagctggacaagatgaacaaggacaacagcgagagcctgaaggtgctgaacgagcagctgcagagcaaggaggtggagctgctgcagctgagaaccgaggtggagacccagcaggtgatgagaaacctgaacccccccagcagcaactgggaggtggagaagctgagctgcgacctgaagatccacggcctggagcaggagctggagctgatgagaaaggagtgcagcgacctgaagatcgagctgcagaaggccaagcagaccgacccctaccaggaggacaacctgaagagcagagacctgcagaagctgagcatcagctag

SEQ ID NO: 49486 - DNA, 288 bp, Artificial Sequence
  derived and/or modified sequence
atggacgccctggtggaggacgacatctgcatcctgaaccacgagaaggcccacaagagagacaccgtgacccccgtgagcatctacagcggcgacgagagcgtggccagccacttcgccctggtgaccgcctacgaggacatcaagaagagactgaaggacagcgagaaggagaacagcctgctgaagaagagaatcagattcctggaggagaagctgatcgccagattcgaggaggagaccagcagcgtgggcagagagcaggtgaacaaggcctaccacgcctag

SEQ ID NO: 49487 - protein, 77 aa, Artificial Sequence
  derived and/or modified sequence
MRAPGCGRLVLPLLLLAAAALAEGDAKGLKEGETPGNFMEDEQWLSSISQYSGKIKHWNRFRDVPSSDPPSTTQATP

SEQ ID NO: 49488 - DNA, 234 bp, Artificial Sequence
  derived and/or modified sequence
atgagagcccccggctgcggcagactggtgctgcccctgctgctgctggccgccgccgccctggccgagggcgacgccaagggcctgaaggagggcgagacccccggcaacttcatggaggacgagcagtggctgagcagcatcagccagtacagcggcaagatcaagcactggaacagattcagagacgtgcccagcagcgacccccccagcaccacccaggccaccccctag

SEQ ID NO: 49489 - DNA, 234 bp, Artificial Sequence
  derived and/or modified sequence
atgagagcccccggttgcggtagactggtgctcccactgctgctcctggccgcagcagccctggccgaaggcgatgcaaagggactcaaggaaggagagacccctgggaattttatggaggacgagcaatggcttagttccatcagccagtacagcggcaagatcaaacactggaatagattccgtgacgtgccaagcagcgacccgccttcaacaacccaggctaccccgtag

SEQ ID NO: 49490 - DNA, 234 bp, Artificial Sequence
  derived and/or modified sequence
atgagggcccctggctgcggccgcctggtgctgcccctgctgctgctggccgctgctgccctggccgagggagatgccaagggcctgaaggagggggagaccccaggcaacttcatggaggatgagcagtggctgagcagcatcagccagtacagcggcaagatcaagcactggaaccgcttcagagatgtgcccagcagtgacccccccagcaccacccaggccaccccctag

SEQ ID NO: 49491 - DNA, 234 bp, Artificial Sequence
  derived and/or modified sequence
atgcgggcccccggctgcggccggctggtgctgcccctgctgctgttagccgccgctgcgcttgcagaaggggacgccaagggcctgaaggagggagagacccccggtaatttcatggaggatgagcagtggttgagctccatttcgcaatatagtggtaagattaagcactggaatcggttccgcgacgtgccttcaagtgacccacctagcaccacccaagcaacaccatag

SEQ ID NO: 49492 - DNA, 234 bp, Artificial Sequence
  derived and/or modified sequence
atgagagccccaggatgcgggcgactcgtcctgcctctgttactactcgccgcagcagctctcgcagaaggtgacgccaagggcctgaaggagggagaaactcccggaaattttatggaagacgaacagtggctgtcttccatatcacagtactcaggcaaaattaagcactggaaccggttcagagatgtcccatcctccgatccaccatccaccactcaggccactccgtag

SEQ ID NO: 49493 - DNA, 1284 bp, Artificial Sequence
  derived and/or modified sequence
agttgttatacggcttttgtcttaacgaagccacccattacggtatgatgatgtcaaacgtgatgctgatgctacagttacagcccctgctggcgcagcctctctgattctctctccctctccgcgtccagtgctgggctttttcagacaagtgcatctcctaaccaggtcacatttcagccgcgacccactctccgccagtcaccggaggcagaccgcgggaggagagctgaggacagccgcgtgcgcttcgccagcagcggggtgggaggaaggacattaaaatactgcagaagtcaagacccccccaggtcgaacccagaccacgatgcgcgccccgggctgcgggcggctggtgctgccgctgctgctcctggccgcggcagccctggccgaaggcgacgccaaggggctcaaggagggcgagacccccggcaatttcatggaggacgagcaatggctgtcgtccatctcgcagtacagcggcaagatcaagcactggaaccgcttccgagacgttccctcgtccgacccacccagtacaacgcaggccacaccatgacctctcccgttttctccttaaactgcgtgcatccacaagttccttggaaatttgtttaaaacacacatgcttcataggctatccagccaagtgatgggaagaggcagagatttggatctttttgttaccgtcagacaagtgactgtttctccccaaagtcaaactggcaggttgtaattcacagaggacagcaggaaccacgggcagccaggtctccaggctgagtggccgggccccgcgatgggctgctgatctccgccttcgccccacatgcgacctgtccagccgcaggagcctggagccccgcgaggccttcccgaagcacctgcaggcccagcgcagatgagccgcagtctcctgccgcttcctgggcagcagcccggccacagcagcgagggggcggcagcaggccggcccatccggaatccatgtgtcactggcctaggcctccctccgactcgctggctgtttgatctgccaaaatgggaccagtgaaggtcagagggaaaagaaatgcttaatcagaacaggaaaggtttaaaataaaagattcctccccacctcccttcttccacctgcttccaatagccagctccgtgggtgagaataaatgacttactgcttgaccccatggcactgggctacccacctgtctctctgtattggtgccaaccacttcccccttcctctcatgctcatcagaagaaaggcactagatttga

SEQ ID NO: 49494 - protein, 443 aa, Artificial Sequence
  derived and/or modified sequence
MEEDSLEDSNLPPKVWHSEMTVSVTGEPPSTVEEEGIPKETDIEIIPEIPETLEPLSLPDVLRISAVLEDTTDQLSILNYIMPVQYEGRQSICVKSREMNLEGTNLDKLPMASTITKIPSPLITEEGPNLPEIRHRGRFAVEFNKMQDLVFKKPTRQTIMTTETLKKIQIDRQFFSDVIADTIKELQDSATYNSLLQALSKERENKMHFYDIIAREEKGRKQIISLQKQLINVKKEWQFEVQSQNEYIANLKDQLQEMKAKSNLENRYMKTNTELQIAQTQKKCNRTEELLVEEIEKLRMKTEEEARTHTEIEMFLRKEQQKLEERLEFWMEKYDKDTEMKQNELNALKATKASDLAHLQDLAKMIREYEQVIIEDRIEKERSKKKVKQDLLELKSVIKLQAWWRGTMIRREIGGFKMPKDKVDSKDSKGKGKGKDKRRGKKK

SEQ ID NO: 49495 - protein, 54 aa, Artificial Sequence
  derived and/or modified sequence
MEEDSLEDSNLPPKVWHSEMTVSVTGEPPSTVEEEGIPKETDIEIIPEIPETLE

SEQ ID NO: 49496 - DNA, 1332 bp, Artificial Sequence
  derived and/or modified sequence
atggaggaagactcacttgaagatagcaacctgccaccgaaggtctggcattcagagatgaccgtgtcagttaccggcgagcccccaagcaccgtggaagaagaaggcatcccaaaagaaaccgacatcgaaattatcccggaaattccagaaaccctagaaccgctgtccttgccagacgtcctccgcatttccgctgttctggaggacaccactgatcagctgtcaatactgaattacatcatgccagtgcagtatgaggggagacaatccatctgtgtaaagtcgcgtgagatgaatctggaaggcaccaatctcgataaactgccaatggcttccaccatcactaagatacccagcccactcatcacagaggaagggcctaacttacccgagatcaggcacaggggcagattcgccgtcgaattcaataagatgcaggatctcgtcttcaagaagccaaccagacagaccattatgacaactgagacgcttaagaaaatccaaattgatcgccagttcttcagcgacgttatcgccgataccataaaggagctgcaggattcggcgacatacaattcactgctccaggcactgagtaaggaacgagaaaacaaaatgcacttctacgatattattgctagagaggagaagggacggaagcaaatcatcagcctccaaaaacaacttatcaacgtgaaaaaggagtggcaattcgaagtccagagccagaacgagtacattgcgaacctgaaggaccagttgcaggaaatgaaggcaaagtccaacctggaaaaccggtacatgaagactaataccgaactacagattgcccaaactcagaaaaagtgtaatcgcaccgaagagctcttggttgaagaaatcgagaagctgcgaatgaagaccgaagaagaggctaggacccataccgaaattgaaatgttcctgcgtaaggagcagcagaaactcgaagaaaggctggaattttggatggaaaagtatgataaagacactgagatgaaacaaaacgagctgaatgccttgaaggctaccaaggcaagcgatttggcccacctgcaggatctggccaaaatgattagggagtatgagcaggtcattatcgaggacaggatcgagaaggaacggagtaaaaagaaagtcaaacaggacctcctggagctgaaatccgtcataaaactccaggcctggtggaggggcacgatgatacgacgggaaatcggaggatttaaaatgcccaaagacaaagttgatagcaaagacagcaaaggcaagggcaaaggtaaggacaaaaggcgcgggaagaagaaatag

SEQ ID NO: 49497 - DNA, 165 bp, Artificial Sequence
  derived and/or modified sequence
atggaagaggacagccttgaagatagcaatctccctcctaaggtgtggcattcagaaatgaccgtgtccgtaactggggagcctccctcaactgtagaggaagaaggcattccaaaagagaccgatatagaaattatccccgagatccctgagacacttgagtag

SEQ ID NO: 49498 - DNA, 1332 bp, Artificial Sequence
  derived and/or modified sequence
atggaagaggattccctggaagactctaatctgccccctaaggtatggcactcggaaatgaccgtgtcagtcacaggcgagcctcccagcactgtggaagaggaaggcatccccaaagagaccgatatcgaaataatcccagagatacctgagactttggaaccactaagcttacctgacgtgctgagaatttccgctgtgcttgaggatacgacagatcagctcagtattctgaactacatcatgcccgtacaatacgaaggcaggcagtccatttgtgtgaagtcacgggagatgaatttggaaggaactaacttggacaaattgccaatggcaagcaccattactaaaattccttctccattgatcacagaggaaggacccaatctgccagagattcggcaccggggcagatttgccgtcgagttcaacaagatgcaggatctggtattcaagaaaccaacgcgacagacgatcatgactactgagaccctcaaaaagatccaaatcgatcgccagttttttagcgacgttatcgccgataccatcaaggagcttcaggactccgccacgtataatagtctgttgcaagcactgtctaaagaacgggagaataagatgcatttttacgatattatcgcccgtgaggaaaagggacggaagcagatcatctcactacaaaaacagcttatcaacgtcaagaaagaatggcagtttgaagtccaatcgcagaacgaatacatcgcaaatctaaaggaccagctgcaggagatgaaggccaagtctaacttggaaaaccggtatatgaagaccaacactgagttgcagatagctcagacgcagaagaaatgcaaccggacagaggaactccttgtggaggaaattgagaagctaagaatgaaaaccgaagaagaagcgcggacacacacagagatcgaaatgttcttaagaaaagaacagcagaaactggaagagaggttggagttttggatggagaaatacgataaggacacggagatgaagcagaatgagctaaacgctcttaaggcaacaaaggcttccgatctggctcatttacaggatcttgctaagatgataagggagtatgagcaggtgattatcgaagatcgtattgagaaagaacggtctaagaaaaaggtcaagcaggacctcctcgagctgaagagcgttatcaaactgcaggcctggtggcgcggaacgatgatcaggagggagatcggggggttcaagatgcccaaagataaagtcgacagcaaggacagtaagggaaaaggcaaaggcaaggacaaacgcaggggtaaaaaaaaatag

SEQ ID NO: 49499 - DNA, 2262 bp, Artificial Sequence
  derived and/or modified sequence
gagtggggctgtgggaggaagaaaggctagcgggcgttggccgtatgtgggtgtcttgaggcagtttttcagttctttcatttaccaaagtgacatgcacctactaggtgccaggtgtttagacgtacatacaaccctctgcaaaatctttcagtgtagtcctctgtatgaaaagtttccagccaagaattgccactgcacctgagataagggggatcctggccattaaggaaaccttgccttcgaaactgagccgtgaggaactatacaaaatgggaaattgggacaaatcccagtggctcatgacactaagaagtaaaattacgaactcactgagctggaagtcattcaacgggaattgaataggtaactgcacttttgtgagattataaatataccacggagggtaacgaagctacagaagaatggaagaagacagcctggaagactcaaaccttcctccaaaagtttggcattctgagatgacggtgtcagtgacaggcgaaccacctagtaccgtagaagaagaaggaatacctaaagaaacagacatagaaatcatcccagaaatcccggaaactctagagccactgtcccttccagatgtgctgaggatctcggcagttctggaggacaccacagaccagctctctattctgaactacatcatgcccgttcagtacgaagggagacagagcatctgcgtgaaaagcagagaaatgaatctagaaggaacgaatctagacaaacttccaatggcctcaacaatcacaaaaatacccagtccgttaataactgaggaaggacccaacttgccagaaatcagacacagaggccggttcgctgtggagtttaacaaaatgcaggatcttgtcttcaaaaaacctacaaggcagaccatcatgactacggagacactgaagaaaattcagattgataggcagtttttcagcgatgtgattgcagataccattaaggagttgcaagattcggccacttacaacagtctcctgcaagctttgagcaaagagagggaaaacaaaatgcatttctatgacatcattgccagggaggaaaaaggaagaaaacagataatatcacttcaaaaacagctaattaatgtcaaaaaggaatggcaatttgaagtccagagtcagaatgagtatattgctaacctcaaggaccaactgcaagagatgaaggcaaaatccaacttggagaatcgctacatgaaaaccaataccgagctgcagattgcccagacccagaaaaagtgtaacagaacagaggaactcttggtggaagagattgagaaactcaggatgaaaaccgaagaagaggcccggactcatacagagattgaaatgttccttagaaaggagcagcagaaacttgaggagaggctggagttctggatggagaaatacgataaggacacagaaatgaaacagaatgaactaaatgctctcaaagccacaaaggccagtgacttagcacaccttcaagacctggcaaagatgataagagagtatgaacaggtcatcattgaagatcgtatagaaaaggagaggagcaagaagaaggtaaaacaggatctcttggaattaaagagcgttataaagctccaggcctggtggcgaggcactatgatacggagagaaattggtggtttcaagatgcctaaagacaaagttgatagcaaggattcaaaaggcaaaggtaaaggcaaggataagaggagaggcaagaagaagtgaccaagttctcttttgtgttttctgctggtattctggaggtgggaaggacttggagagagttaagaaacacctggtacctcaaagatgactcatctacaggttgtttcctattgagactttcccagggaagcctgatttcactttgcctgttaatttcactctgcctgttaggtgggttttcaaaccctgatttaggattacaccattgacttagggcttcctcataccttgctgggaagaagtttctagtagtcctgtgaagattcattcttcttgctctttctcagcagaacaaaggagttcactggcttagctacagtgacgcattgaaacttgagtaattcctgtaatgtcagattttgattttacccaatttgtctgtagtgaaaaaactcttatgagcaaaagtattcagtaggaattacaatatgatgttattagctgtccagcataatatatacacagcaaagttttaataaatgttggttcctgcctgccttttaga

SEQ ID NO: 49500 - DNA, 550 bp, Artificial Sequence
  derived and/or modified sequence
gatgttcccgctgcctaaagaatgattgactgtaagattgatttgccaacagtggggtgcttttctctcgatacacacagcaatagacagaacggaaattctgggatcctaatctagcatggaagagaaaggccgggagcacgaaggcagcaggacctcttccttctcttttttctttttctatacttcttttctcccctctacttatttatctctttcaagaaatgagactgggcacagtggctcacgcctgtaaacccagctctttgggaagccgaggcgggaggatcgcttgaggccaggagttcgagaccagcctgggcaacatagtaactgcacttttgtgagattataaatataccacggagggtaacgaagctacagaagaatggaagaagacagcctggaagactcaaaccttcctccaaaagtttggcattctgagatgacggtgtcagtgacaggcgaaccacctagtaccgtagaagaagaaggaatacctaaagaaacagacatagaaatcatcccagaaatcccggaaactctagag

SEQ ID NO: 49501 - DNA, 1981 bp, Artificial Sequence
  derived and/or modified sequence
agtttacttcctgcgtccccggacgccgtaggtggaaaggcgaaccctgagtggaggatgttcccgctgcctaaagaatgattgactgtaactgcacttttgtgagattataaatataccacggagggtaacgaagctacagaagaatggaagaagacagcctggaagactcaaaccttcctccaaaagtttggcattctgagatgacggtgtcagtgacaggcgaaccacctagtaccgtagaagaagaaggaatacctaaagaaacagacatagaaatcatcccagaaatcccggaaactctagagccactgtcccttccagatgtgctgaggatctcggcagttctggaggacaccacagaccagctctctattctgaactacatcatgcccgttcagtacgaagggagacagagcatctgcgtgaaaagcagagaaatgaatctagaaggaacgaatctagacaaacttccaatggcctcaacaatcacaaaaatacccagtccgttaataactgaggaaggacccaacttgccagaaatcagacacagaggccggttcgctgtggagtttaacaaaatgcaggatcttgtcttcaaaaaacctacaaggcagaccatcatgactacggagacactgaagaaaattcagattgataggcagtttttcagcgatgtgattgcagataccattaaggagttgcaagattcggccacttacaacagtctcctgcaagctttgagcaaagagagggaaaacaaaatgcatttctatgacatcattgccagggaggaaaaaggaagaaaacagataatatcacttcaaaaacagctaattaatgtcaaaaaggaatggcaatttgaagtccagagtcagaatgagtatattgctaacctcaaggaccaactgcaagagatgaaggcaaaatccaacttggagaatcgctacatgaaaaccaataccgagctgcagattgcccagacccagaaaaagtgtaacagaacagaggaactcttggtggaagagattgagaaactcaggatgaaaaccgaagaagaggcccggactcatacagagattgaaatgttccttagaaaggagcagcagaaacttgaggagaggctggagttctggatggagaaatacgataaggacacagaaatgaaacagaatgaactaaatgctctcaaagccacaaaggccagtgacttagcacaccttcaagacctggcaaagatgataagagagtatgaacaggtcatcattgaagatcgtatagaaaaggagaggagcaagaagaaggtaaaacaggatctcttggaattaaagagcgttataaagctccaggcctggtggcgaggcactatgatacggagagaaattggtggtttcaagatgcctaaagacaaagttgatagcaaggattcaaaaggcaaaggtaaaggcaaggataagaggagaggcaagaagaagtgaccaagttctcttttgtgttttctgctggtattctggaggtgggaaggacttggagagagttaagaaacacctggtacctcaaagatgactcatctacaggttgtttcctattgagactttcccagggaagcctgatttcactttgcctgttaatttcactctgcctgttaggtgggttttcaaaccctgatttaggattacaccattgacttagggcttcctcataccttgctgggaagaagtttctagtagtcctgtgaagattcattcttcttgctctttctcagcagaacaaaggagttcactggcttagctacagtgacgcattgaaacttgagtaattcctgtaatgtcagattttgattttacccaatttgtctgtagtgaaaaaactcttatgagcaaaagtattcagtaggaattacaatatgatgttattagctgtccagcataatatatacacagcaaagttttaataaatgttggttcctgcctgcctttta

SEQ ID NO: 49502 - DNA, 1332 bp, Artificial Sequence
  derived and/or modified sequence
atggaggaggacagcctggaggacagcaacctgccccccaaggtgtggcacagcgagatgacagtgtctgtgactggagagccccccagcacagtggaggaggagggcatccccaaggagacagacatcgagatcatccctgagatccctgagaccctggagcccctgagcctgcctgatgtgctgcgcatctctgctgtgctggaggacaccacagaccagctgagcatcctgaactacatcatgcctgtgcagtatgagggccggcagagcatctgtgtgaagagccgggagatgaacctggagggcaccaacctggacaagctgcccatggccagcaccatcaccaagatccccagccccctcatcacagaggagggccccaacctgcctgagatccgccaccggggccgctttgctgtggagttcaacaagatgcaggacctggtgttcaagaagcccacccggcagaccatcatgaccacagagaccctgaagaagatccagattgaccggcagttcttcagtgatgtgattgctgacaccatcaaggagctgcaggacagcgccacctacaacagcctgctgcaggccctgagcaaggagcgggagaacaagatgcacttctatgacatcatcgcccgggaggagaagggcaggaagcagatcatcagcctgcagaagcagctgatcaacgtgaagaaggagtggcagtttgaggtgcagagccagaatgagtacatcgccaacctgaaggaccagctgcaggagatgaaggccaagagcaacctggagaaccgctacatgaagaccaacacagagctgcagatcgcccagacccagaagaagtgcaacagaacagaggagctgctggtggaggagattgagaagctgaggatgaagacagaggaggaggcccggacccacacagaaattgagatgttcctgaggaaggagcagcagaagctggaggagcggctggagttctggatggagaagtatgacaaggacacagagatgaagcagaatgagctgaatgccctgaaggccaccaaggccagtgacctggcccacctgcaggacctggccaagatgatccgggagtatgagcaggtgatcattgaagatcgcatcgagaaggagaggagcaagaagaaggtgaagcaggacctgctggagctgaagagcgtcatcaagctgcaggcctggtggaggggcaccatgatccggcgggagattggaggcttcaagatgcccaaggacaaggtggacagcaaggacagcaagggcaagggcaagggcaaggacaagaggcggggcaagaagaagtag

SEQ ID NO: 49503 - DNA, 165 bp, Artificial Sequence
  derived and/or modified sequence
atggaggaggacagcctggaggacagcaacctgccccccaaggtgtggcacagcgagatgacagtgtctgtgactggagagccccccagcacagtggaggaggagggcatccccaaggagacagacatcgagatcatccctgagatccctgagaccctggagtag

SEQ ID NO: 49504 - DNA, 1332 bp, Artificial Sequence
  derived and/or modified sequence
atggaggaggacagcctggaggacagcaacctgccccccaaggtgtggcattccgagatgactgtgagtgtcaccggagagcctccttctaccgtggaagaggaaggaattcccaaggagactgacatagaaatcattccggaaatcccagagactctagagcccctatcccttcccgacgtgctgcggatttccgccgtgctggaagacactactgaccagttgtctattctgaactatattatgccagttcagtacgaggggaggcagtccatctgcgttaaatcacgagaaatgaacctcgagggaactaacctggataaattaccgatggcaagtactatcacgaaaatcccttcaccccttatcactgaggaaggaccaaatctaccggagattcgccatcgggggaggttcgccgtcgagtttaataaaatgcaggatcttgtgtttaaaaaacccacacggcagactatcatgacaactgaaactctgaaaaaaattcagatagacagacagttcttttcggacgtgatcgccgacaccataaaagagctgcaagacagtgctacatacaatagtctgctgcaggccctctctaaggaaagggagaataaaatgcacttctacgatattattgctcgcgaagaaaaaggcagaaagcagataatctcgctgcaaaagcagctgattaatgtaaagaaagaatggcagtttgaggtacaaagccaaaatgaatacatcgcgaacttaaaggatcagctccaggagatgaaggccaagagcaatctggaaaaccgctacatgaaaaccaatacagagctacagattgcgcaaacacagaagaagtgcaacaggacagaggagctcttggttgaagagatcgaaaaactgaggatgaagacagaagaagaggccagaacacacacagaaatcgaaatgtttctcagaaaggaacagcagaaactggaagaaagattggagttctggatggagaaatacgacaaggacaccgagatgaagcaaaatgagctgaacgccctgaaagccactaaggctagcgacctggcacatttgcaggacctcgcaaagatgataagagagtatgaacaggtgatcatagaagataggatcgaaaaggagagaagtaagaagaaggtaaagcaggacctcctggagcttaaatctgtcatcaagttacaggcctggtggagaggcacgatgatcagacgagagattggaggttttaagatgcctaaggacaaagtggactcaaaggacagcaagggcaaaggaaaagggaaggataaacgtaggggaaagaagaaatag

SEQ ID NO: 49505 - DNA, 165 bp, Artificial Sequence
  derived and/or modified sequence
atggaggaggacagcctggaggacagcaacctgccccccaaggtgtggcactcagaaatgacagtctcagtgaccggtgagcctccatccacagtcgaagaggagggcattcccaaggaaactgacatagaaatcatacccgagatcccagaaaccttggagtag

SEQ ID NO: 49506 - DNA, 1332 bp, Artificial Sequence
  derived and/or modified sequence
atggaggaggacagcctggaggacagcaacctgccccccaaggtgtggcatagtgagatgactgtgagcgtcactggggaacctcctagtacggtcgaggaagaaggtatacctaaagagacagacattgagattatacccgagatcccggaaactcttgaacctctgtctttgccggatgtgcttagaatatccgcagtccttgaagacacaacagatcagctatcgattctcaactacataatgcctgttcaatacgagggaaggcagagtatttgtgtcaaatctcgtgaaatgaatctggagggcaccaacctggacaaattgccaatggccagcacgatcactaaaatcccttccccattgatcacggaggaaggacccaatctgcccgagatcagacatagagggcgctttgcagtggagtttaataagatgcaggaccttgtctttaagaaacctacccgtcagaccatcatgaccacggagactcttaagaagattcaaattgatcgccagtttttctctgatgtgattgccgataccattaaggagctacaggattctgccacctataacagcctgctacaggccctttcgaaagaaagggagaacaagatgcacttctacgatattatcgctagagaagaaaaaggacggaagcagattatatctctgcaaaagcagctgattaatgtgaagaaagaatggcaattcgaggtccaatcgcagaacgaatacatcgcaaatcttaaagatcaactgcaagagatgaaggcaaagagtaatctggaaaaccgatacatgaaaactaacacagaactgcagatcgctcagactcagaaaaaatgtaatcgcaccgaagaactcctggtggaagaaattgagaaactgcgcatgaaaacagaggaggaggcacgaacccatacagagatcgaaatgttcttacggaaagagcagcaaaagcttgaggagcgtctggagttctggatggaaaagtacgataaagatacagaaatgaaacagaatgaattgaacgccctgaaggctaccaaagcgtctgaccttgcgcatttacaggatctggcgaagatgatccgggagtatgaacaagtcattattgaggatcggatagagaaagaaaggagtaagaaaaaagttaaacaggaccttctagagctcaagtccgtcatcaaactgcaggcctggtggcgtggtaccatgattcggcgagagataggggggttcaaaatgcccaaagacaaggtcgactccaaagattccaaaggaaaagggaaaggcaaggataagaggagaggcaaaaaaaagtag

SEQ ID NO: 49507 - DNA, 1332 bp, Artificial Sequence
  derived and/or modified sequence
atggaggaagattcacttgaagacagcaatttgccaccaaaagtgtggcacagcgaaatgacagtgtccgtgacaggcgagcctccatccactgtggaagaagagggaattcccaaggagaccgatattgaaatcattccagagatccccgagacacttgaaccactgtctctaccagatgtacttcgcatatcggctgtacttgaagacactaccgaccaactgtcaatcctcaattacataatgcctgtgcagtatgaaggacggcagagcatctgcgtgaagagcagggagatgaaccttgaaggaacaaacttggataagctgccaatggctagcacaatcaccaaaattcctagtcctctgataaccgaggaaggacccaacctgccagaaattagacacaggggtcggtttgccgtcgaatttaacaaaatgcaggaccttgtattcaagaagccaactcggcagacaatcatgaccactgagaccttaaagaagatccagatcgacaggcagttcttctccgacgtcatcgctgacaccatcaaggagctgcaggattctgctacatacaacagcctgctccaggctcttagcaaagagcgcgagaataagatgcatttctacgacataatcgctagggaggagaaggggcgaaaacagatcataagcctgcagaagcagcttattaacgtgaagaaagagtggcaattcgaagtgcagagccaaaatgaatacatagcaaacctgaaggatcagctccaagaaatgaaagcaaaatcaaacctggagaacaggtatatgaaaacgaacactgagttacagatcgcacagacacagaagaaatgtaaccggacggaagagctgctcgtagaggagatcgaaaagctcagaatgaagacagaggaagaagcacggactcacaccgaaattgaaatgttcctgcggaaagagcagcagaagctggaagaaaggctagagttttggatggagaagtacgacaaagacacagagatgaaacagaacgaactgaacgccctcaaggccacaaaagcctcggacttggcgcacctgcaagatttagccaagatgatcagggagtacgagcaggtgatcattgaagacaggatcgaaaaagaaaggagcaaaaagaaagtcaagcaggatttattagaactcaagtccgtgatcaagctgcaggcttggtggcgcggtactatgatcaggagagaaatcggaggctttaaaatgcccaaagacaaggtcgatagcaaagattccaaaggcaaaggcaagggcaaagataagaggcgcggtaaaaaaaagtag

SEQ ID NO: 49508 - DNA, 165 bp, Artificial Sequence
  derived and/or modified sequence
atggaagaggacagcctggaggattccaatcttccgcctaaagtgtggcacagcgaaatgaccgtttctgtgactggcgagcccccatccacggtggaggaagaggggatccccaaagagactgatatcgagattattcctgaaattccagagacacttgagtag

SEQ ID NO: 49509 - DNA, 1332 bp, Artificial Sequence
  derived and/or modified sequence
atggaggaggacagcctcgaggacagcaacctgccacccaaagtctggcattcagaaatgacagtttctgttaccggcgagcctccaagcactgtagaagaggaggggatcccaaaggaaactgacatcgaaatcatccccgaaatccctgaaacacttgaacctctgagcctgcccgatgtactgaggatctcggctgtccttgaggacacaacagatcagctgtctatcctcaactacatcatgcctgtccagtacgaagggcgtcagtccatttgtgttaagtccagggaaatgaatttagagggcactaatcttgacaaactgcctatggcttccacgataactaagatccccagcccactgattactgaggaaggaccgaacctccctgagattagacacagggggaggtttgcagtggagtttaacaaaatgcaggatttggtattcaagaagcctacccgtcaaactatcatgactaccgagacgttgaaaaaaatacagatagacaggcagttcttctcagatgtgattgccgacacaatcaaagaacttcaggactccgccacatacaattcactgctgcaggcgttgagcaaagagcgagaaaacaagatgcacttttacgacatcatcgcaagagaggagaaaggcaggaagcaaatcatcagcctgcagaagcaattgatcaatgtgaagaaagagtggcagtttgaggtccaatcccaaaatgagtacatcgccaatctcaaggatcagctgcaggaaatgaaggcaaaatccaatttagagaaccgttacatgaagaccaacactgagctgcaaatcgctcagacccagaagaagtgtaaccgaacagaagaactcctcgttgaggagatcgaaaaattgcgtatgaaaaccgaggaggaagcaaggacccacaccgagatcgaaatgttcttgcgcaaggagcagcagaagcttgaggagcgtctggagttttggatggaaaaatatgataaagacactgagatgaagcaaaatgaactgaatgccctgaaggcgacaaaggccagtgatcttgcccatctccaggacctggcaaaaatgatcagggagtatgagcaggttattattgaggatagaattgaaaaggagagatctaagaaaaaggtcaaacaggatctgctggagttgaaatctgtgatcaagctccaggcgtggtggagaggaacaatgatcagacgcgagattggtgggttcaagatgcctaaagataaagtggatagtaaagattctaagggaaaggggaagggcaaggataagcgaagagggaaaaagaaatag

SEQ ID NO: 49510 - DNA, 1332 bp, Artificial Sequence
  derived and/or modified sequence
atggaggaggacagcctggaggacagcaacctgccccccaaggtgtggcacagcgagatgaccgtgagcgtgaccggcgagccccccagcaccgtggaggaggagggcatccccaaggagaccgacatcgagatcatccccgagatccccgagaccctggagcccctgagcctgcccgacgtgctgagaatcagcgccgtgctggaggacaccaccgaccagctgagcatcctgaactacatcatgcccgtgcagtacgagggcagacagagcatctgcgtgaagagcagagagatgaacctggagggcaccaacctggacaagctgcccatggccagcaccatcaccaagatccccagccccctgatcaccgaggagggccccaacctgcccgagatcagacacagaggcagattcgccgtggagttcaacaagatgcaggacctggtgttcaagaagcccaccagacagaccatcatgaccaccgagaccctgaagaagatccagatcgacagacagttcttcagcgacgtgatcgccgacaccatcaaggagctgcaggacagcgccacctacaacagcctgctgcaggccctgagcaaggagagagagaacaagatgcacttctacgacatcatcgccagagaggagaagggcagaaagcagatcatcagcctgcagaagcagctgatcaacgtgaagaaggagtggcagttcgaggtgcagagccagaacgagtacatcgccaacctgaaggaccagctgcaggagatgaaggccaagagcaacctggagaacagatacatgaagaccaacaccgagctgcagatcgcccagacccagaagaagtgcaacagaaccgaggagctgctggtggaggagatcgagaagctgagaatgaagaccgaggaggaggccagaacccacaccgagatcgagatgttcctgagaaaggagcagcagaagctggaggagagactggagttctggatggagaagtacgacaaggacaccgagatgaagcagaacgagctgaacgccctgaaggccaccaaggccagcgacctggcccacctgcaggacctggccaagatgatcagagagtacgagcaggtgatcatcgaggacagaatcgagaaggagagaagcaagaagaaggtgaagcaggacctgctggagctgaagagcgtgatcaagctgcaggcctggtggagaggcaccatgatcagaagagagatcggcggcttcaagatgcccaaggacaaggtggacagcaaggacagcaagggcaagggcaagggcaaggacaagagaagaggcaagaagaagtag

SEQ ID NO: 49511 - DNA, 165 bp, Artificial Sequence
  derived and/or modified sequence
atggaggaggacagcctggaggacagcaacctgccccccaaggtgtggcacagcgagatgaccgtgagcgtgaccggcgagccccccagcaccgtggaggaggagggcatccccaaggagaccgacatcgagatcatccccgagatccccgagaccctggagtag

SEQ ID NO: 49512 - protein, 1059 aa, Artificial Sequence
  derived and/or modified sequence
MDWLFFRNICLLIILMVVMEVNSEFIVEVKEFDIENGTTKWQTVRRQKREWIKFAAACREGEDNSKRNPIAKIRSDCESNQKITYRISGVGIDRPPYGVFTINPRTGEINITSVVDREITPLFLIYCRALNSRGEDLERPLELRVKVMDINDNAPVFSQSVYTASIEENSDANTLVVKLCATDADEENHLNSKIAYKIVSQEPSGAPMFILNRYTGEVCTMSSFLDREQHSMYNLVVRGSDRDGAADGLSSECDCRIKVLDVNDNFPTLEKTSYSASIEENCLSSELIRLQAIDLDEEGTDNWLAQYLILSGNDGNWFDIQTDPQTNEGILKVVKMLDYEQAPNIQLSIGVKNQADFHYSVASQFQMHPTPVRIQVVDVREGPAFHPSTMAFSVREGIKGSSLLNYVLGTYTAIDLDTGNPATDVRYIIGHDAGSWLKIDSRTGEIQFSREFDKKSKYIINGIYTAEILAIDDGSGKTATGTICIEVPDINDYCPNIFPERRTICIDSPSVLISVNEHSYGSPFTFCVVDEPPGIADMWDVRSTNATSAILTAKQVLSPGFYEIPILVKDSYNRACELAQMVQLYACDCDDNHMCLDSGAAGIYTEDITGDTYGPVTEDQAGVSNVGLGPAGIGMMVLGILLLILAPLLLLLCCCKQRQPEGLGTRFAPVPEGGEGVMQSWRIEGAHPEDRLFSAYALPGGGGTADGGGSVLGRCALQATPALLNQHPPFSEIYTNTYAAGGTVEGGVSGVELNTGMGTAVGLMAAGAAGASGAARKRSSTMGTLRDYADADINMAFLDSYFSEKAYAYADEDEGRPANDCLLIYDHEGVGSPVGSIGCCSWIVDDLDESCMETLDPKFRTLAEICLNTEIEPFPSHQACIPISTDLPLLGPNYFVNESSGLTPSEVEFQEEMAASEPVVHGDIIVTETYGNADPCVQPTTIIFDPQLAPNVVVTEAVMAPVYDIQGNICVPAELADYNNVIYAERVLASPGVPDMSNSSTTEGCMGPVMSGNILVGPEIQVMQMMSPDLPIGQTVGSTSPMTSRHRVTRYSNIHYTQQ

SEQ ID NO: 49513 - DNA, 3180 bp, Artificial Sequence
  derived and/or modified sequence
atggattggctcttctttagaaatatatgcctcctcattatacttatggttgtgatggaagtgaacagtgaatttattgttgaagtcaaagagttcgatatcgaaaacggcactaccaagtggcagaccgttcgaaggcaaaaaagggaatggatcaagtttgctgcagcctgcagggagggggaggataactccaaacgcaatcctatcgccaaaattcggagtgattgtgagagtaaccagaagatcacgtaccgaatcagcggcgtggggatcgacagacccccgtacggagtctttaccatcaatccgcggacaggggagatcaacattacctcagttgtcgatcgagagatcacaccattgtttcttatctactgcagagcacttaatagtcggggggaagacttggaaaggccactggagttgcgagttaaagtaatggatataaacgacaacgcacccgtcttctcccaatcggtctataccgcctccattgaggagaattccgacgccaacaccttggtggtgaaactgtgtgcgacagacgcggatgaggaaaatcatctgaacagcaagatagcctacaaaattgtctcccaggaaccatccggcgctccaatgtttatccttaatcgatacactggggaagtttgtaccatgagcagttttcttgatcgggaacagcactccatgtacaatcttgtcgtccgtgggtcagaccgagacggggccgctgacggactctcgtcagaatgtgactgtaggattaaggtgttggacgtgaatgataactttcctacacttgagaagacctcttattctgctagtatcgaggagaactgcctatcctcggagttgattcgtttgcaggcgatcgatttagacgaagagggcacggataactggctggcgcagtatttgattctgtcaggaaacgacgggaactggtttgacatccaaaccgacccacagacgaatgagggtattctgaaggtcgtgaaaatgctggattatgaacaagctccaaacatccaactatccattggagttaagaatcaggcagacttccattactccgtagcttctcagttccagatgcacccaacccctgtgcggatccaggtcgtcgacgtaagagaagggcccgcttttcacccttccacaatggcttttagcgtccgggagggtattaaaggttccagtctgcttaattatgtgcttggaacctacactgcaatcgatctcgacacaggaaacccagccaccgacgtgcgttacatcatcgggcatgacgccggctcttggcttaaaatagattctagaactggagaaattcagttctcccgggaattcgataaaaagtccaagtacatcatcaatgggatctatactgcagagattctcgccatagacgatggaagcgggaaaacggccacgggcacaatctgcattgaggttccagacataaacgattactgccctaacattttccctgagcgcagaactatatgtattgattcacctagcgtcctgatctctgtcaatgaacactcgtacggctcaccctttacattctgtgtcgttgatgaaccaccggggatcgcagatatgtgggatgtaagatccacaaatgccacctcagcaattctgactgccaagcaagtgctctccccagggttttacgagattcccatccttgtgaaggattcctataatcgagcttgcgaactcgcccagatggttcagctgtacgcctgtgactgcgacgataaccacatgtgcctggactccggagcggcagggatatacaccgaggacatcaccggcgacacgtacggtccagtgactgaggatcaggcaggagtgtctaatgtgggactgggacctgctggcataggcatgatggtcctggggatccttctgcttatcctcgcccccctccttctgctgctatgttgttgcaaacagcggcagcccgaggggctcggcactagatttgctcccgtgcctgaaggcggagagggggtgatgcagtcctggaggatagagggcgcccatccagaggaccgcctgttctctgcctatgcactacccggcggcggcgggaccgcagacgggggtggctcagtgctcgggagatgtgctttgcaggccaccccagcccttctcaaccagcacccacccttctctgagatctataccaatacatacgcagccggcggtactgtggaaggtggggtgagcggcgtggagttaaatacaggcatgggcacagccgtggggttgatggctgccggtgcagccggagctagcggcgctgcccgaaagcgctcctctacaatggggacattacgcgattacgcagacgctgacataaacatggcttttctggacagctacttttctgagaaagcctacgcctacgctgacgaggacgaagggaggccagcaaacgactgcttgctaatatacgatcatgaaggggtgggcagtcctgtcggcagcattggctgctgttcttggatcgtggatgacctcgacgaaagctgcatggagactcttgatcctaaatttagaactctcgcagagatctgtctgaacaccgagatagagccttttccttcacatcaggcctgtattcccattagtaccgacttacccctgctgggcccgaactatttcgtgaatgagtcttctggtcttactcctagcgaagtagagttccaagaggagatggctgcctcggagcccgtcgtgcatggggacatcatcgttactgagacgtacggcaatgcggacccatgtgtgcagccaaccacgattatttttgacccacaactggccccaaacgtggtggtaacagaagccgtgatggcccccgtctatgacatccaaggaaatatatgtgttccagcagaacttgccgactacaacaacgtgatatatgccgagcgcgtcctggcgtcacctggtgtcccagacatgagtaattccagtactacagagggctgtatgggaccggtaatgtccggaaacatcctggtgggtccggagattcaggtaatgcagatgatgtctcccgatcttcctattggacagactgtgggcagcacatcccctatgacatcgagacacagggtcactaggtactcaaatatccattacactcagcagtag

SEQ ID NO: 49514 - DNA, 3180 bp, Artificial Sequence
  derived and/or modified sequence
atggactggctgttcttcaggaacatctgcctgctgatcatcctgatggtggtgatggaggtgaacagcgagttcatcgtggaggtgaaggagtttgatattgaaaatggcaccaccaagtggcagacagtgcggcggcagaagcgggagtggatcaagtttgctgctgcctgccgggagggggaggacaacagcaagaggaaccccatcgccaagatccgcagtgactgtgagagcaaccagaagatcacctaccgcatcagcggcgtgggcatcgacaggcctccctatggagtcttcaccatcaaccccaggactggagagatcaacatcacctctgtggtggaccgggagatcacccccctcttcctgatctactgccgggccctgaacagcagaggagaggacctggagcggcccctggagctgcgggtgaaggtgatggacatcaatgacaatgcccctgtgttcagccagagcgtgtacacagccagcattgaggagaacagtgatgccaacaccctggtggtgaagctgtgtgccacagatgctgatgaggagaaccacctgaacagcaagatcgcctacaagatcgtgtcccaggagcccagcggggcccccatgttcatcctgaaccgctacacaggagaggtgtgcaccatgagcagcttcctggaccgggagcagcacagcatgtacaacctggtggtgcggggcagtgacagagatggagctgctgatggcctgagcagtgaatgtgactgccgcatcaaggtgctggatgtgaatgacaacttccccaccctggagaagaccagctacagcgccagcattgaggagaactgcctgagcagcgagctgatccggctgcaggccatcgacctggatgaggagggcacagacaactggctggcccagtacctgatcctgtctggaaatgatggcaactggtttgacatccagacagacccccagaccaatgaaggcatcctgaaggtggtgaagatgctggactatgagcaggcccccaacatccagctgagcattggagtgaagaaccaggccgacttccactacagcgtggccagccagttccagatgcaccccacccctgtgcgcatccaggtggtggatgtgcgggagggccctgccttccaccccagcaccatggccttctctgtgcgggagggcatcaagggcagcagcctgctgaactacgtgctgggcacctacacagccatcgacctggacaccggcaacccagccacagatgtgcgctacatcattggacatgatgctggctcctggctgaagattgacagcaggactggagagatccagttcagccgggagtttgacaagaagagcaagtacatcatcaatggcatctacacagctgagatcctggccattgatgatggcagcggcaagacagccaccggcaccatctgcatcgaggtgcctgacatcaatgactactgccccaacatcttccctgagaggaggaccatctgcatcgacagccccagcgtgctgatctctgtgaatgagcacagctatggcagccccttcaccttctgtgtggtggatgagcccccaggcattgctgacatgtgggatgtgcgcagcaccaatgccaccagcgccatcctgacagccaagcaggtgctgagccctggcttctatgagatccccatcctggtgaaggacagctacaacagagcctgtgagctggcccagatggtgcagctgtatgcctgtgactgtgatgacaaccacatgtgcctggacagcggggctgctggcatctacacagaggacatcactggagacacctacggccctgtgacagaggaccaggccggcgtgtccaatgtgggcctgggccctgctggcatcggcatgatggtgctgggcatcctgctgctgatcctggcccccctgctgctgctgctgtgctgctgcaagcagaggcagcctgagggcctgggcaccaggtttgcccctgtgcctgagggcggggagggcgtgatgcagagctggagaattgaaggagcccacccagaagatagactcttcagcgcctatgccctgcccggcggcggcggcacagcagatggcggcggctctgtgctgggccgctgtgccctgcaggccaccccagccctgctgaaccagcacccccccttcagcgagatctacaccaacacctatgctgctgggggcaccgtggagggcggcgtgtctggagtggagctgaacacaggcatgggcacagctgtgggcctgatggccgccggggctgctggggccagcggggccgccaggaagaggagcagcaccatgggcaccctgcgggactatgcagatgctgacatcaacatggccttcctggacagctacttcagcgagaaggcctatgcctatgcagatgaagatgagggccgcccagccaatgactgcctgctgatctatgaccatgaaggagtgggcagccctgtgggcagcatcggctgctgctcctggatcgtggatgacctggatgagagctgcatggagaccctggaccccaagttccgcaccctggccgagatctgcctgaacacagaaattgagcccttccccagccaccaggcctgcatccccatcagcacagacctgcccctgctgggccccaactactttgtgaatgaaagcagcggcctgaccccatctgaggtggagttccaggaggagatggccgccagcgagcctgtggtgcatggagacatcatcgtgacagagacctatggaaatgctgacccctgtgtgcagcccaccaccatcatctttgacccccagctggccccaaatgtggtggtgacagaagctgtgatggcccctgtgtatgacatccagggcaacatctgtgtgcctgctgagctggccgactacaacaacgtcatctatgcagagcgggtgctggccagccctggggtgcctgacatgagcaacagcagcaccacagagggctgcatgggccctgtgatgagcggcaacatcctggtgggccctgagatccaggtgatgcagatgatgagcccagacctgcccatcggccagacagtgggcagcaccagccccatgaccagccgccaccgggtgacccgctacagcaacatccactacacccagcagtag

SEQ ID NO: 49515 - DNA, 3180 bp, Artificial Sequence
  derived and/or modified sequence
atggactggctgttcttccggaacatctgcctgctgatcatcctgatggtggtgatggaagtgaactcagagtttattgtggaggtaaaggagtttgatatcgaaaatggaaccacaaagtggcagactgtaaggagacagaagcgagagtggataaagttcgccgcagcctgtcgagagggagaggacaattccaaacggaaccccatagctaagatacgcagcgattgcgaatccaatcagaaaattacctatcgcatctccggggtcgggattgataggcccccctatggtgtgtttacaatcaatccaaggacaggggagattaacatcacctccgtggtcgaccgggagatcacccccctgtttctcatttattgcagagcactaaactctaggggtgaagatttggaaaggccacttgagctccgcgtcaaggtcatggatattaatgacaatgccccggtattttcacaatcggtctacactgcgtcaatcgaggagaatagcgatgccaacacactggtggttaaactttgcgccacagacgccgacgaagagaaccacctgaactccaaaatcgcttataagattgtatctcaggaacccagcggtgccccaatgttcatcctgaataggtacaccggcgaggtgtgtactatgtcctcattcctcgaccgagaacagcactctatgtacaatctggttgtacgcggctctgaccgagacggtgccgccgacggcctctcctcagagtgcgattgtcgtattaaggtcctcgatgtgaatgacaactttcctactttagagaaaaccagctacagtgcgagcattgaagaaaactgcctgtccagtgagctgataagattgcaggcaatcgacttagacgaggagggcacagacaattggcttgcacaatatctaattctcagcgggaatgatggtaactggttcgacatacaaactgatccacaaacgaacgagggcattctaaaggttgttaaaatgctggactatgaacaagcccccaacatccagctgtccataggcgttaaaaatcaagccgacttccactactctgtggcttcccaattccagatgcaccctacacccgtgcggattcaggtggtggatgtccgcgagggaccagcattccaccccagcaccatggcgttcagcgtccgcgaaggaatcaaggggagctctcttcttaattatgtgctgggcacttacaccgcaatcgaccttgatactggcaaccccgctactgatgtccgctacattattggacacgatgcaggtagttggctgaagattgactctagaaccggtgaaatccagttctcacgcgaatttgacaaaaaaagtaagtacatcataaatggcatctatacagcagagatactagccatcgacgatggatccggcaaaactgccaccggcacaatctgtatagaagtccctgatattaacgactattgtcctaacatattccctgaacgtcgcactatttgcattgacagtccatcggtgttgatctctgtcaacgagcatagctacggatctcctttcactttctgtgtcgtggatgaacccccaggcatcgctgatatgtgggatgtccgatctacaaacgccacctccgcaatactgaccgcaaagcaggtcctaagtcctgggttctacgagataccaatcctcgtaaaggactcatacaaccgcgcctgcgagctcgcacaaatggtgcagctttacgcctgtgactgtgacgataatcacatgtgtctcgacagcggtgcagccggtatctacaccgaagatataacgggcgatacttacggacctgtgacagaagatcaggcaggagttagcaacgtggggctagggcctgctggaattggaatgatggtcctcggaatccttctattaatcctggctccgctcttgctgctcctgtgctgttgtaaacaacgacagcccgagggcctcggaacccgctttgcccctgtgccagaaggaggggagggagtaatgcagagttggcgcattgagggcgcccatcccgaggatcgcctcttttctgcttatgccctccccggaggcggcggaacagccgatggtggtggttctgttctgggcaggtgcgccctccaggccactcctgctctgcttaaccagcacccgcccttctctgaaatatacacaaatacttacgcagccggtgggactgtggagggaggagtgagtggggtggaactgaacacagggatgggaaccgccgtcgggctcatggccgctggtgcggccggcgcttccggggcggctcgaaagaggagcagcacaatggggacacttagggattatgctgatgccgatatcaatatggcgttccttgattcttacttctcagaaaaggcttatgcctacgccgatgaggatgagggacgacctgccaatgattgcttactaatttacgaccatgagggggtgggttcgcctgtgggctctataggttgctgctcctggattgtagatgatctcgacgaatcgtgcatggagacactagaccccaagttccggactttggcggaaatatgccttaacaccgagatcgagcctttcccctcacaccaggcttgcatacccatctctacagacctacctctgttgggacctaattactttgtcaatgaatccagcgggttaacaccttcagaggtagaattccaggaagagatggccgccagcgagccagtagttcatggagacattattgttacggaaacctatggtaatgcagacccttgcgtgcagcctactaccatcatcttcgacccccagctcgccccgaacgtcgtcgtcacggaagccgtcatggcccctgtctatgacatccaaggtaatatttgcgtccccgcggagctggctgactacaataatgtgatatacgcagaacgggtgctggcttcaccgggggtccccgacatgtctaattccagcaccactgaagggtgtatgggacctgtgatgtctggcaatatcttggtcgggccggagatccaagttatgcaaatgatgtccccagacctccccatcggtcagaccgttggttctacctcccccatgacctcccgacatagggtcaccaggtatagcaatattcattatacccagcagtag

SEQ ID NO: 49516 - DNA, 3180 bp, Artificial Sequence
  derived and/or modified sequence
atggactggctgttctttaggaatatctgcctgctgattattctcatggtggtcatggaggttaacagtgagttcatcgttgaggtgaaggaatttgacattgagaatgggactacaaagtggcagaccgtgcggaggcagaagagggagtggattaaattcgccgctgcctgcagagagggcgaagataacagcaagaggaatccaatcgccaaaatacgaagtgactgcgagtccaaccaaaagatcacttaccgaataagtggcgttggaatcgatcgccctccatacggtgtgtttactatcaatcccaggaccggcgagatcaatatcacctccgttgtcgaccgagagattacgcctcttttcctcatctattgccgggcacttaattctcggggtgaggacctggagcgacctttggaacttagagtgaaagtgatggacatcaatgacaacgctccagtgtttagccagagcgtctacacggcctcaatcgaagagaattccgatgccaacacacttgtggttaaactctgtgccacagacgctgatgaagaaaatcacctcaattcaaagatagcttacaagatcgtcagccaagagccctctggagccccaatgtttatcctgaaccgatacaccggggaggtctgtaccatgtcttcattcttggatcgagagcagcactctatgtataatctcgttgtgagagggtccgatcgagacggagctgccgacggcctgtcctctgaatgtgactgccgcatcaaagtgctagacgtgaacgataatttcccaactcttgagaagacttcatatagcgcaagcatcgaggagaattgtctgtcctctgagctaataaggttgcaggcgattgacctagatgaggagggcaccgacaactggctcgctcagtatctcatcttgtctggaaatgacgggaactggttcgacatccagactgatccacagactaacgaaggcatcctgaaggtcgtgaaaatgctcgattacgagcaggccccaaatatccaactgtccattggagtgaagaaccaggccgatttccactacagtgtcgctagccagtttcaaatgcaccccactcctgtgcgcatccaggtggtcgatgtgcgggagggccctgccttccatcctagcacaatggccttctctgtacgcgagggtattaagggttccagtctcttgaactacgtccttggaacttacaccgccatcgacctcgataccgggaaccccgcaactgacgtgaggtacataatcggacatgatgctgggagctggttgaaaatcgatagccgcaccggtgaaattcagtttagcagagagttcgacaagaagtcgaagtacattatcaacggtatctatactgcggagattctggcaatagacgatgggtcgggcaaaaccgccacaggcactatctgcattgaagtgcccgacataaatgactactgtccaaacatattccccgagagacgaacaatttgcatagactctccttccgtcctaataagcgtgaacgagcacagctacgggtcccccttcaccttctgtgttgtcgacgagccccctggaattgctgatatgtgggacgtcagatctacaaacgccacatctgccattttgaccgccaaacaggtattatctcctggcttctacgagatacctattttggtcaaagacagctacaatagagcttgtgaattagcacagatggttcaactctacgcgtgcgattgcgatgacaaccatatgtgtttagactcaggagcagcaggaatttacaccgaagatatcaccggggacacatacggaccggtgacggaagatcaggcaggcgtgtcaaacgtgggcctgggcccagccggtatcggtatgatggtgctgggtatcctgctgcttatccttgcccctttactcctcctgttatgttgctgcaagcagcgacagccagagggcctggggaccaggttcgcgcctgtgccggaaggtggtgaaggcgtcatgcagagctggcgcattgaaggagcccatcccgaagaccgcctgtttagcgcctacgccctccccggaggcggagggaccgcggatgggggagggtccgttttagggcgttgcgcattgcaagcaaccccagcgttactcaaccagcatcctcccttttccgaaatttacaccaatacttacgctgccggtggaaccgttgaaggcggagtgagtggggtggagctgaatacagggatgggaacagctgtgggactaatggccgctggtgccgcaggcgcttcaggtgccgcacggaagcgatcttctactatgggcacacttagggattacgccgacgcagacatcaatatggctttcctagatagttattttagtgagaaggcctatgcatatgcggacgaggacgagggcaggcccgctaatgactgcctgttaatctatgatcacgagggtgtgggctcccccgtaggttcaattgggtgctgctcatggatcgtggatgacttggatgagtcctgcatggaaaccctagatcctaaattccggaccctggctgaaatctgtctgaataccgagatcgagccatttcccagccatcaggcttgcattcccatctcaacagacctgccattgttggggcctaattatttcgtcaatgaatcatctgggctgacccccagcgaagtagagtttcaggaagagatggccgctagcgaacctgtggtgcacggggacataattgtgaccgaaacctatgggaacgcagacccatgtgttcagccaaccaccattattttcgacccccagcttgctcctaacgtggtggtcactgaggcagtgatggcacccgtatatgacatccagggtaatatctgtgttcctgctgaactggccgactacaacaatgtcatttatgctgagagagtgctggcgtctccaggcgtccctgacatgtcgaattcgagtacgaccgagggctgcatggggcctgtgatgagcggcaatatcctggtgggtcccgagatccaggtgatgcaaatgatgtccccggacttgcccatcggtcagacagtcggttctacctccccgatgacctctaggcacagggtcacccgatactcaaacatccattacacccagcagtag

SEQ ID NO: 49517 - DNA, 3180 bp, Artificial Sequence
  derived and/or modified sequence
atggactggctgttcttcagaaacatctgcctgctgatcatcctgatggtggtgatggaggtgaacagcgagttcatcgtggaggtgaaggagttcgacatcgagaacggcaccaccaagtggcagaccgtgagaagacagaagagagagtggatcaagttcgccgccgcctgcagagagggcgaggacaacagcaagagaaaccccatcgccaagatcagaagcgactgcgagagcaaccagaagatcacctacagaatcagcggcgtgggcatcgacagacccccctacggcgtgttcaccatcaaccccagaaccggcgagatcaacatcaccagcgtggtggacagagagatcacccccctgttcctgatctactgcagagccctgaacagcagaggcgaggacctggagagacccctggagctgagagtgaaggtgatggacatcaacgacaacgcccccgtgttcagccagagcgtgtacaccgccagcatcgaggagaacagcgacgccaacaccctggtggtgaagctgtgcgccaccgacgccgacgaggagaaccacctgaacagcaagatcgcctacaagatcgtgagccaggagcccagcggcgcccccatgttcatcctgaacagatacaccggcgaggtgtgcaccatgagcagcttcctggacagagagcagcacagcatgtacaacctggtggtgagaggcagcgacagagacggcgccgccgacggcctgagcagcgagtgcgactgcagaatcaaggtgctggacgtgaacgacaacttccccaccctggagaagaccagctacagcgccagcatcgaggagaactgcctgagcagcgagctgatcagactgcaggccatcgacctggacgaggagggcaccgacaactggctggcccagtacctgatcctgagcggcaacgacggcaactggttcgacatccagaccgacccccagaccaacgagggcatcctgaaggtggtgaagatgctggactacgagcaggcccccaacatccagctgagcatcggcgtgaagaaccaggccgacttccactacagcgtggccagccagttccagatgcaccccacccccgtgagaatccaggtggtggacgtgagagagggccccgccttccaccccagcaccatggccttcagcgtgagagagggcatcaagggcagcagcctgctgaactacgtgctgggcacctacaccgccatcgacctggacaccggcaaccccgccaccgacgtgagatacatcatcggccacgacgccggcagctggctgaagatcgacagcagaaccggcgagatccagttcagcagagagttcgacaagaagagcaagtacatcatcaacggcatctacaccgccgagatcctggccatcgacgacggcagcggcaagaccgccaccggcaccatctgcatcgaggtgcccgacatcaacgactactgccccaacatcttccccgagagaagaaccatctgcatcgacagccccagcgtgctgatcagcgtgaacgagcacagctacggcagccccttcaccttctgcgtggtggacgagccccccggcatcgccgacatgtgggacgtgagaagcaccaacgccaccagcgccatcctgaccgccaagcaggtgctgagccccggcttctacgagatccccatcctggtgaaggacagctacaacagagcctgcgagctggcccagatggtgcagctgtacgcctgcgactgcgacgacaaccacatgtgcctggacagcggcgccgccggcatctacaccgaggacatcaccggcgacacctacggccccgtgaccgaggaccaggccggcgtgagcaacgtgggcctgggccccgccggcatcggcatgatggtgctgggcatcctgctgctgatcctggcccccctgctgctgctgctgtgctgctgcaagcagagacagcccgagggcctgggcaccagattcgcccccgtgcccgagggcggcgagggcgtgatgcagagctggagaatcgagggcgcccaccccgaggacagactgttcagcgcctacgccctgcccggcggcggcggcaccgccgacggcggcggcagcgtgctgggcagatgcgccctgcaggccacccccgccctgctgaaccagcacccccccttcagcgagatctacaccaacacctacgccgccggcggcaccgtggagggcggcgtgagcggcgtggagctgaacaccggcatgggcaccgccgtgggcctgatggccgccggcgccgccggcgccagcggcgccgccagaaagagaagcagcaccatgggcaccctgagagactacgccgacgccgacatcaacatggccttcctggacagctacttcagcgagaaggcctacgcctacgccgacgaggacgagggcagacccgccaacgactgcctgctgatctacgaccacgagggcgtgggcagccccgtgggcagcatcggctgctgcagctggatcgtggacgacctggacgagagctgcatggagaccctggaccccaagttcagaaccctggccgagatctgcctgaacaccgagatcgagcccttccccagccaccaggcctgcatccccatcagcaccgacctgcccctgctgggccccaactacttcgtgaacgagagcagcggcctgacccccagcgaggtggagttccaggaggagatggccgccagcgagcccgtggtgcacggcgacatcatcgtgaccgagacctacggcaacgccgacccctgcgtgcagcccaccaccatcatcttcgacccccagctggcccccaacgtggtggtgaccgaggccgtgatggcccccgtgtacgacatccagggcaacatctgcgtgcccgccgagctggccgactacaacaacgtgatctacgccgagagagtgctggccagccccggcgtgcccgacatgagcaacagcagcaccaccgagggctgcatgggccccgtgatgagcggcaacatcctggtgggccccgagatccaggtgatgcagatgatgagccccgacctgcccatcggccagaccgtgggcagcaccagccccatgaccagcagacacagagtgaccagatacagcaacatccactacacccagcagtag

SEQ ID NO: 49518 - DNA, 3637 bp, Artificial Sequence
  derived and/or modified sequence
caccacagttatcacccatgccctcctaaaagggtgtctcaaagcatatctttctgtagagcagaattcggaactgagaagacgagggctcaaattgaatctcacaggatttgcgtgcaagagaaacccaaaggaatggattggctcttcttcagaaacatttgccttttgatcattctaatggtggtgatggaagtaaacagtgaatttattgttgaggtgaaggaatttgacattgaaaatggcactacaaaatggcaaacagtcagaagacaaaagcgggagtggatcaagtttgccgcagcctgtcgagaaggagaggacaactcgaagaggaaccccattgccaaaattcgatcagactgcgaatcgaaccagaagataacataccggatttctggagtagggattgatcgaccaccatatggggtattcaccattaatcctcgcactggggaaattaacatcacttcagtggtagacagagaaataactccacttttcttgatctattgccgggctctgaattcacggggtgaagatttagaaaggcctcttgagcttagagtcaaagttatggacataaatgataacgctccagtcttttcgcaaagtgtatacacagccagcattgaagaaaatagtgatgccaatacattggtagtaaagttatgtgccacagatgcagatgaagaaaatcatctgaattctaaaattgcctacaagatcgtctctcaggagccatcaggtgcacccatgttcattctgaataggtacactggagaagtctgcaccatgtccagtttcttggacagagagcaacacagtatgtacaacctggttgtgagaggctcagatcgggatggagctgcagatggactgtcttctgagtgtgactgtagaatcaaggttttagacgtcaacgataatttccccaccttagagaaaacttcatactcagccagtattgaagagaattgtttaagttcggaactgatacgattacaagcaattgatcttgatgaagaaggcactgataactggttggctcaatatttaattctctctggaaatgatgggaattggttcgatattcaaacagatccacaaaccaatgaaggcattttgaaagttgtcaagatgctggattatgaacaagcacctaacattcagcttagtatcggagttaaaaaccaagctgattttcactactccgttgcttctcaattccaaatgcacccaacccctgtgagaattcaagttgttgatgtgagagaaggacctgcatttcatccaagtactatggcttttagtgtgcgggaaggaataaaaggaagttccttattgaattatgtgcttggcacatatacagccatagatttggacacaggaaaccctgcaacagatgtcagatatatcatagggcatgatgcaggcagctggttaaaaattgattcaagaactggtgagatacaattttctagagaatttgataagaagtcaaaatatattatcaatgggatatacacagcagagatcctggctatagatgatggctctggaaaaacagctacaggaaccatatgtattgaggttcctgatatcaatgattattgtccaaacatttttcctgaaagaagaaccatctgcattgactctccatcagtccttatctctgttaatgaacattcttatgggtctccgtttactttctgtgttgttgatgagccaccaggaatagctgacatgtgggatgtcagatcaacaaatgctacctcggcaatccttacggctaagcaggttttatctccaggattttatgaaatcccaatcctggtgaaggacagctataacagagcatgtgaattggcacaaatggtgcagttatatgcctgtgattgcgatgacaaccacatgtgcctggactctggtgccgcgggcatctacacagaggacataactggtgacacgtatgggcctgtcactgaagaccaagctggagtttcaaatgttggtcttggaccagcagggattggcatgatggttctgggcatcctgctactgattttggctccactcttgctgctcctgtgttgctgcaaacagagacagccagaaggcctgggaacaagatttgctcctgtgcctgagggcggagaaggagtgatgcagtcttggagaattgaaggggcccatcccgaggacaggctttttagcgcctacgccttgccgggtggtggtggcaccgcagacggcggcggcagcgttttaggcagatgcgcgctgcaggcaactccagcgctgttaaaccaacatcctcccttttcagaaatctacaccaacacctatgcagccgggggcacggtggaaggaggtgtatcgggagtggagctcaacacaggtatggggacagccgttggcctcatggccgcaggggccgcaggagcctcaggggccgcaaggaagaggagctctaccatgggaaccctgcgggactacgctgacgcagacatcaacatggctttcttggacagctacttctcggagaaagcgtatgcttatgcagatgaagatgaaggtcgaccagccaatgactgcttgctcatttatgaccacgagggagtcgggtctcccgtaggctctattggttgttgcagttggattgtggatgacttagatgaaagctgcatggaaactttagatccaaaatttaggactcttgctgagatctgcttaaacacagaaattgaaccatttccttcacaccaggcttgtataccaatcagtactgacctccctttgctcggacctaattactttgttaatgaatcttcaggattgactccctcagaagttgaattccaagaagaaatggcagcatctgaacccgtggtccatggggatattattgtgactgagacttacggtaatgctgatccatgtgtgcaacccactacaattatttttgatcctcagcttgcacccaatgttgtagtaaccgaagcagtaatggcacctgtctatgatattcaagggaatatttgtgtacctgctgagttagcagattacaacaatgtaatctatgctgagagagtactggctagtcctggtgtgcctgacatgagcaatagtagcacgactgagggttgtatgggacctgtgatgagcggcaatattttagtagggccagaaattcaagtgatgcaaatgatgagtccagaccttcccataggccaaaccgttggctccacatcccccatgacatctcgacacagagtaacacgatacagtaacatacattacacccaacagtaagtgctttatggtcagtattctatgtggagaccttgcaccttgtaatcatcaatacatccaccaaaaatatataatgtaccatatatattaatagtcaacaaatactcagatattctaaggtcaatgccattatttgattataccattttgagggtgaatatggctaggcactttagataagcctttttaaaattctttctgattttaaataatgcgtcaaaaaatgtgcagaaaatgtattgcatcccttgatactgtctaacgaatagcacataactcatattgtgaatcctatgggtcttgaggcctgtagaaccaatct

SEQ ID NO: 49519 - protein, 221 aa, Artificial Sequence
  derived and/or modified sequence
MKSENGTVVGSFPSDEGWPFAKYLGACGRMVAVNYVGEELWSYFNAPWEKRVDLAWQLMEIAEQLTNNDFEFALYLLDVSFDNFAVGPRDGKVIIVDAENVLVADKRLIRQNKPENWDVWYESKFDDCDKEACLSFSKEILCARATVDHNYYAVCQNLLSRHATWRGTSGGLLHDPPSEIAKDGRLEALLDECANPKKRYGRFQAAKELREYLAQLSNNVR

SEQ ID NO: 49520 - DNA, 666 bp, Artificial Sequence
  derived and/or modified sequence
atgaagtccgagaacgggaccgtggtgggctcctttccgtcagatgaaggctggccattcgccaagtatctgggggcttgcggccggatggtcgctgttaactatgtaggcgaggagctctggtcctattttaatgctccatgggagaagcgagtcgatctggcatggcaactgatggaaatcgccgagcagttgaccaataacgattttgaattcgctctgtacctccttgatgtgagctttgacaactttgctgtgggtcctcgtgatggcaaggtcattatcgtggatgctgagaatgtgctggtggcagacaaaaggctcatccggcaaaacaaaccagagaactgggacgtgtggtacgaatcaaaatttgacgactgcgataaagaggcatgtctctcatttagcaaggagatcttatgtgctcgtgcaacagtggaccacaactactacgccgtatgccagaacctgctctcccggcacgccacttggagaggaactagcggcggcctgctgcatgaccccccttctgaaatcgccaaggacggccgactggaagcccttctcgatgagtgcgccaaccccaagaaacggtatggacggttccaggctgcaaaagagctcagagaatacctggctcagctgtccaacaacgtgcggtag

SEQ ID NO: 49521 - DNA, 666 bp, Artificial Sequence
  derived and/or modified sequence
atgaagtcagaaaatggaacagtggtgggcagcttccccagtgatgagggctggccctttgccaagtacctgggcgcctgtggccgcatggtggccgtgaactacgtgggggaggagctgtggagctacttcaatgccccctgggagaagagggtggacctggcctggcagctgatggagattgctgagcagctgaccaacaatgactttgaatttgccctgtacctgctggatgtgtcctttgacaactttgctgtgggccccagagatggcaaggtgatcatcgtggatgctgaaaatgtgctggtggccgacaagaggctcatccggcagaacaagccagagaactgggatgtgtggtatgagagcaagtttgatgactgtgacaaggaggcctgcctgtccttcagcaaggagatcctgtgtgcccgggccaccgtggaccacaactactatgctgtgtgccagaacctgctgagcagacatgccacctggaggggcaccagcggcggcctgctgcatgacccccccagcgagatcgccaaggatggccgcctggaggccctgctggatgaatgtgccaaccccaagaagagatatggccgcttccaggccgccaaggagctgcgggagtacctggcccagctgagcaacaacgtgaggtag

SEQ ID NO: 49522 - DNA, 666 bp, Artificial Sequence
  derived and/or modified sequence
atgaagagcgagaacggcaccgtggtgggcagcttccccagcgacgagggatggccctttgcaaaatatctgggggcctgtggtcgcatggtcgccgtgaattacgtgggggaggaactgtggtcctacttcaatgccccatgggagaagagagtcgatctcgcttggcagctcatggaaatcgccgagcagcttacaaataatgattttgagtttgctctttatctcttagacgtgtcgttcgacaacttcgcagtgggacctcgggacggcaaggtcatcattgtcgacgccgagaacgtcctggtcgctgataaaaggctcatacggcagaacaagcccgaaaactgggacgtatggtacgagtccaagttcgatgactgcgataaggaagcatgcctgagtttttctaaggagatactctgtgcccgggcaaccgtggatcacaactattacgcggtatgccagaatctgctgagcaggcacgcaacatggagagggacttccgggggacttctccatgacccgcccagtgagatcgctaaggatggacgcttggaggcgcttctggatgagtgcgctaacccaaagaaaaggtacggccgatttcaggctgctaaagaattgcgggagtacctggctcaattgtctaataatgtccgctag

SEQ ID NO: 49523 - DNA, 666 bp, Artificial Sequence
  derived and/or modified sequence
atgaagagcgagaatggaactgtggtcggatcatttccttcagacgagggctggccctttgccaaatacctgggggcttgtggcaggatggtggctgtaaattacgtcggagaggagctctggtcttactttaacgctccgtgggagaagcgggtggacctcgcatggcagctgatggagattgccgagcagctaaccaacaatgatttcgaattcgctctgtatttgctggacgtgagcttcgacaattttgctgtgggccctcgcgatggcaaggtgatcatcgttgacgccgaaaacgtgctggtggcagataagcgattgatacgccagaataagcctgagaactgggatgtctggtatgaatcaaagttcgatgactgcgacaaagaggcctgcctgtcattcagcaaggagatcctctgcgcaagagcaacagtcgaccacaattattacgctgtgtgtcagaatctcctcagccgtcatgctacatggaggggtactagtggtggcctactgcatgaccccccatcagaaatagccaaggatggtagactggaggccttacttgacgaatgtgccaatccaaagaagaggtacggacgatttcaagccgctaaggagctccgtgagtacctagcacagctatctaacaacgtgcgctag

SEQ ID NO: 49524 - DNA, 1876 bp, Artificial Sequence
  derived and/or modified sequence
agttcggactcggccgggctgggccaggctgcaggcgtgggaaggggcgtctccgggggagccccggggctgtgcagggaggccgagggcgaccccgctgatggagagtctgctcttgttacctagattcgggcgcatttcggatttgactgtggatctttcaacgccagagggagtgcgtctcttaacactccccaaaatgtctctactgcgagtttccttccgctctctaccctgcctttctgcttttatctgccggggcttgcaggtccgcggcgcagactgttcacgagcccttggacctttcctagttcttctgaagtgttctacaccgcgttcgctcttccttttctggcgctggtggctggcctaacttcggtctcagagtctttgttttcgctcatttacctggcagtcatttggacacctaattcgaggacaagttggggaggatgaagtcggagaacgggacagtggtcgggagttttccgtctgatgaaggttggccatttgcaaagtatcttggagcttgtggaagaatggtggctgtaaattatgttggagaagaactgtggagttactttaatgcgccatgggaaaaacgagttgacctcgcttggcaattaatggaaatagcagaacagcttacaaacaatgactttgaatttgcactctacctcctggacgtcagctttgacaattttgcagttggtcctagagatgggaaggtaatcattgtggatgctgaaaatgttttggttgctgacaaaagattaattagacaaaataaacctgaaaattgggatgtatggtatgaaagcaagtttgatgactgtgataaggaggcttgcttatcattttcaaaagaaattctttgtgctcgtgccactgtggaccacaattactatgctgtttgtcagaacctcttatccagacatgccacctggcgtggcacttctggaggactccttcatgatccaccaagtgaaattgccaaagatggccggctcgaggccttgctggatgagtgtgccaacccaaagaagcgctatggcagattccaggctgcaaaagaactgcgtgaatacctagcacaattaagtaacaacgtgaggtagtctatggtgaacttttctttttttctccatttaaacagcactggctaaaactaaaccaccaaaaaacgatctgaaaaaatgaaatttggaagtgttacattcagaggatgataaacttgcactgatagatcttaatgttaacatccatcaaaataagacattacttcaaaaatcacatgatgcttctgcaaataagtatgttcttatactttggaggcttgagctgtcatcagctgctccccactaccccggaatgcttgagtggattaatgaatattgttaagctattggaaatgagtctgatagtacattggcttgtgtatcaaagggtacttggtacttagtttgcatttactatcatgattttgtgaatctcttgcatttactttgaatgtcaagtcagattggtctgttttataggccgctttttccttctgatgtgtagggttttttccccctttttttttttaattaaattttgaaaattcaggttactgtaggtgttcatttaaatttttaatagttgtcattcagtgctatttggtacatatttactgttagggcaggattcccaggtttactgtgttttttttttttttttttaaagaaagctaaatattacattatgtaaatacttcttttcaccaacttctgtagtttcaccattgcatggtgtcatttcaggttatttaacagttatatccctctatgccaataattagaagtgtacactaaacatgaagtttggcatatgttgc

SEQ ID NO: 49525 - DNA, 666 bp, Artificial Sequence
  derived and/or modified sequence
atgaagagcgagaacggcaccgtggtgggcagcttccccagcgacgagggctggcccttcgccaagtacctgggcgcctgcggcagaatggtggccgtgaactacgtgggcgaggagctgtggagctacttcaacgccccctgggagaagagagtggacctggcctggcagctgatggagatcgccgagcagctgaccaacaacgacttcgagttcgccctgtacctgctggacgtgagcttcgacaacttcgccgtgggccccagagacggcaaggtgatcatcgtggacgccgagaacgtgctggtggccgacaagagactgatcagacagaacaagcccgagaactgggacgtgtggtacgagagcaagttcgacgactgcgacaaggaggcctgcctgagcttcagcaaggagatcctgtgcgccagagccaccgtggaccacaactactacgccgtgtgccagaacctgctgagcagacacgccacctggagaggcaccagcggcggcctgctgcacgacccccccagcgagatcgccaaggacggcagactggaggccctgctggacgagtgcgccaaccccaagaagagatacggcagattccaggccgccaaggagctgagagagtacctggcccagctgagcaacaacgtgagatag

SEQ ID NO: 49526 - DNA, 3654 bp, Artificial Sequence
  derived and/or modified sequence
atgaagggcatgagccacgagcccaagagccccagcctgggcatgctgagcaccgccaccagaaccaccgccaccgtgaaccccctgacccccagccccctgaacggcgccctggtgcccagcggcagccccgccaccagcagcgccctgagcgcccaggccgcccccagcagcagcttcgccgccgccctgagaaagctggccaagcaggccgaggagcccagaggcagcagcctgagcagcgagagcagccccgtgagcagccccgccaccaaccacagcagccccgccagcacccccaagagagtgcccatgggccccatcatcgtgccccccggcggccacagcgtgcccagcaccccccccgtggtgaccatcgcccccaccaagaccgtgaacggcgtgtggagaagcgagagcagacaggacgccggcagcagaagcagcagcggcggcagagagagactgatcgtggagccccccctgccccaggagaaggccggcggccccgccatccccagccacctgctgagcaccccctaccccttcggcctgagccccagcagcgtggtgcaggacagcagattcccccccctgaacctgcagagacccgtgcaccacgtggtgccccccagcaccgtgaccgaggactacctgagaagcttcagaccctaccacaccaccgacgacctgagaatgagcagcctgccccccctgggcctggaccccgccaccgccgccgcctactaccaccccagctacctggccccccaccccttcccccaccccgccttcagaatggacgacagctactgcctgagcgccctgagaagccccttctaccccatccccacccccggcagcctgccccccctgcaccccagcgccatgcacctgcacctgagcggcgtgagatacccccccgagctgagccacagcagcctggccgccctgcacagcgagagaatgagcggcctgagcgccgagagactgcagatggacgaggagctgagaagagagagagagagagagagagagagagagagagagagagaggccgacagagagagagagaaggagagagagagagagagagagaaggagagagagcaggagaaggagagagagagagagaaggagagagagagagagctggagagacagagagagcagagagccagagagaaggagctgctggccgccaaggccctggagcccagcttcctgcccgtggccgagctgcacggcctgagaggccacgccaccgaggagagaggcaagcccagcgagcagctgacccccaccagagccgagaagctgaaggacgccggcctgcaggcccccaagcccgtgcagcaccccctgcaccccgtgcccaccccccaccacaccgtgcccagcctgatcagcaaccacggcatcttcagcctgcccagcagcagcgccgccaccgccctgctgatccagagaaccaacgaggaggagaagtggctggccagacagagaagactgagacaggagaaggaggacagacagagccaggtgagcgagttcagacagcaggtgctggagcagcacctggacatgggcagaccccccgtgcccgccgaggccgagcacagacccgagagcaccaccagacccggccccaacagacacgagcccggcggcagagaccccccccagcacttcggcggccccccccccctgatcagccccaagccccagctgcacgccgcccccaccgccctgtggaaccccgtgagcctgatggacaacaccctggagaccagaagagccgagagccacagcctgcacagccaccccgccgccttcgagcccagcagacaggccgccgtgcccctggtgaaggtggagagagtgttctgccccgagaaggccgaggagggccccagaaagagagagcccgcccccctggacaagtaccagccccccccccccccccccagagagggcggcagcctggagcaccagcccttcctgcccggccccggccccttcctggccgagctggagaagagcacccagaccatcctgggccagcagagagccagcctgccccaggccgccaccttcggcgagctgagcggccccctgaagcccggcagcccctacagaccccccgtgcccagagcccccgaccccgcctacatctacgacgagttcctgcagcagagaagaagactggtgagcaagctggacctggaggagagaagaagaagagaggcccaggagaagggctactactacgacctggacgacagctacgacgagagcgacgaggaggaggtgagagcccacctgagatgcgtggccgagcagccccccctgaagctggacaccagcagcgagaagctggagttcctgcagctgttcggcctgaccacccagcagcagaaggaggagctggtggcccagaagagaagaaagagaagaagaatgctgagagagagaagccccagcccccccaccatccagagcaagagacagacccccagccccagactggccctgagcaccagatacagccccgacgagatgaacaacagccccaacttcgaggagaagaagaagttcctgaccatcttcaacctgacccacatcagcgccgagaagagaaaggacaaggagagactggtggagatgctgagagccatgaagcagaaggccctgagcgccgccgtggccgacagcctgaccaacagccccagagacagccccgccgtgagcctgagcgagcccgccacccagcaggccagcctggacgtggagaagcccgtgggcgtggccgccagcctgagcgacatccccaaggccgccgagcccggcaagctggagcaggtgagaccccaggagctgagcagagtgcaggagctggcccccgccagcggcgagaaggccagactgagcgaggcccccggcggcaagaagagcctgagcatgctgcactacatcagaggcgccgcccccaaggacatccccgtgcccctgagccacagcaccaacggcaagagcaagccctgggagcccttcgtggccgaggagttcgcccaccagttccacgagagcgtgctgcagagcacccagaaggccctgcagaagcacaagggcagcgtggccgtgctgagcgccgagcagaaccacaaggtggacaccagcgtgcactacaacatccccgagctgcagagcagcagcagagccccccccccccagcacaacggccagcaggagccccccaccgccagaaagggcccccccacccaggagctggacagagacagcgaggaggaggaggaggaggacgacgaggacggcgaggacgaggaggaggtgcccaagagaaagtggcagggcatcgaggccgtgttcgaggcctaccaggagcacatcgaggagcagaacctggagagacaggtgctgcagacccagtgcagaagactggaggccagacactacagcctgagcctgaccgccgagcagctgagccacagcgtggccgagctgagaagccagaagcagaagatggtgagcgagagagagagactgcaggccgagctggaccacctgagaaagtgcctggccctgcccgccatgcactggcccagaggctacctgaagggctaccccagatag

SEQ ID NO: 49527 - DNA, 3342 bp, Artificial Sequence
  derived and/or modified sequence
atgggccccatcatcgtgccccccggcggccacagcgtgcccagcaccccccccgtggtgaccatcgcccccaccaagaccgtgaacggcgtgtggagaagcgagagcagacaggacgccggcagcagaagcagcagcggcggcagagagagactgatcgtggagccccccctgccccaggagaaggccggcggccccgccatccccagccacctgctgagcaccccctaccccttcggcctgagccccagcagcgtggtgcaggacagcagattcccccccctgaacctgcagagacccgtgcaccacgtggtgccccccagcaccgtgaccgaggactacctgagaagcttcagaccctaccacaccaccgacgacctgagaatgagcagcctgccccccctgggcctggaccccgccaccgccgccgcctactaccaccccagctacctggccccccaccccttcccccaccccgccttcagaatggacgacagctactgcctgagcgccctgagaagccccttctaccccatccccacccccggcagcctgccccccctgcaccccagcgccatgcacctgcacctgagcggcgtgagatacccccccgagctgagccacagcagcctggccgccctgcacagcgagagaatgagcggcctgagcgccgagagactgcagatggacgaggagctgagaagagagagagagagagagagagagagagagagagagagagaggccgacagagagagagagaaggagagagagagagagagagagaaggagagagagcaggagaaggagagagagagagagaaggagagagagagagagctggagagacagagagagcagagagccagagagaaggagctgctggccgccaaggccctggagcccagcttcctgcccgtggccgagctgcacggcctgagaggccacgccaccgaggagagaggcaagcccagcgagcagctgacccccaccagagccgagaagctgaaggacgccggcctgcaggcccccaagcccgtgcagcaccccctgcaccccgtgcccaccccccaccacaccgtgcccagcctgatcagcaaccacggcatcttcagcctgcccagcagcagcgccgccaccgccctgctgatccagagaaccaacgaggaggagaagtggctggccagacagagaagactgagacaggagaaggaggacagacagagccaggtgagcgagttcagacagcaggtgctggagcagcacctggacatgggcagaccccccgtgcccgccgaggccgagcacagacccgagagcaccaccagacccggccccaacagacacgagcccggcggcagagaccccccccagcacttcggcggccccccccccctgatcagccccaagccccagctgcacgccgcccccaccgccctgtggaaccccgtgagcctgatggacaacaccctggagaccagaagagccgagagccacagcctgcacagccaccccgccgccttcgagcccagcagacaggccgccgtgcccctggtgaaggtggagagagtgttctgccccgagaaggccgaggagggccccagaaagagagagcccgcccccctggacaagtaccagccccccccccccccccccagagagggcggcagcctggagcaccagcccttcctgcccggccccggccccttcctggccgagctggagaagagcacccagaccatcctgggccagcagagagccagcctgccccaggccgccaccttcggcgagctgagcggccccctgaagcccggcagcccctacagaccccccgtgcccagagcccccgaccccgcctacatctacgacgagttcctgcagcagagaagaagactggtgagcaagctggacctggaggagagaagaagaagagaggcccaggagaagggctactactacgacctggacgacagctacgacgagagcgacgaggaggaggtgagagcccacctgagatgcgtggccgagcagccccccctgaagctggacaccagcagcgagaagctggagttcctgcagctgttcggcctgaccacccagcagcagaaggaggagctggtggcccagaagagaagaaagagaagaagaatgctgagagagagaagccccagcccccccaccatccagagcaagagacagacccccagccccagactggccctgagcaccagatacagccccgacgagatgaacaacagccccaacttcgaggagaagaagaagttcctgaccatcttcaacctgacccacatcagcgccgagaagagaaaggacaaggagagactggtggagatgctgagagccatgaagcagaaggccctgagcgccgccgtggccgacagcctgaccaacagccccagagacagccccgccgtgagcctgagcgagcccgccacccagcaggccagcctggacgtggagaagcccgtgggcgtggccgccagcctgagcgacatccccaaggccgccgagcccggcaagctggagcaggtgagaccccaggagctgagcagagtgcaggagctggcccccgccagcggcgagaaggccagactgagcgaggcccccggcggcaagaagagcctgagcatgctgcactacatcagaggcgccgcccccaaggacatccccgtgcccctgagccacagcaccaacggcaagagcaagccctgggagcccttcgtggccgaggagttcgcccaccagttccacgagagcgtgctgcagagcacccagaaggccctgcagaagcacaagggcagcgtggccgtgctgagcgccgagcagaaccacaaggtggacaccagcgtgcactacaacatccccgagctgcagagcagcagcagagccccccccccccagcacaacggccagcaggagccccccaccgccagaaagggcccccccacccaggagctggacagagacagcgaggaggaggaggaggaggacgacgaggacggcgaggacgaggaggaggtgcccaagagaaagtggcagggcatcgaggccgtgttcgaggcctaccaggagcacatcgaggagcagaacctggagagacaggtgctgcagacccagtgcagaagactggaggccagacactacagcctgagcctgaccgccgagcagctgagccacagcgtggccgagctgagaagccagaagcagaagatggtgagcgagagagagagactgcaggccgagctggaccacctgagaaagtgcctggccctgcccgccatgcactggcccagaggctacctgaagggctaccccagatag

SEQ ID NO: 49528 - DNA, 3654 bp, Artificial Sequence
  derived and/or modified sequence
atgaaaggtatgtcccacgagccgaagagcccctcgttgggcatgctgagtaccgctacccggacaactgccactgtaaaccccctcactccttcgcccttgaacggggccttagtgccatccggcagcccagcgactagcagtgctttatctgcccaggccgccccatcttccagtttcgcagcagccttacgaaaactggccaagcaggcagaggagccccgtgggtctagcctctcatccgaatcttcacctgtgtcttctcctgccacgaaccattcgtcaccagcaagcactccaaagcgcgttcctatgggacccattattgtcccccctgggggtcatagtgtgccgtcaactccccccgtcgtgactattgcccctacgaaaacagtgaacggcgtctggagaagcgaaagccgacaagacgccggatctcgttctagttccggaggaagagaacggctgattgtggagcccccactgccgcaggagaaggctggcggacctgcaattcctagccatctcctttccacgccatacccattcggcctgtcccccagttcagtggttcaggatagtcgcttccccccactcaatttgcaaaggccggttcaccatgtggtgcccccctctacagtcaccgaggactacctgcgatcttttagaccatatcatacaaccgacgatctgcgcatgtcttctctgcctcctcttgggctggaccctgctactgcagccgcctattaccacccatcctacctggcaccacacccattcccccatccagccttcagaatggatgactcatattgcttgagtgccctaagatcccccttctaccccattcccacccctgggtccctgccacccttacatccaagcgcaatgcacttacatttgtcaggcgtcaggtatccccccgagttgtctcacagctcactggctgccctccacagcgagaggatgagcggcttatctgcagagcgtttacagatggatgaggagctccggagagagcgggagagggaacgggaaagggaaagagagcgtgaagctgaccgagagcgcgagaaagaacgtgagagagagcgggaaaaggagcgcgaacaggaaaaagagcgagaacgagaaaaagaacgggagcgggaactggaaaggcagcgtgagcaaagagccagggaaaaggagctgctcgcggccaaagcactggagccatccttcttaccagtcgcggaactccatgggctgagaggtcacgctaccgaagaaagaggcaaaccttctgaacagcttacgcctacccgcgcggagaagctgaaggatgcagggttgcaggcccctaagcccgtgcaacatcctctgcatcctgtacctacaccacaccacactgtgccaagcttgatctccaaccacgggatattctctcttccttctagttctgctgccacggccctgctcattcagagaactaatgaagaagagaagtggttggccagacagagaagattgcgacaggagaaggaggaccggcagagtcaagtgagcgaattccgccaacaggtgctcgaacagcacctagacatgggcagacctcctgttcccgccgaagcggaacatcggcctgaatcaacaaccagacccggacctaaccgtcacgaaccgggtggcagagatccccctcagcacttcggtggaccgccacctttaatttcccccaaaccccagctgcacgcagcccccaccgcactatggaatccggtgtccctgatggataacaccctcgagacccggcgagctgaatcccactccctgcactctcatccagcagccttcgagccatctcgccaagctgcagtaccactagtaaaggtagaacgggtgttctgccccgagaaagccgaagaaggacccagaaagcgtgagcccgctccactcgacaagtaccaaccccctccacccccccctcgggaggggggctcgctggagcatcagccctttctaccaggccctggtccatttctcgctgagctcgagaaatccacccagaccatcttgggacaacagcgggctagtctgccccaagctgcaactttcggggaactgtccgggccgcttaagcctggcagcccgtacaggccccccgttccacgggcccctgaccccgcttacatctacgacgagtttctccagcagcggaggcgtcttgtcagcaaactcgatcttgaggagcgacgaagacgagaggctcaggaaaaaggctattattatgatctggatgactcttacgatgagagcgatgaagaagaggttcgtgcgcacctcagatgcgtcgcggagcaacccccactgaagctcgacacctcttctgaaaagctcgaatttttacagctcttcgggctgaccacacagcagcagaaagaagaacttgtcgctcagaaacgccggaagaggcggcgcatgctgcgcgaacggtctcccagtccccctacgatacagtcaaaaaggcaaactccttctccaaggctggctctcagtacaaggtatagtcctgacgagatgaataacagccctaatttcgaagagaagaaaaagttcctgacaattttcaatcttactcacatttcggccgagaaacgcaaagacaaggagcggttggtcgaaatgctgcgagccatgaagcagaaagccttgagtgcggcagtggccgatagcttgactaacagccccagagacagccctgccgtatcactatcggagccagcaacacagcaggcatctttagacgtcgagaaacccgtcggcgtcgcggccagcttatccgatatccccaaggctgcagagccaggcaagcttgagcaggtgagaccacaggagctttcgcgagtgcaggagttggctcccgcatccggggaaaaggctaggctctccgaggcccctggaggcaaaaaatcgttgagcatgctgcactatataagaggcgctgcaccgaaagatatccccgtgcccctgtcccacagcacaaatggcaaatccaagccttgggagccttttgtggccgaagagttcgcacaccaatttcatgagtccgtgttacagagcacccagaaagccctacagaaacacaaagggagtgtggctgtgctgagcgccgagcagaaccacaaggtggacacttctgtccactacaacattcctgaactgcagtcttcatcgagagccccaccgccccagcacaacggccaacaggagccacctaccgcaagaaaggggccgcccacacaagaactagaccgagactctgaagaggaagaagaagaagatgatgaagatggcgaagacgaagaagaggtaccaaagcggaagtggcaggggatagaggctgtgtttgaggcttaccaagagcatatagaggagcagaatttggagcgccaggtactccaaactcaatgtagacgtttagaggcacgacactactctctatcactgacagctgagcaactgtcgcattccgtggcagagttacgctcccaaaagcaaaaaatggtgagcgaaagagaacggctgcaggccgagctagatcaccttcgcaagtgcctggcactcccagcaatgcactggcccagagggtacttgaagggctatccccgatag

SEQ ID NO: 49529 - DNA, 3342 bp, Artificial Sequence
  derived and/or modified sequence
atgggcccgatcatcgttccccctgggggtcactcagtccccagtacaccacctgtggtaacgatcgcacccaccaagacggtgaatggagtgtggagaagcgagtctagacaggacgccgggtcccgctcctccagcgggggaagggaaagactgattgtcgagccacccctgccccaggaaaaagcgggagggccagcgatcccctcccacttgctgagtacaccttatcccttcggtctaagccctagctcagtcgtgcaggactcacgatttccacctcttaatttacagaggcccgtgcaccacgtggtgcccccctctaccgtaaccgaggactacctgcgctcattcagaccgtaccacacaaccgatgacctgcgaatgtctagtctgccgcccctcggcctggaccccgccactgctgcagcgtattatcacccttcttatctggcccctcatccgttcccgcacccagcgtttagaatggacgattcctattgcttgtcagctctgagatccccattctaccctattcccaccccaggttctctccccccacttcacccaagtgcgatgcatcttcatttgagcggcgtgcgttaccctcccgagttgtctcattcctccctggcggcccttcactccgagcgcatgagtggcctgtctgctgaacgactgcagatggatgaagagctgcgccgggaaagggagcgtgaaagggaaagggagcgcgagcgggaggcggaccgcgagagagagaaggagcgagaaagagagcgcgaaaaggagcgtgaacaggagaaagaaagggagagagaaaaagaacgcgagagggagctcgagcgtcagagggagcaacgggctcgagagaaagaactgctcgctgcgaaggcactggaacctagcttcctgccagtggcagaactccacggactgcggggccacgcaactgaggagaggggaaagcctagcgaacagctgactcctaccagggcagaaaaactaaaagatgctggactgcaagctcctaagcctgtccaacaccccctgcatcccgttcccacccctcaccatacggttccttcactgatcagcaatcacggaatttttagtctacccagttcgtcggctgcaacggctctcctgattcaacggactaacgaagaggagaagtggctggcaagacagcgacggctgcgtcaagagaaagaggacaggcagtcccaagtgtccgaattcaggcagcaggtcttggagcagcaccttgatatggggcgaccacccgtgccagccgaggccgaacatcggcccgagtcgacaacacgtccaggacccaatcgccacgagccgggaggacgggatccaccgcagcattttggtgggccccccccactcatctcccccaagccacagcttcatgccgctccaacggcgctatggaatcccgttagtttgatggacaacacactggaaaccagaagggcagagagccattctctacactcgcacccggcagctttcgagccttcccggcaagctgctgtgccattggtgaaggtggaacgggttttttgccctgagaaagccgaagaaggaccacgaaaacgcgagcccgctcctctcgacaagtaccagccacccccccccccccctagggagggaggaagtttagagcaccagccattcctgcccggaccaggaccattcctggccgagctcgagaagagtacccaaactattctgggacaacagagggcgtcactccctcaagccgcaacctttggggaattgtccggcccgcttaaacctggctctccttatagacctcctgttccacgggcacccgaccctgcctacatctacgacgagttcctgcagcagcgcagaagattagtgtcgaaactggacctagaggagagacggaggagggaggcgcaagaaaaaggctattattatgatctggacgactcttatgacgagagcgatgaggaggaggttagagcacatttacggtgcgtagccgaacagcctcccctgaaacttgatactagttccgaaaagttggagttcctgcaactgtttggacttaccacccagcagcagaaagaggagctggtcgctcaaaagagaagaaagcgcagacgtatgttgcgggaaaggagcccctctcctcctacaatccagagcaagagacagaccccctctcccagactagccctcagcacccgctactcgcctgatgagatgaacaatagccctaatttcgaggaaaaaaagaaatttctgactatctttaacctcacccacatctctgccgaaaaacgaaaagacaaggaaaggctggtagagatgctgagagctatgaagcagaaggccttgagcgcagccgtcgcggactctctaactaacagccctagagacagcccggccgtctctctgtctgagcctgctactcaacaggcatcactcgacgtggagaaacctgttggcgtggctgctagcctgagtgatatcccaaaagccgccgaaccggggaagctagagcaggtaaggcctcaggaactgtctagagtgcaggagctggcacccgcctcaggggagaaagctaggttatcggaggctcccgggggcaagaagagcctatctatgctccactatattcgaggcgcagcaccaaaggacatccccgtgccgttgtcacactcaacgaacgggaagagcaaaccttgggagccgtttgttgcagaggagttcgcccatcaattccacgaaagcgtgttacagtcaacccagaaggctctgcagaaacacaagggctctgttgcggttctcagcgccgaacagaaccacaaagtggatacgtccgtccactacaacatcccagagctccagagctcgtctagagcccctcctcctcagcataatggtcagcaggagcccccaaccgctagaaaagggccccccactcaggaactggaccgcgatagcgaagaagaggaagaagaagatgacgaggacggcgaggacgaagaggaggtgcctaaaaggaagtggcaaggcatcgaggctgttttcgaagcctatcaagagcacattgaagagcagaacctggaacgacaggtactccagacacaatgcagacgcctcgaggctcgtcactattcactttctctcacagctgagcagctcagtcactctgtggctgagctgcgctcccagaagcagaaaatggtgagtgaacgtgaacggttacaggccgagctcgatcatttgaggaagtgcctcgccctgcccgcgatgcactggcctcggggctatctgaaggggtacccccgatag

SEQ ID NO: 49530 - DNA, 3654 bp, Artificial Sequence
  derived and/or modified sequence
atgaagggcatgagccatgagcccaagagccccagcctgggcatgctgagcacagccaccaggaccacagccaccgtgaaccccctgacccccagccccctgaatggagccctggtgcccagcggcagccctgccaccagcagcgccctgagcgcccaggccgcccccagcagcagctttgctgctgccctgaggaagctggccaagcaggccgaggagccccggggcagcagcctgagcagcgagagcagccctgtgagcagccctgccaccaaccacagcagccctgccagcacccccaagagggtgcccatgggccccatcatcgtgcccccaggcggccacagcgtgcccagcaccccacctgtggtgaccatcgcccccaccaagacagtgaatggagtgtggaggtctgagagccggcaggatgctggcagccgcagcagcagcggcggccgggagcggctgattgtggagccccccctgccccaggagaaggccggcggccctgccatccccagccacctgctgagcaccccctaccccttcggcctgagccccagctctgtggtgcaggacagccgcttcccccccctgaacctgcagaggcctgtgcaccacgtggtgccccccagcacagtgacagaggactacctgcgctccttccggccctaccacaccacagatgacctgaggatgagcagcctgccccccctgggcctggaccctgccacagctgctgcctactaccaccccagctacctggccccccaccccttcccccacccagccttcaggatggatgacagctactgcctgagcgccctgcggagccccttctaccccatccccaccccaggcagcctgccccccctgcaccccagcgccatgcacctgcacctgagcggcgtgcgctacccacctgagctgagccacagcagcctggccgccctgcacagcgagaggatgagcggcctgtctgctgagcggctgcagatggatgaggagctgcggcgggagcgggagcgggagcgggagcgggagcgggagcgggaggccgaccgggagcgggagaaggagcgggagcgggagcgggagaaggagcgggagcaggagaaggagcgggagcgggagaaggagcgggagcgggagctggagcggcagcgggagcagagggcccgggagaaggagctgctggccgccaaggccctggagcccagcttcctgcctgtggccgagctgcacggcctgcggggccacgccacagaggagcggggcaagcccagcgagcagctgacccccaccagggctgagaagctgaaggatgctggcctgcaggcccccaagcctgtgcagcaccccctgcaccctgtgcccaccccccaccacacagtgcccagcctcatcagcaaccacggcatcttcagcctgcccagcagcagcgctgccacagccctgctgatccagaggaccaatgaggaggagaagtggctggcccggcagaggcggctgcggcaggagaaggaggaccggcagagccaggtgtctgagttccggcagcaggtgctggagcagcacctggacatgggccggccccctgtgcctgctgaggccgagcacaggcctgagagcaccacccggcccggccccaacagacatgagcccggcggccgggaccccccccagcactttggaggccccccacccctcatcagccccaagccccagctgcatgctgcccccacagccctgtggaaccctgtgtccctgatggacaacaccctggagacccggcgggcagagagccacagcctgcacagccaccctgctgcctttgagcccagccggcaggccgctgtgcccctggtgaaggtggagagggtcttctgcccagagaaggccgaggagggccccaggaagcgggagcccgcccccctggacaagtaccagcccccacctcctccaccccgggagggcggcagcctggagcaccagcccttcctgcccggccctggccccttcctggccgagctggagaagagcacccagaccatcctgggccagcagagggccagcctgccccaggccgccacctttggagagctgagcggccccctgaagccaggcagcccctaccggccccctgtgccccgggccccagaccctgcctacatctatgatgagttcctgcagcagaggcggcggctggtgtccaagctggacctggaggagaggagaagaagagaggcccaggagaagggctactactatgacctggatgacagctatgatgaaagtgatgaggaggaggtgcgggcccacctgcgctgtgtggccgagcagccccccctgaagctggacaccagcagcgagaagctggagttcctgcagctgtttggcctgaccacccagcagcagaaggaggagctggtggcccagaagaggaggaagagaagaaggatgctgcgggagaggagccccagcccccccaccatccagagcaagaggcagacccccagcccccggctggccctgagcacccgctacagcccagatgagatgaacaacagccccaactttgaggagaagaagaagttcctgaccatcttcaacctgacccacatctctgctgagaagaggaaggacaaggagcggctggtggagatgctgcgggccatgaagcagaaggccctgtctgctgctgtggccgacagcctgaccaacagcccccgggacagccctgctgtgtccctgtctgagcccgccacccagcaggccagcctggatgtggagaagcctgtgggcgtggccgccagcctgagtgacatccccaaggctgctgagcccgggaagctggagcaggtgcggccccaggagctgagccgggtgcaggagctggccccagccagcggggagaaggcccggctgtctgaggcccctgggggcaagaagagcctgtccatgctgcactacatcagaggagctgcccccaaggacatccctgtgcccctgagccacagcaccaacgggaagagcaagccctgggagccctttgtggccgaggagtttgcccaccagttccacgagagcgtgctgcagagcacccagaaggccctgcagaagcacaagggctctgtggccgtgctgtctgctgagcagaaccacaaggtggacacctctgtgcactacaacatccctgagctgcagagcagcagccgggcccccccaccccagcacaacggccagcaggagcccccaacagccaggaagggcccccccacccaggagctggaccgggacagcgaggaggaggaggaggaggatgatgaagatggagaagatgaggaggaggtgcccaagaggaagtggcagggcatcgaggccgtgtttgaggcctaccaggagcacatcgaggagcagaacctggagcggcaggtgctgcagacccagtgccggcggctggaggcccggcactacagcctgagcctgacagctgagcagctgagccacagcgtggccgagctgcggagccagaagcagaagatggtgtctgagcgggagcggctgcaggccgagctggaccacctgaggaagtgcctggccctgcctgccatgcactggccccggggctacctgaagggctaccccaggtag

SEQ ID NO: 49531 - DNA, 3342 bp, Artificial Sequence
  derived and/or modified sequence
atgggccccatcatcgtgcccccaggcggccacagcgtgcccagcaccccacctgtggtgaccatcgcccccaccaagacagtgaatggagtgtggaggtctgagagccggcaggatgctggcagccgcagcagcagcggcggccgggagcggctgattgtggagccccccctgccccaggagaaggccggcggccctgccatccccagccacctgctgagcaccccctaccccttcggcctgagccccagctctgtggtgcaggacagccgcttcccccccctgaacctgcagaggcctgtgcaccacgtggtgccccccagcacagtgacagaggactacctgcgctccttccggccctaccacaccacagatgacctgaggatgagcagcctgccccccctgggcctggaccctgccacagctgctgcctactaccaccccagctacctggccccccaccccttcccccacccagccttcaggatggatgacagctactgcctgagcgccctgcggagccccttctaccccatccccaccccaggcagcctgccccccctgcaccccagcgccatgcacctgcacctgagcggcgtgcgctacccacctgagctgagccacagcagcctggccgccctgcacagcgagaggatgagcggcctgtctgctgagcggctgcagatggatgaggagctgcggcgggagcgggagcgggagcgggagcgggagcgggagcgggaggccgaccgggagcgggagaaggagcgggagcgggagcgggagaaggagcgggagcaggagaaggagcgggagcgggagaaggagcgggagcgggagctggagcggcagcgggagcagagggcccgggagaaggagctgctggccgccaaggccctggagcccagcttcctgcctgtggccgagctgcacggcctgcggggccacgccacagaggagcggggcaagcccagcgagcagctgacccccaccagggctgagaagctgaaggatgctggcctgcaggcccccaagcctgtgcagcaccccctgcaccctgtgcccaccccccaccacacagtgcccagcctcatcagcaaccacggcatcttcagcctgcccagcagcagcgctgccacagccctgctgatccagaggaccaatgaggaggagaagtggctggcccggcagaggcggctgcggcaggagaaggaggaccggcagagccaggtgtctgagttccggcagcaggtgctggagcagcacctggacatgggccggccccctgtgcctgctgaggccgagcacaggcctgagagcaccacccggcccggccccaacagacatgagcccggcggccgggaccccccccagcactttggaggccccccacccctcatcagccccaagccccagctgcatgctgcccccacagccctgtggaaccctgtgtccctgatggacaacaccctggagacccggcgggcagagagccacagcctgcacagccaccctgctgcctttgagcccagccggcaggccgctgtgcccctggtgaaggtggagagggtcttctgcccagagaaggccgaggagggccccaggaagcgggagcccgcccccctggacaagtaccagcccccacctcctccaccccgggagggcggcagcctggagcaccagcccttcctgcccggccctggccccttcctggccgagctggagaagagcacccagaccatcctgggccagcagagggccagcctgccccaggccgccacctttggagagctgagcggccccctgaagccaggcagcccctaccggccccctgtgccccgggccccagaccctgcctacatctatgatgagttcctgcagcagaggcggcggctggtgtccaagctggacctggaggagaggagaagaagagaggcccaggagaagggctactactatgacctggatgacagctatgatgaaagtgatgaggaggaggtgcgggcccacctgcgctgtgtggccgagcagccccccctgaagctggacaccagcagcgagaagctggagttcctgcagctgtttggcctgaccacccagcagcagaaggaggagctggtggcccagaagaggaggaagagaagaaggatgctgcgggagaggagccccagcccccccaccatccagagcaagaggcagacccccagcccccggctggccctgagcacccgctacagcccagatgagatgaacaacagccccaactttgaggagaagaagaagttcctgaccatcttcaacctgacccacatctctgctgagaagaggaaggacaaggagcggctggtggagatgctgcgggccatgaagcagaaggccctgtctgctgctgtggccgacagcctgaccaacagcccccgggacagccctgctgtgtccctgtctgagcccgccacccagcaggccagcctggatgtggagaagcctgtgggcgtggccgccagcctgagtgacatccccaaggctgctgagcccgggaagctggagcaggtgcggccccaggagctgagccgggtgcaggagctggccccagccagcggggagaaggcccggctgtctgaggcccctgggggcaagaagagcctgtccatgctgcactacatcagaggagctgcccccaaggacatccctgtgcccctgagccacagcaccaacgggaagagcaagccctgggagccctttgtggccgaggagtttgcccaccagttccacgagagcgtgctgcagagcacccagaaggccctgcagaagcacaagggctctgtggccgtgctgtctgctgagcagaaccacaaggtggacacctctgtgcactacaacatccctgagctgcagagcagcagccgggcccccccaccccagcacaacggccagcaggagcccccaacagccaggaagggcccccccacccaggagctggaccgggacagcgaggaggaggaggaggaggatgatgaagatggagaagatgaggaggaggtgcccaagaggaagtggcagggcatcgaggccgtgtttgaggcctaccaggagcacatcgaggagcagaacctggagcggcaggtgctgcagacccagtgccggcggctggaggcccggcactacagcctgagcctgacagctgagcagctgagccacagcgtggccgagctgcggagccagaagcagaagatggtgtctgagcgggagcggctgcaggccgagctggaccacctgaggaagtgcctggccctgcctgccatgcactggccccggggctacctgaagggctaccccaggtag

SEQ ID NO: 49532 - DNA, 7495 bp, Artificial Sequence
  derived and/or modified sequence
tcctcggcggcgacagcagcaggtgtttcttggccggggccccggaagctccacctccccagcgggcccgagctgccgccgccgagcagccccgggtgagataagcagtttagacaaacactgggcgacggtggctccagcatgtatcagccgaggtggagctgcggggccctggcatgaaaggcatgagccatgagcccaagtccccttcgctagggatgctttccaccgcgaccaggaccaccgccaccgtcaaccccctcaccccctcgccgctcaatggcgccctggtgcccagcggcagccccgccaccagcagcgcgctgtcggcccaggccgcgccatcctccagctttgccgccgcgctgcgcaagctcgccaaacaggcggaggagcccagagggtcctcactgagcagcgagtcgtcccccgtgtcctctccggccaccaaccacagctcccccgccagcacacccaagcgcgtgcccatgggccctatcatcgtcccccctgggggccacagcgtgcccagcaccccccccgtggtgaccatcgctccaaccaaaaccgtgaatggtgtctggaggagtgagagccggcaggatgccggctccaggagcagcagtggaggtcgggaacgcctcattgtggagcccccgctccctcaggagaaggcagggggaccagccatcccctcgcacctgctcagcaccccctaccccttcggcctctcccccagctcagttgtgcaggattcccgcttcccgccactcaacctccagcggcccgtgcaccacgtggtgccccccagtaccgtgaccgaggactacctgagaagcttccggccctaccacaccaccgacgacctccgcatgtcctcactgcctcccctcggcctggacccggccactgctgcagcctactaccaccccagctacctggccccacaccccttcccccacccggccttcaggatggacgactcctactgcctgtctgccctgaggtccccgttctaccccatccccacccccggctccctgcccccactgcacccatcagcgatgcacctgcacctctctggggtccgctaccctcccgagctctcccactcatccctggcagcgctgcactcggagcgcatgtctggcctcagcgcggagaggctgcagatggacgaggagctaaggcgggagagggagcgcgagcgcgagcgcgagcgtgagcgtgaggctgaccgcgagcgggagaaggaacgtgagcgcgaacgcgagaaggagcgcgagcaagagaaggagcgtgagcgtgagaaggagcgcgagcgcgagctggagcgccagcgggagcagcgggcccgggagaaggagctgctggccgccaaggccctggagcccagcttcctgcccgtggccgagctgcatgggctgcgtggccatgccactgaggagcggggcaagccctcggagcagctgaccccaacccgagcagagaagctgaaggatgccggcctgcaggcgcccaagcccgtccaacaccccttgcatccggtgcccaccccacaccacacggtgcccagcctcatctccaaccatggcatcttctctctgcctagcagcagtgctgccacagccctgctgatccagcgcaccaatgaggaggagaagtggctggcgcggcagcggcggctgcggcaggagaaggaggaccggcagtctcaggtgtccgagttccggcagcaggtgctggagcagcacctggatatgggccggcccccggtgccggcggaggcagagcacaggccggagagcaccaccaggccaggaccaaaccgtcacgagccaggtggccgtgaccctccgcagcactttggggggccaccacctctgatttcgcccaagccccagctccatgctgcacccacggccctctggaaccccgtgtccctgatggacaacaccttggagacgcggcgggccgaaagccactctctgcacagccacccggctgcatttgagcccagccgccaggcagccgtgccgctggtgaaggtggagcgggtcttctgcccggagaaagcagaggaggggccacggaagcgtgagcctgcccctctggacaagtaccagccacctccgccgccaccacgagagggagggagcctggagcaccagcccttcctgcccgggcccgggcccttcctggctgagctcgagaagtccacccagaccatcctgggccagcagcgggcctccctcccacaggcggccaccttcggggagctcagcggacccctgaagcctggctcgccctaccggcccccagtgccacgggcccccgaccctgcctacatctatgatgagttcctgcagcagcgccggaggctggtcagcaagctggacctggaggagcgcaggcggcgggaggcccaggagaaagggtactactacgacctcgatgactcttacgacgagagcgatgaggaggaggtcagggcccacctccgttgcgtggccgagcagccgcccctcaaactggacacgtcctctgagaagctagagtttttgcaactttttggcttgaccacccaacagcagaaggaggaattggtggcccagaagcggaggaagcggcggaggatgctgcgagagagaagcccgtcgcccccaacaattcagagcaagcggcagacgccttcaccgagactggcgctgtctacccgctacagccctgatgagatgaacaacagtcccaacttcgaagaaaagaagaagttcctgaccatcttcaacctgacccacatcagcgctgagaagaggaaagacaaagagagacttgttgaaatgctccgtgccatgaagcagaaggcactgtcagcagcagtggccgactccttgacaaactctccgagggacagtcctgccgtctccctgagtgaaccagccacgcagcaagcctctctggatgtggagaagccggttggtgttgctgcttccttgtctgacatcccaaaggccgcggagcctgggaagctggaacaggtccggccccaggagctgtcgagagtccaggagctagctcctgccagcggggagaaggccaggctgagcgaggcccctggaggcaaaaagagtctgagcatgcttcactatatccggggcgctgcacccaaggacattcctgtgccgctgtcccacagcaccaatgggaagagcaagccgtgggagccctttgtggcagaagagtttgcacatcagttccacgagtcagtgctgcagtccacccagaaggccctgcagaagcataaagggagcgtggctgtgctgtctgcagagcagaaccacaaggttgacacgtccgtccactacaacattcctgagctgcagtcctccagccgcgcccctccaccccagcacaatgggcagcaggagccccccactgcaaggaagggccccccaacccaggagttggaccgggactcggaggaggaggaagaggaggatgatgaagatggagaagatgaggaggaagtccccaagcgcaagtggcaagggatcgaggccgtttttgaagcttaccaggaacacatagaagagcaaaatctggagcggcaggtgttacagacacaatgtagacgactggaggcccggcactacagcctcagcctgacggcagagcagctctcccacagcgtggcggagttgaggagccagaaacagaagatggtctcagaaagggagcggctccaggcagaactggaccacttacgaaagtgccttgccttgcctgcaatgcactggcctaggggctacctgaagggatatcccaggtgacggtttcccttgcactaggccgaacctatagtatagaaatattatctattttattaccttgaatatttaatatttttcactgggaggtttgaagcttacaaaatgagaatgtgccatgcatgaagcaaaggattccaggctccagaaaaaatgaatgaactcaccttgacgtcaatgcaattgaatcaccgttgtcattcagcgagcaaccaatgtaggattgcccacagtttttctttttaaaggtggttttcgcccttcctctcccacattatttcttaatctgaacatgaaggctccattagcaacactaaaacttgatcattaacagccccctgtgcatatgagtggatcaaaccggttctgttctttcttgtgttgccatgttactatgcctcaagcccagtttgcttttgccgcagcgatggggccagtctcattcctccccaggagtgaaacttgcttcagctgaaaaggttgggtgcattgtcagtaaaaagggcttatttgtttcattttactttcctgcaaaattttcttcaaagcaacaagtcctaggagcacacaaagcaacccaaaggcttttccctggaaaagctctttcttacctaaagataaaaccaattcacaaactgaaggtagctttttattactccgtggggagcatgtacagagctctgtgtatacacagcttcacacccaccagattgttactacagtgggttgggttttcatacagacgtaaattttgagagaaaagtcaaaggtgcttcagccttgtactgtgtatatatattaaaaaaaaaacaaagttttgtatgtttttattactttaactattgttataaaaagcctgccatttttaatatgtggtttgggggatttttgtttgtttttcctgtttgggggttttgtttgttgttttggttttttttgggcaaaaaaaaaaaaaaaaccttgcttttagtgtttgtactgctgctggtcaggacattaaaatattgaagtgtttttaaaaattaaagaagaagaaaagtaaaagagcttaccactggcgcctatgcgatcacttcatttttagtttgagttgcaccagaagctgccgtagaaagccatgcgctactgcttacctcctccactccccctgcctgcccccagcatctggacaagctaatagcaaatattacccattgctatcaagggaggagggggtagtctgtagaacccatgtgtgacagtcatgtgcacacatgggcgggggcttttaaaaacctttcaggaagtcaatgatttctgtgattgatataattctaaggtgtctgagagcaggtacagaataggaacttcagaggctttgtttaaacgcaaagctttgtaaaagccacaaggtctgagctgaacccctcctttttgaacttactgtgacaagcacaggaacggtcagaaactgggctcatcacaccaaggcaaagcaacgggcgagtcttcctccttgtcctagttactgcctatggaggcagtgtttagatcaagaaggcctctcttgctcccaagggccctcaccagaggccagggctgccagtcactggtctggggggtggaggcctgagctgagggcagggtgcctgacctgtgtgccggctgctcactgctgtgaccagcagccgagcccttggccctagcccttgctgcgcagaacagcttgctggcagctggcatcgtgtcgctttatctgcccccgcacagtttgctttgtacgtctgccaagaatcttccagttattagcaaactcagacgaatgtaccgccagtattatcagcagtcaacaagcaccttcctctccacagaagcagctggaagagaactcgaggggctgtgctgcaggcctcccctcgaaagacactgggaggtcagcatgttccacaggtgttcagagggagtctgctacaaactatcagggcaaaatctcactggatttctccactgaaaacctacttgaggtttctggtctgaaggcttaagagtcacatcttagcacttccgctctcaggcctcctcctccatcacagatgtctggatgcttttggaaatggccttggctaaagtaaaagggaaaagtagatccgataacttaaaaacgtagctcatcccttaccatccaaggggcactcccttggttggattttctatgacagcacaggggacaggtggcacaccatgagaggtctgcccagggtgggagcagtgtcactgtgctagcaatagttggcttctcccctgtcagtggaaaccccacttctgcccggcccttgagcttcttgcccactgtctccccatccttccacctacttgtggcgatctgagtactctactcttgctcaagaagtaatacgacaatcagaatacaaaccagtaaggcaacacgaataaactaagaaaaaggtaagaactgtctcaaaaacgaaagcacaccacccaagacacagtacccagtcatggtttccccatccaactattagtttcatactttgaaaacttactttcagattattctcaaagaacacagtagcacctaaatctgttttcaattgggcttaaaaattgacatgcaatctcttaagttttttgttcagctacttcacactgagtacctcaaatctgctctggagtcgattatgccacctgtgtgtcaggatgcacctgaaagccctcggctcggtccttagaccatcttcctacattacctggaagggagctgccatctgtccctctgcagagggataccttccaatagtaaattatctggttcctcactgaaacaagttatttttgcttcatatagtcagagtcagactgacatgataaaatatcatgttcctaatctgttgtctcagataagtgaccaagacgggactttccacattttagtctacattctaatcttaaaggaataaagcactgaattgggactaacattctgataggttgcacccttaagagtattcagagagcatcaaaaggagcccacaccttcagcagtgaaggattctaacacagggaatctgcagtttgtagcagaatggtattttcctcaagtagctcataatactgccaaatctcaaaagttaagctgaatttcacaccagatcctacccctttccctgagccacatgtttcacacaagtgtagaaaatgccagggatccaccacaagatggagatggtcagcacaaaccgattctgttcctctttaaagtgtatattagccacttagcaatctctatattctttcaagtaaccaagctgttgactttcttactacttgcagtagcctgtccccaacttttccatccagtgcttaacctaaaaaactccttaactctgccttgacctgaggaagaccatgctaactggtgttattttgtatgtaccctgtgcttaattctataacagtaaaccccatacgcaggtgggagggaggaacaccggtgcctcggtcactctgggggcagtttagatgctgtgaaattaaacctgttctaagtgtacttgtttgaattaattgtattgtaatattatttgttgaatgtagtaattaggtatttatgaatatattgctgtaatttctgacaacatccaaaaaataaaatcttcctaaattatgtt

SEQ ID NO: 49533 - DNA, 4366 bp, Artificial Sequence
  derived and/or modified sequence
accgtgtggtgcgtaaattatagcgtccggccaaggccgcaaggggggcgccgccggtgagctggcgggtcgtgcggggaagcagcacccccgcgccgtgccagggccggccagcgtccgcagggtcctcactgagcagcgagtcgtcccccgtgtcctctccggccaccaaccacagctcccccgccagcacacccaagcgcgtgcccatgggccctatcatcgtcccccctgggggccacagcgtgcccagcaccccccccgtggtgaccatcgctccaaccaaaaccgtgaatggtgtctggaggagtgagagccggcaggatgccggctccaggagcagcagtggaggtcgggaacgcctcattgtggagcccccgctccctcaggagaaggcagggggaccagccatcccctcgcacctgctcagcaccccctaccccttcggcctctcccccagctcagttgtgcaggattcccgcttcccgccactcaacctccagcggcccgtgcaccacgtggtgccccccagtaccgtgaccgaggactacctgagaagcttccggccctaccacaccaccgacgacctccgcatgtcctcactgcctcccctcggcctggacccggccactgctgcagcctactaccaccccagctacctggccccacaccccttcccccacccggccttcaggatggacgactcctactgcctgtctgccctgaggtccccgttctaccccatccccacccccggctccctgcccccactgcacccatcagcgatgcacctgcacctctctggggtccgctaccctcccgagctctcccactcatccctggcagcgctgcactcggagcgcatgtctggcctcagcgcggagaggctgcagatggacgaggagctaaggcgggagagggagcgcgagcgcgagcgcgagcgtgagcgtgaggctgaccgcgagcgggagaaggaacgtgagcgcgaacgcgagaaggagcgcgagcaagagaaggagcgtgagcgtgagaaggagcgcgagcgcgagctggagcgccagcgggagcagcgggcccgggagaaggagctgctggccgccaaggccctggagcccagcttcctgcccgtggccgagctgcatgggctgcgtggccatgccactgaggagcggggcaagccctcggagcagctgaccccaacccgagcagagaagctgaaggatgccggcctgcaggcgcccaagcccgtccaacaccccttgcatccggtgcccaccccacaccacacggtgcccagcctcatctccaaccatggcatcttctctctgcctagcagcagtgctgccacagccctgctgatccagcgcaccaatgaggaggagaagtggctggcgcggcagcggcggctgcggcaggagaaggaggaccggcagtctcaggtgtccgagttccggcagcaggtgctggagcagcacctggatatgggccggcccccggtgccggcggaggcagagcacaggccggagagcaccaccaggccaggaccaaaccgtcacgagccaggtggccgtgaccctccgcagcactttggggggccaccacctctgatttcgcccaagccccagctccatgctgcacccacggccctctggaaccccgtgtccctgatggacaacaccttggagacgcggcgggccgaaagccactctctgcacagccacccggctgcatttgagcccagccgccaggcagccgtgccgctggtgaaggtggagcgggtcttctgcccggagaaagcagaggaggggccacggaagcgtgagcctgcccctctggacaagtaccagccacctccgccgccaccacgagagggagggagcctggagcaccagcccttcctgcccgggcccgggcccttcctggctgagctcgagaagtccacccagaccatcctgggccagcagcgggcctccctcccacaggcggccaccttcggggagctcagcggacccctgaagcctggctcgccctaccggcccccagtgccacgggcccccgaccctgcctacatctatgatgagttcctgcagcagcgccggaggctggtcagcaagctggacctggaggagcgcaggcggcgggaggcccaggagaaagggtactactacgacctcgatgactcttacgacgagagcgatgaggaggaggtcagggcccacctccgttgcgtggccgagcagccgcccctcaaactggacacgtcctctgagaagctagagtttttgcaactttttggcttgaccacccaacagcagaaggaggaattggtggcccagaagcggaggaagcggcggaggatgctgcgagagagaagcccgtcgcccccaacaattcagagcaagcggcagacgccttcaccgagactggcgctgtctacccgctacagccctgatgagatgaacaacagtcccaacttcgaagaaaagaagaagttcctgaccatcttcaacctgacccacatcagcgctgagaagaggaaagacaaagagagacttgttgaaatgctccgtgccatgaagcagaaggcactgtcagcagcagtggccgactccttgacaaactctccgagggacagtcctgccgtctccctgagtgaaccagccacgcagcaagcctctctggatgtggagaagccggttggtgttgctgcttccttgtctgacatcccaaaggccgcggagcctgggaagctggaacaggtccggccccaggagctgtcgagagtccaggagctagctcctgccagcggggagaaggccaggctgagcgaggcccctggaggcaaaaagagtctgagcatgcttcactatatccggggcgctgcacccaaggacattcctgtgccgctgtcccacagcaccaatgggaagagcaagccgtgggagccctttgtggcagaagagtttgcacatcagttccacgagtcagtgctgcagtccacccagaaggccctgcagaagcataaagggagcgtggctgtgctgtctgcagagcagaaccacaaggttgacacgtccgtccactacaacattcctgagctgcagtcctccagccgcgcccctccaccccagcacaatgggcagcaggagccccccactgcaaggaagggccccccaacccaggagttggaccgggactcggaggaggaggaagaggaggatgatgaagatggagaagatgaggaggaagtccccaagcgcaagtggcaagggatcgaggccgtttttgaagcttaccaggaacacatagaagagcaaaatctggagcggcaggtgttacagacacaatgtagacgactggaggcccggcactacagcctcagcctgacggcagagcagctctcccacagcgtggcggagttgaggagccagaaacagaagatggtctcagaaagggagcggctccaggcagaactggaccacttacgaaagtgccttgccttgcctgcaatgcactggcctaggggctacctgaagggatatcccaggtgacggtttcccttgcactaggccgaacctatagtatagaaatattatctattttattaccttgaatatttaatatttttcactgggaggtttgaagcttacaaaatgagaatgtgccatgcatgaagcaaaggattccaggctccagaaaaaatgaatgaactcaccttgacgtcaatgcaattgaatcaccgttgtcattcagcgagcaaccaatgtaggattgcccacagtttttctttttaaaggtggttttcgcccttcctctcccacattatttcttaatctgaacatgaaggctccattagcaacactaaaacttgatcattaacagccccctgtgcatatgagtggatcaaaccggttctgttctttcttgtgttgccatgttactatgcctcaagcccagtttgcttttgccgcagcgatggggccagtctcattcctccccaggagtgaaacttgcttcagctgaaaaggttgggtgcattgtcagtaaaaagggcttatttgtttcattttactttcctgcaaaattttcttcaaagcaacaagtcctaggagcacacaaagcaacccaaaggcttttccctggaaaagctctttcttacctaaagataaaaccaattcacaaactgaaggtagctttttattactccgtggggagcatgtacagagctctgtgtatacacagcttcacacccaccagattgttactacagtgggttgggttttcatacagacgtaaattttgagagaaaagtcaaaggtgcttcagccttgtactgtgtatatatattaaaaaaaaaacaaagttt

SEQ ID NO: 49534 - DNA, 240 bp, Artificial Sequence
  derived and/or modified sequence
atgcaccacgtgcggcagctgatgatgcccatctgccccatggccctgaacagtaccacctcatcaagtacaacttttggagcctttagaataatgaccctgaacgtcgaagaatgggcaacagcctggaaggtacttatcctgcttgaagctgcggtggaggaggagaaaagaagtgaggaaaaaaggattctcgtatgtggcacgtgcggcacccggagttctcaaaagaatctctag

SEQ ID NO: 49535 - DNA, 3654 bp, Artificial Sequence
  derived and/or modified sequence
atgaagggcatgagccacgagcccaagagccccagcctgggcatgttatccaccgctacacgaaccaccgctactgtgaatcccctgacacccagcccactgaacggtgccctggtgccttcagggagtcccgcgactagcagcgctctttcagcccaggccgcccctagctcaagctttgcagccgctctgcggaaactagctaagcaagcagaagagcctcggggttctagcttgtccagtgagtccagccccgtgagctctcctgcaacaaatcactcctcacctgcgtcgacaccaaaaagagtacctatggggccgatcatcgtgccaccagggggccactcagtgccaagtacgccgcccgtggtcactatcgcacccaccaagactgtcaacggcgtctggaggtccgaaagtcgacaggacgccggaagtaggtctagttctggcggcagagaacgcttaatcgtcgagcctcccctcccccaagagaaggcagggggccccgcaatcccaagtcacctgctcagcacaccctacccttttggcctctctcccagctccgtggtgcaggattctagatttccacccctgaacctacaaagacctgtgcaccacgtcgtccccccgagtaccgtgactgaggattacctgcgtagcttccgtccttaccacaccaccgacgaccttcggatgtcaagcctcccgcctctcggactggaccctgctacggccgctgcatactaccacccctcgtacctcgcaccacacccctttcctcatcctgcttttaggatggacgattcatactgcctctctgctctgcggtccccattctaccccatcccaacccctggttctctgcccccgctgcatccttcagccatgcaccttcatctgtccggggtgcgataccccccagaactctcccactcatcgctcgccgccctgcactctgagagaatgagcggactgagcgccgagcgtctgcaaatggacgaagagctcagacgggagcgggagagggagagggaaagagagagggaaagagaggccgaccgggaaagggaaaaagagagagaacgggagagagagaaggagagggagcaagagaaagagcgcgagcgggagaaagaacgagagagggagctggagcgccagagggagcagcgtgctcgagagaaggagttgttggccgcaaaggcccttgagcccagttttctgcctgttgcagaactgcacgggctgcgaggccacgctactgaggagcgcggaaagccaagtgagcaactgacccccacccgcgctgaaaaactgaaagacgcaggcctccaggccccaaaacccgtgcagcatccacttcatcccgttccaacccctcatcatacagtgccctccttgatcagtaatcacggcatcttctccctgccgtcttcgtcagccgctaccgctctgctcattcagaggacaaatgaagaagagaaatggctggcgagacagagacgcctgcggcaagagaaggaggacaggcagtcccaagtgtctgagtttcggcaacaggtgctcgaacagcatctcgacatgggtcggcctcctgtgccagcagaggccgagcacaggccagaatctactacccgccccgggccaaaccgtcatgagccaggagggcgcgatcctcctcagcactttggaggacctccaccactcatcagtcccaaaccccagttacacgcagctcctaccgccctgtggaacccggtttcattaatggataacactctggagacacggagagcggagtcacatagtctacactctcatcctgcggcgtttgaaccctcccgccaggccgctgttcctctggttaaggtcgaacgcgtgttttgtcctgagaaggcagaggaggggccccgtaagcgagagcctgccccgctggataaataccagccccccccacccccgcctcgcgagggtggatcactggagcatcagcccttcctgcccggacctgggcctttcctcgcggagctggaaaaatcaactcaaacaatcctcgggcaacagagagcatccctgccacaggccgcgaccttcggtgagctgtccggaccactcaaaccaggctctccttacagacctcctgtgcccagggcccctgacccagcctacatatatgacgaatttctgcagcagcggagaagactcgtctctaagttggatcttgaggagcgtaggcgccgcgaagcccaggagaagggatattactacgatttagacgattcctatgatgagagcgatgaagaggaggtaagggcccatctgcggtgtgtcgctgagcagcctcccctgaaattggacacctcctccgagaaactggaatttcttcaactgttcggcctcaccacccaacaacagaaagaagagttggttgctcagaagagaagaaaaaggcggaggatgttgcgagaaaggtcacctagtcctccaacaatacaatctaaacgtcagacaccaagtccgaggttagccctttccacaaggtacagccctgacgagatgaacaactcccccaattttgaagagaagaaaaaattcctgactattttcaatcttacccatattagcgccgaaaaacgaaaggataaagagaggctggtggagatgttacgagccatgaagcagaaagctctctccgccgcagtcgcagactctctgaccaatagtccccgggactccccagccgtgtcactgagtgaacctgcaacccaacaggcttcactggacgttgagaagccagtcggagtggctgcgtctctgtcagacattccaaaggccgccgagcccggcaaactggaacaggtgcggccccaggagctgtcaagggtgcaggagttggctcccgcctctggcgaaaaagcacggctgtctgaggcacccgggggcaagaagtctctctctatgcttcattatataagaggagcagcacccaaagacatacccgttcctctgagtcactccactaatggtaagagcaagccctgggagccttttgttgctgaagagttcgcccaccaatttcacgagagcgttctccagagcacccagaaggccctccaaaaacataaaggcagcgtggcggtgttgtccgccgagcagaatcacaaagtggacacctctgtccattacaacattccggaacttcaaagctcgagtcgcgcaccccccccccagcacaacggccagcaagaacctcctacggcacggaaggggccacctacacaagagttagacagagacagcgaggaggaggaggaggaagatgatgaggacggtgaggacgaggaagaggttccaaaacgtaagtggcagggaatagaagccgtgttcgaagcctatcaagagcatatagaggagcagaacctggagcggcaggtgctgcagacacaatgccgcagactagaggcaagacattacagtttgagtcttaccgccgagcaactgagccacagcgttgctgaactgaggtcacagaaacagaagatggtgtcagagcgggaaagactgcaggccgagctggatcatctgcgcaagtgtctggcccttcccgccatgcactggcctagaggctatcttaaggggtaccctcggtag

SEQ ID NO: 49536 - DNA, 3342 bp, Artificial Sequence
  derived and/or modified sequence
atgggccccatcatcgtgccccccggcggccacagcgtgcccagcaccccacccgtggtgaccattgccccaacgaaaacggtgaacggcgtgtggcggtctgaatcgcggcaggacgccggctcccggtcctcatccgggggacgcgagcgactcattgtcgagccaccattacctcaggagaaggccggggggcccgccatcccctcacatttactgtctactccctaccccttcggactgtcaccttcatctgtggtgcaggactcgcgctttccccccctgaatctacagaggccagtgcaccatgtagttcctccaagcacggtgacggaggactacctgagaagttttagaccataccacactaccgatgatctaagaatgtccagcctcccacctctcggcctggatcctgctactgccgccgcgtactatcacccgtcctatctagcccctcaccccttcccccatcctgccttccgtatggacgattcatactgcctatcggccctgagaagccccttttatcccatccctactcctgggtcactgccaccacttcatccttctgcaatgcacctgcacctctccggagtgcgatatccgcctgaactgagccactctagccttgcagccctgcactccgagagaatgtcaggcctgtccgcagaaaggttacagatggatgaagaattgcgacgcgagcgcgaacgggagcgcgagagggaaagggagcgggaggctgaccgagagcgcgagaaagagagagagcgagagagggagaaagaacgcgagcaggagaaggaaagagaaagggagaaggagcgcgagcgggaactggagcgtcaaagggagcagcgcgcgcgagaaaaggaactacttgctgcaaaggcactggagccttccttcctcccggtggccgaactccacggcctcagagggcacgccacagaggagcgggggaagccatcagagcagttgacccctacgagagcagagaaactgaaagacgcagggctgcaagcgcctaagcccgtgcagcatcctctgcatcctgttcccacccctcaccacaccgtccccagcttaatctctaaccacgggattttctctctgccgtcatcttcagccgcaactgctttgctgatccagaggactaacgaagaggaaaaatggcttgcccgccaacgccggctgcggcaagaaaaggaggataggcagagccaagtcagtgaattccggcagcaggtgctggagcagcacctggacatgggcagacccccagtacctgccgaggccgagcatcggcccgagtccacaacaagacctggacccaacagacacgaacctggcggaagagatccgcctcagcacttcggcggtcccccaccattgatctccccaaagccccaattacacgctgcacccaccgcactttggaacccagtcagtctgatggacaacacgctcgaaaccagacgcgccgagtcccattcgctccattctcatcccgccgcctttgagccctctcggcaggccgcagtgcccttagtgaaagtagagagggtgttctgtcccgaaaaggcggaggaaggccctaggaagcgcgagcccgcacctctggacaagtaccagccaccacctccccctccccgcgaaggcggctccttggaacatcagcctttcctccctggccccggccccttcctggcagaacttgaaaaaagcacacagacaatcctaggtcagcagagagcctcgctgcctcaagcagccactttcggcgaactgagcggaccgcttaaacccggctccccgtaccgcccgccagtgccccgcgcgcctgatcctgcttacatctacgatgagtttctccagcagaggagaaggcttgtaagtaagctggacctggaggagcgaagacgtagggaggcccaagagaaagggtattactacgatctcgacgactcctacgacgagagcgatgaagaagaggtgcgtgcacatttacggtgtgtggctgaacagcctccgctcaagcttgatactagttctgagaagctagagttcctacagttgtttggtctgacaacacagcagcaaaaagaggagttagtagcccagaagagacggaagagacgccgaatgctgagagagagatcgccgagtccacctaccatccagtctaagagacagaccccttcaccaagattggcattgagcaccaggtactcccctgacgaaatgaataatagccccaactttgaggaaaaaaagaaattcctgaccatctttaatctgacccatatctctgccgagaagcgaaaagacaaggagagacttgtggaaatgcttcgggcgatgaagcagaaagccctgagcgccgccgttgcggatagcctgacaaattctccgagggattcccctgccgtttcgctgagcgaacccgctactcagcaggcttcgctggacgttgagaagcccgtgggcgttgccgcctcgctatctgacattcctaaggcagccgaacctgggaagctggaacaagtccgccctcaggagttgagcagagtccaggaactagcaccggctagtggagagaaagcccggttatctgaggcccctggcggaaaaaagtctcttagcatgctgcactacatccgcggcgcagctccgaaggacataccagtgcctctaagtcattcaacgaatggaaagtcaaagccttgggagccgtttgtcgccgaagagttcgcacaccagtttcacgagagtgtgttacaaagcacacagaaagctcttcaaaaacataaaggctctgttgcggtgttaagcgctgaacaaaatcacaaggttgatacaagtgttcactacaacattcctgagctgcagtcgagctccagagcgcctcccccacagcacaatggccaacaggaaccccctaccgccaggaaaggtccaccaactcaggaattggaccgtgacagtgaggaagaggaggaagaggacgacgaagacggggaggacgaggaggaagtacctaaaaggaaatggcagggaattgaggctgtattcgaagcgtaccaagagcacattgaagaacagaacctcgagcggcaggttttacagacccagtgcaggcgactggaggctcgtcattattctctctcgttaactgctgaacagctcagccactcagtggccgagctgcggtcccagaaacagaagatggtgtccgagagagaaagactccaggcagaactcgatcacctcagaaagtgcctcgcgcttcccgccatgcattggccaagggggtacctgaaaggctaccctcgctag

SEQ ID NO: 49537 - DNA, 3654 bp, Artificial Sequence
  derived and/or modified sequence
atgaagggaatgtcacatgaacctaaaagcccttcattagggatgctctccactgctaccaggacaaccgccaccgtgaaccccttaactcctagcccgctgaatggggcacttgtgccatccggctctcccgcaaccagctccgccttaagtgcacaagccgcaccatccagttcattcgctgcagcacttcgcaaactggccaagcaagctgaggagccaaggggttccagtctgtcctctgagagcagccccgtttctagtccagccaccaaccattcgtccccggctagcactccaaaaagggttccaatgggcccaatcatcgtgcccccaggcggacacagcgtaccatctacccctccggttgtgacaattgcaccgacaaagaccgtgaatggagtctggcggagcgagtccagacaggatgccggaagccgctcaagcagtggaggacgggagcgcctgatcgtagaacccccactgccgcaagaaaaggctggtggcccagccatcccaagccaccttctcagcacaccctatccatttggcttgagcccttccagtgtcgttcaggattctcgttttccacccttgaatttgcagcgcccagtgcatcatgtggtgccaccatccactgtcacagaggactatctccgcagcttccgaccctatcacacgaccgatgacctgcgaatgtcctctctcccccctctgggtttagatccagccacagctgcagcctactaccacccctcttacctggccccacacccttttccccacccggctttcagaatggatgacagctactgtttgagcgctctgaggtcccccttttaccctatccccacacctgggagccttcctcccttacatccttccgcaatgcacctacatctctccggcgtaagatatcctcccgaactaagtcactcctctctcgcagctctgcactccgaaagaatgtctggactgagcgccgagaggttacaaatggacgaagagctgcggcgtgaaagggaacgcgaaagagagagggagcgcgaacgagaggcagaccgtgagagggaaaaagaaagggagcgtgagagagagaaggaacgcgagcaggaaaaggaaagagaacgggaaaaagaacgtgaaagggaactggagagacagagggagcagcgggcaagggagaaggaactgctagctgcaaaagctctcgaaccgagcttcctccctgtagcagaactgcacggtctccggggtcatgcaacagaggagcgcggtaagcccagcgagcaactcacccctacgcgggcagagaagcttaaggatgccggattgcaggctcccaagcccgtacaacatccacttcatcctgtcccaacgcctcaccatacagtgcccagcctcatctctaaccacgggatattttccctgccatcaagctctgcggctactgccttgctgattcagcggaccaatgaggaagagaaatggctcgccaggcagagaaggttaaggcaggagaaagaggaccgccagtcccaggttagcgagttcagacagcaggtcctcgaacagcacctcgacatgggacgtccgccagtgccagctgaagcagagcaccgccctgagagtaccacacgaccagggcctaataggcacgagccagggggaagggatccaccgcagcattttggcggacccccaccgttaatctccccaaagccccagctgcatgccgcaccgaccgccctctggaatccggtgagcctgatggataataccctggagacacggcgagctgaaagccactccttgcattctcaccctgccgcattcgagccatcccgccaggctgccgtgcctctggtaaaggtggagcgggtgttttgccctgagaaagccgaggaggggcctcgaaaaagagagccagcccctctcgataaatatcaaccaccaccccctccgcctcgagagggagggagtctcgagcaccagccctttctccccggtccaggcccttttctagccgagctagaaaagagtacccagaccatactcgggcagcagcgtgcatctcttccccaggcagccacttttggagaattgtctggacccctcaaacccggatcaccttatcgacctcccgttccacgcgctccggacccagcttatatctatgatgagtttctgcagcagagaaggcggctggtatctaagttagacctggaggagcgtcggcgacgcgaggcccaggagaaaggctattactacgacttggacgactcctatgacgagtctgatgaagaggaagttagagcacacctgagatgtgtggccgaacagcctccacttaagctggatacttccagcgagaaattagaatttctccaactttttggcttgaccacgcagcagcaaaaagaggagctggtggcccaaaaacgccgaaaacgcaggcggatgctgcgcgaacgttccccctcccctcccaccatccagagcaagcggcaaacaccctctccacgacttgccttgtcaaccagatactcaccagatgagatgaataactccccaaattttgaagaaaagaaaaaatttctgacaatttttaatcttacacatatatccgctgaaaagcgcaaagataaagagcgactcgtggaaatgctgagggcaatgaagcagaaggcattgtccgccgctgttgccgactcactaacaaacagccccagagactcccctgccgtgagtctttctgaaccagccactcagcaggccagtctcgacgtggagaagccagtcggcgtggcagcctccctcagcgacataccaaaggccgctgagcccggaaagctagaacaggtccgccctcaagagctttcaagagtgcaggagctggccccagcatccggagaaaaggcccgattatcagaagccccaggcggtaaaaagtccctgtcaatgctccactacattcggggagcagccccaaaagatattcccgtgcctcttagccacagtactaatggcaaatccaaaccttgggagcctttcgttgccgaggaattcgctcaccagttccacgaaagcgtcttgcaatctacacagaaagccctacagaagcataagggctccgtggcggtcctatcggctgagcagaaccataaggtggacacctcagtacactataatatccctgagttgcagtcctccagccgagcccctccacctcaacacaacggacagcaggagccgccaaccgcccgaaagggtcccccaacacaggaactggaccgggattctgaagaggaggaagaggaggacgatgaggatggtgaggacgaggaggaagtgccaaaacggaagtggcagggtattgaggcggtttttgaagcctaccaggagcatattgaggagcagaatctggaacggcaggtgttacagacgcagtgtcggaggctggaagctcgccactattcactgtccctgactgctgagcagctttcacactccgtggcagagcttagatctcagaaacagaagatggtttccgaacgcgagcgcctacaagctgagctggatcatctccgcaaatgcctagcgctgcccgcaatgcattggcctagggggtatctgaaaggttatccccgatag

SEQ ID NO: 49538 - DNA, 3342 bp, Artificial Sequence
  derived and/or modified sequence
atgggcccaatcattgtgcctcctgggggacactccgtcccatcaactcctcctgtcgtcactatagctccaactaagacagtaaatggcgtctggagaagcgaatcgcgacaggatgcaggatcccgcagcagctcaggcggaagggaaagactcatcgtggagccccctctgccccaggagaaggctggtggtcctgctattccctcccaccttctgagcacaccgtatccctttggactatccccatcttcggttgtgcaggactccagatttcctcccctcaatcttcaacgaccggtgcatcacgtggtgcctccctctacggtcacggaggactatctgcgcagctttcgcccttaccacaccaccgatgatctacggatgtcaagcctccctcctttggggctcgacccggctactgcagcagcctactaccatcccagctatctggctccacacccgtttccccaccccgcattccgaatggacgacagttactgcctttcggccttgcggtcgccgttctatcctataccgacaccagggtcccttccaccgctgcacccatcggccatgcacctgcacctgagcggggtgcgctatccccctgaactctcgcactcttctcttgcagccctccattctgaaaggatgtccggattatccgccgagcggctacagatggacgaggagctgaggcgtgagagggaaagagagagagaaagggaaagagagcgagaagccgatagagaacgcgaaaaggagagagagagggaacgtgaaaaggagcgcgagcaagaaaaggagcgtgagcgcgagaaagaacgggagagagaattggagcggcagcgcgagcaacgcgctcgcgagaaagaacttctggccgcaaaggcactggagccctctttccttccagtggccgagctccatggcttgcgtggacatgccacagaggaacgtggaaagccaagcgagcagctcacaccaacaagagcagaaaagctgaaggacgctggcttgcaagctcctaagccagttcagcatcctctgcatccggtgccaacgccccaccacaccgtacctagtctcatctcaaaccacggcatctttagcctgcccagtagctcagccgctaccgctctccttattcagcgtaccaacgaggaagagaaatggcttgcccgtcaacggagacttagacaggagaaagaggacagacagtcacaggtgtctgaattcaggcaacaagtgctggagcagcatctcgatatgggcaggcctcctgtgcctgctgaggcggagcatcgccctgagtcgacaactaggcctgggccaaaccgccacgaaccgggaggccgagaccccccacaacactttggaggccctccacccctcatctccccaaaacctcaattacacgccgcacctactgctttatggaacccagtctccttgatggacaataccctagagaccaggcgagctgaatctcacagcttgcatagtcaccctgcagccttcgaaccaagtcgccaagccgctgttccccttgtcaaggtggaaagggtgttttgccccgagaaggctgaagagggaccgcgaaagcgcgagccggcacccttggacaaataccagcccccacctccaccccctcgtgagggcggtagcctggaacaccagccatttctgcctggtccagggccttttctagcagaactcgagaagtcaacgcaaacaattttaggacagcaacgggcttccctaccgcaggcagctacgttcggcgaattgtcaggccctctgaagccaggaagcccctaccggccacccgtgccgagagcccctgatcccgcatatatttacgatgaattccttcagcagcggagacgcctcgtatcgaagttagatttggaggagcgtcggaggcgagaagctcaggaaaaaggatactattatgatctagacgactcttacgacgaatcagacgaagaggaagtacgggctcatctgcgatgcgtagccgagcagccgcctctcaagcttgacacatcaagtgaaaaactagagttccttcagttgtttgggctgacgactcagcagcaaaaggaagaattggtggcccagaaaagaaggaagaggcggaggatgctacgggaacgctctccctctcctccaacaatccaaagcaagcggcagactcccagccccagactcgcccttagcactcgctacagccccgatgagatgaacaactcacccaactttgaggagaaaaaaaaatttctgactattttcaatctcactcatattagcgcagaaaaaaggaaggacaaggagagattggtcgagatgcttcgggctatgaagcagaaggcactgagcgctgccgtggctgacagcctgacaaattcgcccagagacagcccagccgtctccctcagtgaaccagcaactcagcaggcctccctcgatgtagagaaacccgtcggggttgccgctagcctgtcggatattccaaaagcggctgagcccggtaaactggagcaagtgcgaccacaagaactcagccgggtgcaagagctggctcctgcatccggagagaaggccagactgagcgaagctccaggcggaaagaagtccctcagcatgctgcactatatcagaggtgctgcaccgaaagatatccccgtgccccttagtcacagtacaaacggtaaatccaaaccctgggagcctttcgtcgccgaggagtttgctcaccagttccatgaaagcgtgcttcagagcacacagaaagctctgcagaagcacaaaggttcggttgcggtgttgtccgctgagcagaaccataaggtggatacaagcgtccattataacattccggagctacagtcaagttccagagccccaccgccacagcacaacggacaacaagagccgcctaccgctaggaagggtcccccaactcaggaacttgatcgagatagtgaggaggaagaggaagaggacgatgaagacggggaggacgaagaggaggttcccaaaagaaaatggcagggaattgaggctgtgttcgaagcctaccaagagcatattgaagagcagaacctcgaacggcaggtgctgcaaacccagtgccggagattagaggcccgacattattctttgagtttaacagctgaacagcttagtcacagcgtggccgaattgagaagccaaaaacagaagatggtgtcagagcgcgagcgactccaggcagagctggatcatctgcgtaagtgtctggccctcccagccatgcattggccaaggggctaccttaaaggctacccccgatag

SEQ ID NO: 49539 - protein, 464 aa, Artificial Sequence
  derived and/or modified sequence
MEIIRSNFKSNLHKVYQAIEEADFFAIDGEFSGISDGPSVSALTNGFDTPEERYQKLKKKERYIVISKVDEEERKRREQQKHAKEQEELNDAVGFSRVIHAIANSGKLVIGHNMLLDVMHTVHQFYCPLPADLSEFKEMTTCVFPRLLDTKLMASTQPFKDIINNTSLAELEKRLKETPFNPPKVESAEGFPSYDTASEQLHEAGYDAYITGLCFISMANYLGSFLSPPKIHVSARSKLIEPFFNKLFLMRVMDIPYLNLEGPDLQPKRDHVLHVTFPKEWKTSDLYQLFSAFGNIQISWIDDTSAFVSLSQPEQVKIAVNTSKYAESYRIQTYAEYMGRKQEEKQIKRKWTEDSWKEADSKRLNPQCIPYTLQNHYYRNNSFTAPSTVGKRNLSPSQEEAGLEDGVSGEISDTELEQTDSCAEPLSEGRKKAKKLKRMKKELSPAGSISKNSPATLFEVPDTW

SEQ ID NO: 49540 - DNA, 1737 bp, Artificial Sequence
  derived and/or modified sequence
atggacttcctgctgttccaatttggcctgtgcacgtttaagtacgactacacagatagcaagtatatcactaaaagctttaatttttatgtgtttccgaaaccatttaatcggtcaagccctgacgtgaagttcgtgtgtcaatctagtagcattgatttcctagcctcccaggggttcgatttcaataaagttttcaggaacgggataccctatctgaaccaggaggaggagagacagctccgggaacagtatgacgagaagagaagccaggcaaatggagctggagctctttcctacgtgagtcccaatactagcaaatgccctgtgactatcccagaagaccagaagaagttcattgatcaggtggttgagaagatcgaggatttgctgcagtcagaagaaaataagaacttggacttagaaccatgcacgggcttccagaggaaactcatatatcagactttgtcctggaagtaccccaaggggattcatgtggagaccctcgagaccgagaagaaggagcgatacatagtcatcagtaaagttgacgaagaagaaagaaagcggagggagcagcagaaacatgcaaaagagcaagaggaactgaacgatgccgtagggttcagtcgcgtcatacacgccattgccaattcaggcaaactggtgataggccacaacatgctgttagacgtcatgcacactgttcatcagttttattgccccctgcctgcggatctttcagagttcaaggaaatgaccacttgtgtcttcccaagactcttagacactaagctgatggccagtacccagccattcaaggatatcataaacaatacttcgctggcagaactcgagaagcggttaaaggaaacacccttcaatcccccaaaagtcgaatcggccgaagggttccccagctacgacacagcctctgagcaactgcacgaagccggctacgacgcctacataactggtctgtgcttcatttctatggctaactacctcggcagtttcctgagcccccctaagatccatgtgtccgcgagatccaaacttattgaacctttttttaacaaactattcctgatgagagtgatggatattccttacctgaacctcgagggacccgacctgcaaccaaagagggatcatgttctgcacgttaccttccccaaagaatggaagactagcgacctctaccagctgttctccgcctttggcaatatccagatcagctggatcgatgacacttcagccttcgtgtctctttcccagcctgagcaggtgaaaatcgccgtgaacactagtaaatatgcagagtcttacagaattcagacctacgccgaatacatgggtcgaaaacaagaagagaaacagattaaacgcaaatggaccgaggatagctggaaggaagcagacagtaaacggctgaatccccagtgtataccctacactctccaaaaccactattacagaaacaattcgttcactgcacctagcacagtgggaaagcgaaacttatcaccttctcaggaagaagcaggcctggaagacggcgtttccggggaaatatccgatacggagttagaacaaacagactcttgcgcggagccgttgtccgagggacggaaaaaggctaagaaactcaagcgcatgaaaaaggaactgtcccctgccgggtcaatcagcaagaattcaccagctacactttttgaagtgccagatacttggtag

SEQ ID NO: 49541 - DNA, 1395 bp, Artificial Sequence
  derived and/or modified sequence
atggaaattatccgatctaatttcaagagtaatctgcataaggtgtatcaggccatagaagaggcggatttttttgccatcgacggggagttctctggaatctccgatggcccttctgtgtccgcactgacaaatggatttgacacacctgaagaacgttaccaaaaattgaagaaaaaagaacggtacatcgtaatcagcaaggtcgacgaggaggagaggaagcggagagagcagcaaaagcacgccaaagaacaggaggaactcaatgacgctgttggcttcagccgggtgattcatgcgatagccaactcaggcaagttggttatcgggcataacatgcttttggacgtgatgcacacagtgcatcagttttattgcccgctgcctgctgacctgagcgaatttaaagaaatgacaacatgcgtgtttcctagactgttggacaccaagctgatggccagtacacagccctttaaggatatcattaataatacctctctggccgaacttgagaaacgtctgaaggaaaccccctttaatcccccaaaggtcgagagtgcagagggctttccaagctacgacactgctagcgaacagctccacgaagcaggatacgacgcttatataactggcctgtgttttatttctatggccaactacttagggtcattcctgtcaccacccaagatccacgtgtccgccagatctaagctgatcgaacccttctttaacaagctcttcctgatgcgggtaatggacattccttatctcaacctcgagggccctgacctgcagcccaagcgggaccacgtgctccatgtgacatttccaaaggagtggaagacctccgatctgtaccagctctttagtgcttttgggaatatccaaattagttggatcgatgatacaagtgcttttgtgtccctgtctcagccagaacaggtgaaaatagccgtgaacacgagtaaatacgcggaatcttacagaattcagacgtacgcggagtacatgggccgcaagcaggaggagaagcagatcaaaaggaaatggaccgaagatagctggaaggaagctgattctaaacgtcttaacccccagtgcattccttacacattacaaaatcactattacagaaataattcttttacggccccatcaactgttgggaaacgaaatttgagccccagccaggaggaggccgggctggaggatggggtttctggggagataagcgacacagaactagaacagacagactcatgcgctgagcctctgagcgagggaagaaaaaaggctaagaaacttaagcgaatgaagaaggaactaagtcctgccggtagtatctccaaaaactccccagcaactttgtttgaagtgcctgatacatggtag

SEQ ID NO: 49542 - DNA, 1737 bp, Artificial Sequence
  derived and/or modified sequence
atggacttcctgctcttccagtttggcctgtgcaccttcaagtatgactacacagacagcaagtacatcaccaagagcttcaacttctacgtgttccccaagcccttcaacagaagcagcccagatgtgaagtttgtgtgccagagcagcagcattgacttcctggccagccagggctttgacttcaacaaggtgttcagaaatggcatcccctacctgaaccaggaggaggagcggcagctgcgggagcagtatgatgagaagaggagccaggccaatggagctggggccctgtcctatgtgagccccaacaccagcaaatgtcctgtgaccatccctgaggaccagaagaagttcatcgaccaggtggtggagaagattgaggacctgctgcagagcgaggagaacaagaacctggacctggagccctgcaccggcttccagaggaagctgatctaccagaccctgtcctggaagtaccccaagggcatccacgtggagaccctggagacagagaagaaggagcgctacatcgtcatcagcaaggtggatgaggaggagaggaagaggcgggagcagcagaagcacgccaaggagcaggaggagctgaatgatgctgtgggcttcagcagggtcatccacgccatcgccaacagcggcaagctggtgattggccacaacatgctgctggatgtgatgcacacagtgcaccagttctactgccccctgcctgctgacctgtctgagttcaaggagatgaccacctgtgtgttcccccggctgctggacaccaagctgatggccagcacccagcccttcaaggacatcatcaacaacaccagcctggccgagctggagaagaggctgaaggagacccccttcaacccccccaaggtggagagcgctgagggcttccccagctatgacacagccagcgagcagctgcacgaggccggctatgatgcctacatcaccggcctgtgcttcatctccatggccaactacctgggcagcttcctgagcccccccaagatccacgtgtctgcccggagcaagctgattgagcccttcttcaacaagctgttcctgatgagggtgatggacatcccctacctgaacctggagggccctgacctgcagcccaagagggaccacgtgctgcacgtgaccttccccaaggagtggaagaccagtgacctgtaccagctgttcagcgcctttggaaacatccagatctcctggattgatgacaccagcgcctttgtgtccctgagccagcctgagcaggtgaagattgctgtgaacaccagcaaatatgcagagagctaccgcatccagacctatgcagagtacatgggcaggaagcaggaggagaagcagatcaagaggaagtggacagaagattcctggaaggaggccgacagcaagaggctgaacccccagtgcatcccctacaccctgcagaaccactactacagaaacaacagcttcaccgcccccagcacagtgggcaagaggaacctgagccccagccaggaggaggccggcctggaggatggagtgtctggagagatcagtgacacagagctggagcagacagacagctgtgccgagcccctgtctgagggcaggaagaaggccaagaagctgaagaggatgaagaaggagctgagccctgctggcagcatcagcaagaacagccctgccaccctgtttgaggtgcctgacacctggtag

SEQ ID NO: 49543 - DNA, 1395 bp, Artificial Sequence
  derived and/or modified sequence
atggagatcatccgcagcaacttcaagagcaacctgcacaaggtgtaccaggccatcgaggaggccgacttctttgccattgatggagagttcagcggcatcagtgatggccccagcgtgtctgccctgaccaatggatttgacaccccagaggagcgctaccagaagctgaagaagaaggagcgctacatcgtcatcagcaaggtggatgaggaggagaggaagaggcgggagcagcagaagcacgccaaggagcaggaggagctgaatgatgctgtgggcttcagcagggtcatccacgccatcgccaacagcggcaagctggtgattggccacaacatgctgctggatgtgatgcacacagtgcaccagttctactgccccctgcctgctgacctgtctgagttcaaggagatgaccacctgtgtgttcccccggctgctggacaccaagctgatggccagcacccagcccttcaaggacatcatcaacaacaccagcctggccgagctggagaagaggctgaaggagacccccttcaacccccccaaggtggagagcgctgagggcttccccagctatgacacagccagcgagcagctgcacgaggccggctatgatgcctacatcaccggcctgtgcttcatctccatggccaactacctgggcagcttcctgagcccccccaagatccacgtgtctgcccggagcaagctgattgagcccttcttcaacaagctgttcctgatgagggtgatggacatcccctacctgaacctggagggccctgacctgcagcccaagagggaccacgtgctgcacgtgaccttccccaaggagtggaagaccagtgacctgtaccagctgttcagcgcctttggaaacatccagatctcctggattgatgacaccagcgcctttgtgtccctgagccagcctgagcaggtgaagattgctgtgaacaccagcaaatatgcagagagctaccgcatccagacctatgcagagtacatgggcaggaagcaggaggagaagcagatcaagaggaagtggacagaagattcctggaaggaggccgacagcaagaggctgaacccccagtgcatcccctacaccctgcagaaccactactacagaaacaacagcttcaccgcccccagcacagtgggcaagaggaacctgagccccagccaggaggaggccggcctggaggatggagtgtctggagagatcagtgacacagagctggagcagacagacagctgtgccgagcccctgtctgagggcaggaagaaggccaagaagctgaagaggatgaagaaggagctgagccctgctggcagcatcagcaagaacagccctgccaccctgtttgaggtgcctgacacctggtag

SEQ ID NO: 49544 - DNA, 1737 bp, Artificial Sequence
  derived and/or modified sequence
atggacttcctgctgttccagttcggcctgtgcaccttcaagtacgattacacggatagtaagtacatcactaagagcttcaatttttatgtgtttcctaagcctttcaatcgctcgtccccagacgtgaaatttgtgtgtcagagtagctctattgacttcctggcctcacagggttttgacttcaacaaggtgtttcgtaacggtatcccctacctgaatcaggaggaagagagacaactccgggaacagtacgacgaaaaacgcagccaggccaacggagccggcgctctgagttatgtttcacctaatacaagtaagtgccccgtgacaatccctgaagaccagaaaaagttcattgatcaagttgtcgagaaaattgaagacttactgcaaagcgaagaaaacaaaaatctggatctggagccttgtacaggattccaaaggaagttaatttatcagactctgagctggaaataccccaagggaatccatgtcgaaacactggaaactgagaaaaaggaaagatacattgtcataagcaaagtggatgaagaagagcgtaagaggcgagagcagcaaaaacacgcaaaggagcaggaagagctcaacgacgccgtaggctttagtcgcgtgatacacgcaatcgctaactccggtaaacttgtgataggacataacatgttactggatgttatgcacacggtccaccagttctactgcccactgcccgcagacctgtcagaattcaaggaaatgactacgtgcgtcttccctaggctgctggacaccaaactaatggcttctacccaaccattcaaggacattatcaataatacaagcttggctgaactggaaaagaggctcaaggagacccctttcaatccacccaaggtcgagagcgcggagggatttccttcttatgatacagccagcgagcagctgcatgaggctggctatgatgcatacattaccggactgtgcttcatttcaatggctaactacttgggatctttcctctcaccaccgaaaatccacgtgtccgcgcgaagcaagctgattgaacctttcttcaacaaacttttcctgatgcgggtcatggatattccttacctgaacctggagggtccagatttacaaccaaaacgggaccacgtccttcatgtgactttccctaaagagtggaaaacctctgacctctaccagctgtttagcgcgtttggcaatatacagatatcgtggatcgacgacacctccgcattcgtatccctctctcagccagagcaggttaagatagctgtcaacacatccaagtatgctgagagttaccgcatccagacatatgccgaatacatgggacgcaagcaggaggagaagcagatcaaacggaagtggaccgaggactcatggaaggaggccgacagcaagaggctgaacccccagtgtatcccatatacgttgcagaaccactattatcggaacaattcatttacagcaccatcaaccgttgggaagcgcaacctgagtccaagtcaggaagaagcagggctggaggacggcgtgtctggcgagatcagcgacacggagctggagcagaccgattcctgtgctgaacctctgtctgaaggccgaaagaaagctaagaagctgaagcgcatgaagaaggagttatctcctgcaggcagcatctcaaaaaatagtccagccactctatttgaggtacctgatacttggtag

SEQ ID NO: 49545 - DNA, 1395 bp, Artificial Sequence
  derived and/or modified sequence
atggagatcatccggagcaacttcaagagcaacctgcacaaggtgtaccaggccattgaggaggcagactttttcgccatcgacggggaattctctggaatcagcgacgggccatcagttagtgctctaacaaacgggtttgacacgcccgaggagcggtatcaaaaactgaagaagaaggagcgatacatcgtcatcagcaaagtggacgaagaggaacgaaagaggcgtgaacagcaaaaacacgctaaggaacaagaggaattgaacgacgccgtcgggttctcccgggtcatccacgcaattgctaacagcggtaagttggttattggacataacatgctgctagacgttatgcatactgtgcaccagttctattgtccattgcctgcagatctgtcagaattcaaggagatgactacatgtgtgttcccacggttgctcgacaccaagttgatggcaagcacacagcctttcaaagacatcatcaacaacacatccttggctgaactggagaagcgactgaaagagacacccttcaaccctcctaaggtggagtccgccgaaggcttcccatcttacgacacagcctctgagcagctccacgaggccggatacgatgcttacattaccggtctctgttttatatccatggccaactacctggggagcttcctgtcaccgcctaaaatacacgtgagtgcaagatccaagttgatagagcctttcttcaataagctgtttctgatgcgtgtcatggatataccttatctcaatcttgagggcccagatctgcagcctaaacgggatcatgttctgcacgttacattcccaaaggagtggaagacctctgatctgtaccagctcttctcagcctttggcaacatccaaatcagttggatcgatgacaccagcgcttttgtgtctctgagccagccggagcaggtcaaaattgctgtcaataccagcaaatatgctgaaagttaccgcatccaaacctatgccgagtacatggggcggaaacaggaggagaagcaaataaaaagaaagtggaccgaagactcctggaaagaagccgactctaagcgcctgaacccccagtgcatcccttacacactgcagaaccactattatagaaacaatagttttactgctccaagtacagtaggcaaaagaaatctatccccaagccaggaagaggccggcctagaggatggggtctccggcgaaatttctgacaccgaactggaacagacggattcctgtgccgagcccttatccgaaggacgcaagaaagctaagaaattaaagcggatgaaaaaagagctatctccagctggtagcatctccaagaatagtcccgcaactctgtttgaggtgcccgacacctggtag

SEQ ID NO: 49546 - DNA, 1557 bp, Artificial Sequence
  derived and/or modified sequence
gtcaccgctgcggctgcctcagctactgccgcagtcgccgcggaattcggcgagtagaaccgctgaggcgggcgcgggcccgggtggggccaaggttccggccactctgcagaatggagataatcaggagcaattttaagagtaatcttcacaaagtgtaccaggccatagaggaggccgacttcttcgccatcgatggggagttttcaggaatcagtgatggaccttcagtctctgcattaacaaatggttttgacactccagaagagaggtatcagaagcttaaaaagaaggagcgatatatagttatcagcaaagtagatgaagaagaacgcaaaagaagagagcagcagaaacatgccaaagaacaggaggagctgaatgatgctgtgggattttctagagtcattcacgccattgctaattcgggaaaacttgttattggacacaatatgctcttggacgtcatgcacacagttcatcagttctactgccctctgcctgcggacttaagtgagtttaaagagatgacaacatgtgttttccccagactcttggatactaaattgatggccagcacacaaccttttaaggatatcattaacaacacatcccttgcggaattggaaaagcggttaaaagagacacctttcaaccctcctaaagttgaaagtgccgaaggttttccaagttatgacacagcctctgaacaactccacgaggcaggctacgatgcctacatcacagggctgtgcttcatctccatggccaattacctaggttcttttctcagccctccaaaaattcatgtgtctgccagatcaaaactcattgaacctttttttaacaagttatttcttatgagggtcatggatatcccctatctaaacttggaaggaccagacttgcagcctaaacgtgatcatgttctccatgtgacattccccaaagaatggaaaaccagcgacctttaccagcttttcagtgcctttggtaacattcagatatcctggattgatgacacatcagcatttgtttcccttagccagcccgagcaagtaaagattgctgtcaataccagcaaatatgcagaaagctatcggatccaaacctatgctgaatatatggggagaaaacaggaagagaagcagatcaaaagaaagtggactgaagatagctggaaggaggctgacagcaaacggttaaacccccagtgcataccctacaccctgcagaatcactattaccgcaacaatagttttacagctcccagcacagtaggaaagagaaatttgagtcctagtcaagaggaagctggcctggaggacggagtgtcaggggagatttccgacactgagcttgagcagaccgattcctgtgcagagcccctctcagagggaaggaaaaaggccaagaaattaaaaagaatgaagaaggagctttctccagcaggaagcatctcgaagaacagccctgccacactctttgaagttcctgacacatggtaaccaagacctgagggcagcaaaccgctggtgctgtcgctgtgagcaagag

SEQ ID NO: 49547 - DNA, 1737 bp, Artificial Sequence
  derived and/or modified sequence
atggacttcctactgtttcagttcggtttatgtacctttaaatacgactacacggatagcaaatatatcacaaaatccttcaacttctacgtatttcccaagcccttcaataggagcagtcccgacgttaaattcgtatgccagtcttccagtattgatttcctggcctcccaaggttttgactttaacaaagtcttcaggaatgggatcccctatctgaaccaagaagaggaacgccagctacgggagcagtatgatgaaaaacggtcccaggccaacggggctggcgcactttcgtatgtaagcccaaatacttcaaagtgcccggtgacaatccccgaggaccagaagaaatttatagaccaggttgttgagaaaatcgaggatttacttcagtcagaggagaacaagaacctggaccttgaaccttgtacggggttccaacgaaagttaatttaccagaccctgagttggaaatatcctaaggggatccacgtggagacattagagacggaaaagaaagagcgttacattgtgatctctaaagtggacgaagaggagcggaagcgacgagagcagcagaagcatgctaaggaacaggaggagctcaatgatgcggtgggcttttctagagtgattcatgctattgctaattctggtaagctagtaataggacacaatatgctgctggacgtgatgcatactgttcatcagttctactgtccactgccagcagatcttagtgagtttaaagaaatgactacctgtgtgtttccaagactgctggatactaagctgatggccagcacgcagcccttcaaagacatcattaataacactagtcttgccgagttagagaagcgacttaaagagactcccttcaacccacccaaagtagaaagcgccgaaggctttcccagctatgacacagcttcagagcagttgcatgaagcgggatatgatgcttacattaccgggttatgttttatttccatggcaaattacctcggcagcttcttatcaccaccaaaaatacatgtctccgctaggagcaagctgatcgagcccttcttcaataaactctttctgatgcgagtgatggatataccctatctgaacttggaaggtccagacttgcagcctaagcgcgatcatgtgcttcatgtaactttccccaaggagtggaagaccagtgacctgtaccaactgttctccgcgttcggaaacatccagattagctggatagacgatacgtccgccttcgtcagtctttcgcaaccagaacaagtcaaaatcgcagtaaataccagtaagtatgctgaatcctatcgaattcagacttatgctgagtatatgggaagaaaacaggaagagaagcagattaaacggaaatggaccgaagatagctggaaggaggctgacagtaagcgcttgaaccctcagtgcatcccctacaccctgcagaatcattactatcgtaataacagctttacggcccctagcacagtgggaaagcgtaatttgagtccgagtcaggaagaggccggtcttgaggatggcgtgtcaggggagatcagtgacaccgagctggaacagaccgactcatgtgccgagcccctgtccgaagggagaaagaaggccaaaaagttgaaaaggatgaaaaaggagctgtcaccagcgggttctatttccaaaaactcacccgcaactctgtttgaggtgccagacacctggtag

SEQ ID NO: 49548 - DNA, 1395 bp, Artificial Sequence
  derived and/or modified sequence
atggaaattattagaagtaactttaaaagcaacttgcataaggtgtaccaggccatcgaagaggccgatttctttgccatagatggtgagttcagcggaatctctgacggccctagcgtgtcagcactgactaacggattcgacactccggaagaaagataccaaaaactgaagaaaaaagagcggtatattgtgatttcaaaggtcgatgaggaagagcggaagaggcgcgagcaacagaaacacgccaaggagcaagaagagctaaacgacgcggtgggcttttcccgagtcattcatgccattgcaaactccggtaaactggtaatcggacataacatgctgctggacgtcatgcataccgtccaccaattctattgtccactcccagctgatctttctgaatttaaagagatgacgacttgtgtttttcctagactcttggatactaagctaatggctagcactcagcctttcaaagatatcataaacaatacctctctagcagagttggagaagcgcctgaaggaaactccctttaatccccctaaggtggaatccgccgaggggttcccctcatacgacacagctagcgagcagttacacgaggccggatatgacgcatatattacaggtctttgctttatcagcatggctaactatctgggttcatttttatcacccccaaaaatccatgtgtcagccaggagtaaattgattgagcccttctttaacaagctctttctgatgcgcgttatggacatcccctacttgaacctagagggcccagatctgcagccaaaacgcgaccacgtgctccatgtgacattcccgaaagaatggaagactagtgacttatatcaactgttcagtgcgttcggtaacatacaaatcagctggatcgacgacacctccgcatttgtgtcactttctcaaccagagcaggtaaagatcgctgtcaacacctctaaatacgccgagagctatcggattcagacatacgcagagtatatgggcagaaagcaggaggagaagcagattaagcggaaatggactgaagattcgtggaaggaagcagattccaagagactcaatcctcagtgcatcccgtacaccctgcagaaccattactacaggaataacagctttactgccccttcaaccgttggcaagaggaacttgtccccaagccaggaggaggcaggcctggaggacggtgtctccggtgaaatctctgacacagagttggaacagaccgacagctgcgctgagccactgtctgaaggacgtaagaaggccaagaaactgaagagaatgaagaaggagctgtctcccgcagggagcatatcaaaaaactctcccgctaccctgtttgaggttccagatacttggtag

SEQ ID NO: 49549 - DNA, 1737 bp, Artificial Sequence
  derived and/or modified sequence
atggacttcctgctgttccagttcggcctgtgcaccttcaagtacgactacaccgacagcaagtacatcaccaagagcttcaacttctacgtgttccccaagcccttcaacagaagcagccccgacgtgaagttcgtgtgccagagcagcagcatcgacttcctggccagccagggcttcgacttcaacaaggtgttcagaaacggcatcccctacctgaaccaggaggaggagagacagctgagagagcagtacgacgagaagagaagccaggccaacggcgccggcgccctgagctacgtgagccccaacaccagcaagtgccccgtgaccatccccgaggaccagaagaagttcatcgaccaggtggtggagaagatcgaggacctgctgcagagcgaggagaacaagaacctggacctggagccctgcaccggcttccagagaaagctgatctaccagaccctgagctggaagtaccccaagggcatccacgtggagaccctggagaccgagaagaaggagagatacatcgtgatcagcaaggtggacgaggaggagagaaagagaagagagcagcagaagcacgccaaggagcaggaggagctgaacgacgccgtgggcttcagcagagtgatccacgccatcgccaacagcggcaagctggtgatcggccacaacatgctgctggacgtgatgcacaccgtgcaccagttctactgccccctgcccgccgacctgagcgagttcaaggagatgaccacctgcgtgttccccagactgctggacaccaagctgatggccagcacccagcccttcaaggacatcatcaacaacaccagcctggccgagctggagaagagactgaaggagacccccttcaacccccccaaggtggagagcgccgagggcttccccagctacgacaccgccagcgagcagctgcacgaggccggctacgacgcctacatcaccggcctgtgcttcatcagcatggccaactacctgggcagcttcctgagcccccccaagatccacgtgagcgccagaagcaagctgatcgagcccttcttcaacaagctgttcctgatgagagtgatggacatcccctacctgaacctggagggccccgacctgcagcccaagagagaccacgtgctgcacgtgaccttccccaaggagtggaagaccagcgacctgtaccagctgttcagcgccttcggcaacatccagatcagctggatcgacgacaccagcgccttcgtgagcctgagccagcccgagcaggtgaagatcgccgtgaacaccagcaagtacgccgagagctacagaatccagacctacgccgagtacatgggcagaaagcaggaggagaagcagatcaagagaaagtggaccgaggacagctggaaggaggccgacagcaagagactgaacccccagtgcatcccctacaccctgcagaaccactactacagaaacaacagcttcaccgcccccagcaccgtgggcaagagaaacctgagccccagccaggaggaggccggcctggaggacggcgtgagcggcgagatcagcgacaccgagctggagcagaccgacagctgcgccgagcccctgagcgagggcagaaagaaggccaagaagctgaagagaatgaagaaggagctgagccccgccggcagcatcagcaagaacagccccgccaccctgttcgaggtgcccgacacctggtag

SEQ ID NO: 49550 - DNA, 1395 bp, Artificial Sequence
  derived and/or modified sequence
atggagatcatcagaagcaacttcaagagcaacctgcacaaggtgtaccaggccatcgaggaggccgacttcttcgccatcgacggcgagttcagcggcatcagcgacggccccagcgtgagcgccctgaccaacggcttcgacacccccgaggagagataccagaagctgaagaagaaggagagatacatcgtgatcagcaaggtggacgaggaggagagaaagagaagagagcagcagaagcacgccaaggagcaggaggagctgaacgacgccgtgggcttcagcagagtgatccacgccatcgccaacagcggcaagctggtgatcggccacaacatgctgctggacgtgatgcacaccgtgcaccagttctactgccccctgcccgccgacctgagcgagttcaaggagatgaccacctgcgtgttccccagactgctggacaccaagctgatggccagcacccagcccttcaaggacatcatcaacaacaccagcctggccgagctggagaagagactgaaggagacccccttcaacccccccaaggtggagagcgccgagggcttccccagctacgacaccgccagcgagcagctgcacgaggccggctacgacgcctacatcaccggcctgtgcttcatcagcatggccaactacctgggcagcttcctgagcccccccaagatccacgtgagcgccagaagcaagctgatcgagcccttcttcaacaagctgttcctgatgagagtgatggacatcccctacctgaacctggagggccccgacctgcagcccaagagagaccacgtgctgcacgtgaccttccccaaggagtggaagaccagcgacctgtaccagctgttcagcgccttcggcaacatccagatcagctggatcgacgacaccagcgccttcgtgagcctgagccagcccgagcaggtgaagatcgccgtgaacaccagcaagtacgccgagagctacagaatccagacctacgccgagtacatgggcagaaagcaggaggagaagcagatcaagagaaagtggaccgaggacagctggaaggaggccgacagcaagagactgaacccccagtgcatcccctacaccctgcagaaccactactacagaaacaacagcttcaccgcccccagcaccgtgggcaagagaaacctgagccccagccaggaggaggccggcctggaggacggcgtgagcggcgagatcagcgacaccgagctggagcagaccgacagctgcgccgagcccctgagcgagggcagaaagaaggccaagaagctgaagagaatgaagaaggagctgagccccgccggcagcatcagcaagaacagccccgccaccctgttcgaggtgcccgacacctggtag

SEQ ID NO: 49551 - DNA, 2445 bp, Artificial Sequence
  derived and/or modified sequence
atggaagagttgatcgtggaactgagactgtttttggaattgttagatcacgaatacctgacttccacagtgagggaaaagaaggccgtgattacgaatatactcctcagaatccagtcttccaaagggttcgacgtgaaggatcacgcccagaagcaggagacagctaactctctgcctgcccctccacagatgccgctgcctgaaatcccgcagccctggttgcccccagacagtggcccacctccccttcctaccagcagcctgcctgaaggatactacgaggaagctgtgccactttcgcccggcaaggccccggagtatattacatcgaattatgactccgatgcgatgagtagttcatatgagagttatgacgaagaagaggaagatggaaagggtaaaaagactcggcaccagtggccctccgaggaagcgagtatggacctcgttaaagatgccaagatttgcgcatttcttttacggaagaaaagattcggccagtggacaaaactgctatgcgttattaaagacactaaactgctctgctacaagagctctaaagaccagcaaccgcagatggaactgcccttgcagggctgtaacatcacgtatatccctaaagatagtaaaaagaagaaacacgagctgaagatcactcagcagggaaccgacccacttgtgctcgctgtgcaatccaaggaacaggccgaacagtggttgaaagtcattaaagaggcatacagcggttgtagcgggcccgtggatagcgaatgcccacccccaccttcatcgcctgttcacaaagcagagttagaaaaaaaactgtctagtgagaggccctccagtgacggagagggagtggtcgaaaatggcattactacatgcaacggtaaggaacaggtgaaacggaaaaaatcttccaagtcagaggcgaaagggaccgtcagcaaagttaccggcaagaaaatcacaaagataatttctcttggaaagaaaaaacccagcactgatgagcagaccagtagcgcagaggaagacgtgcctacctgtggttacctaaatgtattgtctaactccaggtggcgtgagcgatggtgccgcgttaaggataataaactgatttttcataaggatcggactgacctcaagacccacattgtgtctatcccccttagaggctgcgaagtcattcctggactggactccaagcatcccctgacattcaggctgctgaggaacggccaagaggtggcggtgctagaagccagtagcagtgaggacatgggccgttggatcggcattctgcttgccgagaccgggtcatctaccgaccctgaggcactgcattacgactacatcgatgtggagatgtcggcttccgttattcagaccgctaagcaaaccttctgtttcatgaataggagagtaatatccgcaaatccctatctcggagggacctcaaacgggtacgctcacccatctggaacagctctgcactacgatgacgtaccatgcatcaacggcagttgggagcccgaagacggattcccagcttcatgtagccgaggcctcggtgaggaggttctctatgacaatgctggattatacgacaatctccctcctcctcacattttcgcccgctatagtccggccgatcgcaaggcgtcccggctttcagcagacaagctgtcttctaatcattataagtacccggcgtcagcccaatcagtcactaatacctcctccgtcggaagagcctccttaggcttaaactctcagctgaagggaaaaaagcctcctgtcgcatcgaacggggtgacaggaaaaggtaaaacactaagctctcagcctaagaaagcagatccggctgcagtcgtaaagcggactggatccaatgcggcacaatataagtatgggaagaatcgagtagaggccgatgccaagcggctgcagacaaaagaagaagagctccttaagaggaaggaggctttgcggaaccgtctggcacagctccgtaaggagcgcaaagacctacgtgcagcaatcgaggttaacgccgggcgcaagcctcaggcgatcttggaggagaagctgaaacagcttgaagaagagtgtcggcagaaggaggccgagcgcgtgagtctggagctggagctgactgaggtcaaagagagtttgaagaaagccctggcaggtggagttacactagggcttgcaatcgaacctaagtctggtacctcgtcaccccagtcgccagtgtttaggcatcgaacgcttgaaaacagccctatatctagttgtgacactagtgatacggagggcccagtccccgttaattccgccgcagttctcaaaaaatctcaagccgcgcccggctccagcccttgtcggggccatgtgctgcgaaaagctaaagagtgggagctgaaaaacggcacatag

SEQ ID NO: 49552 - DNA, 2445 bp, Artificial Sequence
  derived and/or modified sequence
atggaggagctgattgtggagctgcggctcttcctggagctgctggaccacgagtacctgaccagcacagtgcgggagaagaaggctgtgatcaccaacatcctgctgcgcatccagagcagcaagggctttgatgtgaaggaccacgcccagaagcaggagacagccaacagcctgcctgccccaccccagatgcccctgcctgagatcccccagccctggctgcccccagattctggccccccacccctgcccaccagcagcctgcctgagggctactatgaggaggccgtgcccctgagccctgggaaggcccctgagtacatcaccagcaactatgacagtgatgccatgagcagcagctatgagagctatgatgaggaggaggaggatggcaagggcaagaagaccaggcaccagtggcccagcgaggaggcctccatggacctggtgaaggatgccaagatctgtgccttcctgctgaggaagaagcgcttcggccagtggaccaagctgctgtgtgtgatcaaggacaccaagctgctgtgctacaagagcagcaaggaccagcagccccagatggagctgcccctgcagggctgcaacatcacctacatccccaaggacagcaagaagaagaagcatgagctgaagatcacccagcagggcacagaccccctggtgctggccgtgcagagcaaggagcaggccgagcagtggctgaaggtgatcaaggaggcctacagcggctgcagcggccctgtggacagcgagtgccccccaccacccagcagccctgtgcacaaggccgagctggagaagaagctgagcagcgagcggcccagcagtgatggagaaggagtggtggagaatggcatcaccacctgcaatggcaaggagcaggtgaagaggaagaagagcagcaagtctgaggccaagggcaccgtgtccaaggtgacaggcaagaagatcaccaagatcatcagcctgggcaagaagaagcccagcacagatgagcagaccagcagcgctgaggaggatgtgcccacctgtggctacctgaatgtgctgagcaacagccgctggagggagcgctggtgccgggtgaaggacaacaagctgatcttccacaaggacagaacagacctgaagacccacatcgtgtccatccccctgcggggctgtgaggtgattcctggcctggacagcaagcaccccctgaccttccggctgctgagaaatggccaggaggtggccgtgctggaggccagcagcagcgaggacatgggccgctggattggcatcctgctggccgagaccggcagcagcacagatcctgaggccctgcactatgactacattgatgtggagatgtctgccagcgtcatccagacagccaagcagaccttctgcttcatgaacagaagagtcatcagcgccaacccctacctgggcggcaccagcaatggctacgcccaccccagcggcacagccctgcactatgatgatgtgccctgcatcaatggctcctgggagccagaagatggcttccctgccagctgcagccggggcctgggggaggaggtgctgtatgacaatgccggcctgtatgacaacctgcccccaccccacatctttgcccgctacagccctgctgacaggaaggccagccggctgtctgctgacaagctgagcagcaaccactacaagtacccagccagcgcccagagcgtgaccaacaccagctctgtgggccgggccagcctgggcctgaacagccagctgaagggcaagaagccccctgtggccagcaatggagtgacaggcaagggcaagaccctgagcagccagcccaagaaggctgaccctgctgctgtggtgaagaggacaggcagcaatgctgcccagtacaagtatggcaagaacagagtggaggctgatgccaagaggctgcagaccaaggaggaggagctgctgaagaggaaggaggccctgaggaaccggctggcccagctgaggaaggagaggaaggacctgcgggccgccatcgaggtgaatgccggcaggaagccccaggccatcctggaggagaagctgaagcagctggaggaggagtgccggcagaaggaggccgagcgggtgtccctggagctggagctgacagaggtgaaggagagcctgaagaaggccctggccggcggcgtgaccctgggcctggccatcgagcccaagagcggcaccagcagcccccagagccctgtgttccgccacaggaccctggagaacagccccatcagcagctgtgacaccagtgacacagagggccctgtgcctgtgaacagcgctgctgtgctgaagaagagccaggccgcccctggcagcagcccctgccggggccacgtgctgaggaaggccaaggagtgggagctgaagaatggcacctag

SEQ ID NO: 49553 - DNA, 2445 bp, Artificial Sequence
  derived and/or modified sequence
atggaggagctgatcgtggagctgcggctgttcctggagctgctggatcacgaatacctcacctctacggtgcgagagaagaaggctgtcatcacaaacatcctgctgaggatccagagctccaaaggctttgacgtcaaggaccacgcccagaagcaagagactgccaacagcttacctgccccaccgcagatgcccctgcctgagatcccccagccttggttgccgcctgacagtggtccgccaccattaccaacctcaagtcttcccgaaggctactacgaggaggcagtgcccctgagcccaggcaaagcgccagagtacatcactagtaattacgattcggacgctatgtcttcgtcgtacgagagttacgacgaagaagaggaagatgggaaagggaagaaaaccaggcaccaatggcccagcgaggaggcatccatggatttagtaaaggatgctaagatttgtgccttcctcctgcgcaaaaagagatttggtcagtggactaaacttctgtgtgtgatcaaggataccaaactcctgtgctacaaaagcagcaaagatcagcaaccgcagatggagcttcccttgcagggctgtaatattacctacattcccaaagactccaagaagaaaaagcatgagctgaaaatcacacaacaagggacggatcctctggtgctagctgttcagagcaaagagcaggccgaacaatggctaaaagtgataaaagaggcttacagcgggtgtagcggtcccgtggattcagaatgtcctccccctccgtcctcccctgtgcacaaggcagaacttgaaaaaaagctgtcttctgagcgtcctagtagcgatggcgaaggcgtagtggaaaacggcatcaccacatgcaacggcaaggagcaggtgaaaaggaagaagagctccaagagtgaagccaaaggcactgttagcaaggttacagggaaaaaaataacaaagattatcagtctcggaaagaaaaagccttcgacggatgaacaaactagtagcgccgaggaagacgtgccaacttgcgggtaccttaatgttcttagcaacagcagatggagagagagatggtgtcgtgtgaaggataataagctcatttttcacaaagaccggacagatcttaagacacacatcgtttcaatccccctcagggggtgcgaggttattccaggactggactctaaacatcccctcactttccgcctgttgcgcaatggacaggaagtagccgtgttagaggcaagcagttctgaagacatggggcgctggatcggcatcctattggctgagactgggtcttcaaccgaccctgaagccctacattacgattacatcgacgtcgaaatgtccgccagcgttattcagaccgcaaagcagaccttttgctttatgaataggagagtaatatccgccaacccatatctggggggaacatcaaatgggtatgcccatccaagcggaaccgcacttcactacgacgacgtgccctgcattaatggtagctgggaacctgaagacggtttcccagcctcttgcagtaggggcctcggagaggaagtgctctacgataacgccggtctttatgacaatcttcctcccccacacatttttgcacgttatagcccagcagaccggaaggcatcccgcttgagtgcagacaaattgtctagcaaccattataaataccctgcaagcgcccagtccgttaccaatacttcttccgttggcagggcgtcacttgggctgaactcacagcttaaaggaaaaaagccaccagtagcatcaaatggagttaccgggaagggtaagacgctctcaagtcagcccaaaaaggctgatcctgccgctgtagtcaaacgtaccgggtcaaacgccgcccaatacaagtatggtaaaaatagagttgaagctgatgcaaagcggctgcagaccaaggaagaggagctacttaaacgtaaagaagctctgagaaaccgactagctcaactgcgtaaagagaggaaggaccttcgggccgcaatcgaggtgaacgctggccgtaaaccccaagccattcttgaagagaagctcaagcagttggaagaggagtgtagacagaaggaagccgagagagtttcgttggaactggaactgactgaggtgaaagaatctcttaagaaggctcttgctggtggtgtgaccctgggcctcgccattgaacccaaatcaggtacaagctcccctcaatctcccgtgttcaggcatcgcactctggaaaattctccaatcagtagctgtgataccagcgataccgaggggcccgtgcctgtaaacagcgctgctgtgctaaagaagagccaggcagctcctgggagttccccctgtcgcggacacgtgttgaggaaagcaaaagagtgggagctgaagaacggaacctag

SEQ ID NO: 49554 - DNA, 2445 bp, Artificial Sequence
  derived and/or modified sequence
atggaagagttgattgtggaattgcgactgtttctggagcttctcgatcacgaatatttgacttcaacagtacgcgagaagaaggctgtgataaccaatattctgttgaggattcaaagtagtaagggcttcgatgttaaggaccatgcccaaaagcaggagacagccaactccctaccagctccacctcaaatgccgctcccagaaattccacagccctggctcccaccggacagcggaccaccgcctctgcctacgagttcactgcctgaggggtactatgaggaggccgtacctctatcaccaggcaaagcaccagaatatatcacctctaattatgattctgacgccatgagcagcagctacgagtcatatgacgaagaggaggaagatggtaagggcaaaaaaacccgacaccagtggccatccgaagaggcttctatggacttggtcaaggatgccaaaatttgcgctttccttctgaggaagaagcgttttggacaatggactaagctactgtgtgttatcaaagacacaaaattgctgtgctacaaatccagcaaagaccagcagccgcaaatggagctccctctgcaggggtgcaacattacctacattccaaaagactctaagaagaaaaaacacgagctaaaaattacacagcagggaacagatccgctggtgctggctgtccagtctaaagagcaggccgagcaatggttaaaggtgataaaagaggcctactccggttgctcaggcccagtggatagcgagtgccctcccccaccatcaagccctgtgcacaaagccgagctcgagaagaaactaagcagcgagcgaccaagtagcgatggggaaggcgtggtggaaaatggaataacaacgtgcaacgggaaggaacaggtgaaaaggaaaaagtcgagcaaatctgaggctaagggaactgtcagtaaagttaccggaaaaaagataactaagatcatttcactggggaagaagaagccctcaacagacgagcagacgagcagcgcagaagaagacgttccaacctgtgggtatctcaacgttctgtcaaactcacggtggcgagaacgctggtgtcgcgttaaagataacaaactgatcttccataaggatagaaccgatcttaaaacacacattgttagcattcctcttcggggatgcgaggtaatcccgggacttgattctaaacaccccctaacattcagactcttaaggaatgggcaggaggtggcagtcctggaggcaagcagctcagaagacatggggcgatggatcggcattctgctcgctgagactggcagttcaaccgacccagaggctttgcactacgactacattgatgttgagatgtcagcgtctgttattcagacagccaaacagaccttctgctttatgaaccgccgagtcatttctgcgaatccataccttggagggacaagcaatggttacgcccatccctccggtaccgcattgcactatgatgatgtcccatgtatcaatgggagctgggaacccgaagacggatttccagcttcctgctctagaggactgggtgaggaggtgctatacgataacgccggactctatgacaacctgccccctcctcacatttttgcccgatacagccctgcagacaggaaggcttcccggctctctgccgataagctgtcttctaatcattacaaatacccagcatctgcccagtccgttacaaatactagctcagtgggaagagcatctctcgggttgaattcccaactcaaggggaaaaagccacctgtggcttcgaacggtgtcaccggaaagggaaaaacattaagctcccaaccaaagaaagcagacccggcagctgtggtcaaaaggaccggcagtaatgcggctcagtacaagtatggaaagaatcgggttgaggctgatgccaagagattgcaaactaaggaagaggagctcctgaaacgcaaggaagctctgagaaatcgccttgctcagttacgaaaggagcgtaaagatcttagggccgctatcgaagtcaacgcgggacgcaagccccaggcaattctggaggagaaattaaagcaactggaagaggaatgcaggcagaaggaggccgaacgcgtgtcccttgagctggaactgacggaagttaaggagtctctcaaaaaggccctcgccggaggagttactttagggcttgcaatagaacccaagagcggaacgtcttcacctcagtctccggtgtttcgccaccgtactctggaaaattcaccaatctcaagctgtgatacttctgacaccgagggtccagtgcctgtgaactcggccgctgtgctgaagaaatcccaggccgctcccggaagctcgccatgtcggggtcatgtgcttcgaaaagcaaaggagtgggaattaaagaacggcacctag

SEQ ID NO: 49555 - DNA, 7768 bp, Artificial Sequence
  derived and/or modified sequence
gggcgcccggctccgctgggggcgggacggcgggcggcgggcggggccgtgtgcgcctgcgtggtgtctgtcccggccgcagccccacgccggctgcagctccgcgagccgagccggatctcgagcggggtacacgggctgaggcggcggcggcggccccgccccggggctccattgttaaggcggctgcggctctgtcggctgttcagctgcgctccagtcggcccaggcgccgcggcgaggagcgagcgctgcgaggtggcggcctgagcaatggaagagttaatagttgaacttcgtctctttcttgaactcctggaccatgaatatctaacctcaactgtcagggagaaaaaggcagtgataaccaacattctgctaagaatacagtcatccaaaggttttgatgtgaaggaccatgctcagaagcaggagaccgctaacagcctgccagcccctcctcagatgcccctgccggagatccctcagccctggctgcctcctgacagtgggcctccaccattgccaacatcctccctcccagaaggttattatgaggaagctgtgccgctgagccccggaaaagctccggaatacatcacatcaaattatgattccgatgcgatgagcagctcttatgagtcgtatgatgaagaggaggaggatgggaaggggaagaaaacccggcaccagtggccctccgaggaggcctccatggacctggtcaaggacgccaaaatctgcgccttcctgctgcggaagaagcggttcggccagtggaccaagttgctctgcgtcatcaaagacaccaaactgctgtgctataaaagttccaaggaccagcagcctcagatggaactgccactccaaggctgtaacattacgtacatcccgaaagacagcaaaaagaagaagcacgagctgaagattactcagcagggcacggacccgcttgttctcgccgtccagagcaaggaacaggccgagcagtggctgaaggtgatcaaagaagcctacagtggttgtagtggccccgtggattcagagtgtcctcctccaccaagctccccggtgcacaaggcagaactggagaagaaactgtcttcagagagacccagctcagatggggagggtgttgtggaaaatggaattaccacatgtaatggaaaggagcaagtgaagaggaagaaaagttccaaatcagaggccaagggcactgtgtcgaaagtcactgggaaaaaaatcaccaagatcatcagtctgggaaagaaaaagccgtccacagacgagcagacctcctcagctgaggaagatgttcccacctgcggctatctgaacgtgctctccaacagccgctggcgagagcgctggtgccgagtgaaagataacaagctcattttccacaaggacaggaccgacctgaagacccatattgtgtctattccgctccgtggctgcgaggtgatcccgggtttggattctaaacatcctctgacgttccggctgctgcgcaacggccaggaggttgcagtattggaggcatcttcttctgaagacatgggcaggtggattgggattttactcgcagagacgggatcgtccacagacccggaggctctgcactatgactacattgatgtggagatgtctgcaagtgtcattcagacagccaaacagaccttctgtttcatgaacaggcgtgttatatctgctaacccatatctagggggcacctccaacggctatgcccaccccagcgggacggcacttcattatgacgatgtcccgtgcatcaacggctcgtgggaaccggaagacggctttcctgcttcctgcagcagaggcttgggagaagaggtgctttatgataacgcaggcctgtacgataacttgccgcctccgcacatctttgcccgctactctcctgctgacagaaaggcctctaggctgtctgctgacaagctgtcctctaaccattacaaataccctgcctccgctcagtctgtcactaatacctcttctgtggggagggcgtctctcgggctcaactcgcagctcaagggtaaaaagccccccgtggcgtctaatggggtcacaggaaaagggaagactctgagcagtcagccaaagaaagcggatcccgcggctgttgtgaaaaggacgggttcgaatgctgcccagtacaagtatggcaagaaccgggtagaagcagatgccaagcggctacagaccaaagaggaggagctgctgaagaggaaagaggccctgcggaataggctggcccagctccgcaaggaaagaaaagaccttcgagcggctattgaagtgaacgccggcaggaagccgcaggcgatcctggaggagaagctgaagcagctggaggaggagtgccggcagaaggaggcggagcgtgtcagcctggagctggagctgacggaggtcaaggagagcctgaagaaagcgctggcgggcggagtcaccctggggctggccatcgagcccaagtcagggacatcgagtccacagtctccagtgttccggcaccggaccctggaaaactcgcccatctccagctgtgacaccagtgacaccgagggccccgtgccggtgaacagcgcggccgtcttgaagaagagccaggctgccccgggcagctccccctgccgagggcatgtgctgcggaaggccaaggaatgggaattgaagaacgggacctaggggacagcagcaccactccagcctcagagactgcacacccccttgcctgtatcctcatctgtgtgacggcaggaagctctgcccagagtggcctcagctgcacgactccagaggctccacgactgagctctgaggccagtgcctgtcccccaggcccacttgtattctttctactgtaaaatggcgcctttaaaaaagatgtaagactttggttcccaactttgttaaaaaacaaaaaaagtgatggaaaggtgtttgaaaggatgctatcaggcgaagtgacatctttctaaccagataggccattgctttcaccgattccaacccagccctggactgaggatggatggttccatgagcccccagatgaaaacctggattcgacagggaagagcttggatccccggctgccccgggcatgagtgtggctggccatgggcactgggctcgccttgcacgcccaccaggagggccaggggcatacgcagtcctgacgtggactttgtgtcttggcgtaccctctccacgtgcccgtccccctcgtcatcagaggtaaaggcatgagaaaatcgcgctgtgaaacgttttttaccttttattattattttttggacagatgcttttgtcaccaagacatgaaaagctgccattcttcttaacctgttttttaggaatgtctttttactgtgtgtcacacttagatcaaggagttttcagaggttccttattttattaattaattatttgtgctgcttttgacaggtagcagagggttttaatacttcactaacagtacaccctcctcccccttgggctagcatccccagcccttaatccacgtcggagccggcaggtgcttctcacaccaggagcctctgggggcaggggctggctcctcgccgctgtacaggacgtttactgctgcttggggccagggcagtcctttgaaagggaagcaagttccggaatttgttcgctcatggaactataacaccttagagcaagaggcaggaattccagggcctcctgcccctccccttcctccagcttgtcaagttaaaccactaatgtgttggtgggcctggccgtgctgcctctcctgagtagggtgggtgcaagtagggcctctttcccagctttcttgcttgccttctgtgcaatatttcttggagaatttggatgcctaaggcataaaggaaaaaaacagagttcatagtttgagctggtatttaccccctgggtttaaaaatcagattaacttcttggtctcccggaggctgctgtcaggaattctccagtacgggaagatgcagtcacttatgacgaaataagtcacccctgaacgcctccgcaggcagattcatggagaccagtcccagtagcaaccgccccttccccaagcatagaatacagaggtgccatacttggtgtaagccttccttctgtccactgtccagaatgtcctttttcacacagaggaagagatggcgggaaaacactgactgactccttgggtttcccccagacatactttcagagcgctagctgtgtggtgcacgggactttacagttaggattcatgtttaaggtggtggcgcttgaggcctgcaagggccacgttggattactgaagcggaaagcggtctcccatgtataagaaaaagttttacaacacgaattggaagctgcttgagtccacctgaacttgaattgattgcaaagccatctgctgggaacggttttgggttcctgagccatcagccagcctttctttcccctctgatgcacgttcctcccggcctagtccgtggaggcccatcacaccagcatccgtgacgccagcttcccactaggacatccaggcaggtcgggcggggacgccacacacctcagggccgtccgctgcattgccatagaggagccctccctccagtggtcacttcccaccattgcaggcagacttcccaccattgcaggcagctgggcccacttcatatcacacaaaatgaattttctataaagggaaaaaagtttgctcctccatagatttttgctgccttcgggtcaaatagtttccctggttgacactcttgggccactctgattggcagcctgctttgccaaagagaactgtgtgaggttttggtggttagtaagagaagggggagatggccagcctgaagtcacggtcctggcccagcacaggtgggcagcagcgagctggcaggtgaagtgtgagcagcacgcaaagtgtcacgtgggccttagccgtcacccaccagcttcctcaccaggcaaggaggccccggagccttagcagggacttgcccaacggcacagctgattggtgctcgactcccagcatgcatattttgttgtaaaaacccaggtttgtaattcacatccacaaccctaagccttttaaagcggaggcaaacgttaacaaaccccatcgtggtccatggagcctttcaaaatgggtgccctggaggggcctgacagtgggttccttccatggcggatactcccttgaaatttcacattccatcaaagtttaaagcatttacttcagaataagttatttatgtgtatatgttcaataaatatagtttttaatttatatctgtacatattagacacacgcgagccatcttgccagaattctgacagtgatgtcattttattcccctcccaaaacatgccccaggaacaagcaccccttgcctctgtggcagctgcgagtgtgtctgatttcataacgaagccaggctgagggcaagaggcccgacaggcaggccagggtccccggagaagccggatttcttcgcaatgtcactggtacttagcagatggtcgtgttcacaggggctagccacctgtactacggtgccgaccgcaatgcgaggaatgtggtggccacgcgatggagctggccggaggacaggtcaggtgagggggccgacccctgcggggctcagggctccttccattctaaccttgagccacagtgtcactcttcagggctctgctcctggctctattttgttaaggtgtcatcagccttcaacctccatttatatatttttataatgttaagccactgaccaactttttcatagaaacaactatcagattcgagggctccctttgtccccctgacctgggcacaggcatgggcgatggctccctcttcccagaatctgcggggaactggggcaaggcccatctgtctgcaaggctggtagctctctccctcggcttccagagtccacggcagttgcaaggtaaccagtgtggatctgctgagtcaccccaggcaccagacttaccccaggagcatgggccactgtccatggggccttccttgagaccttcccttggggctggcgggcggcggcttaccagctgggtcagtcccatctcgcccctctgtgcctatgccctggcgttgccaggcttaaccttcccctgtatcttactcatcccagaattattactggccatttctaaatagacaaaaactaccctaaaatgtggagatttactccttttgaaaagtctgtttcaaaaagtgtggcctcagctctggaggccacccccaggaaggagtttgaggttcattgtcattatggccacagtttggtgcttgtgcacgggactcaaagggcagcgtcgaagctggggttaggtgtagggttgtgagcaaagctcccctgtttgtggccacaccttccctttccaaaaaggctattaattctactcacccactatttggggggatgtaaattttgcccacagactttgccacccaggtgaggtgctgtgttcatgcacggaactgatgtcattagacaccatccaaggatgggcagcctgcagtgtggccggcgactgccatccagagaaaaggcaccttgtgccacagggcggggccgacaccctgagctcacaggtggcccctgcattcaggtggatgtccatccttgaaacagcctcttctgggaacacagcactggaggtctccaggcatcagggttggccggcagggtgccctgcagcttacataaaggtcgtggcaatgtttcaatgttaaactaaactattgccttcctcttacttttcctaaaatgattttctaatgggaacagtcacttcaagttcatgacatagtttgaaggaggataattcattttttcctggttgtcactgtcttcttatccccttggtgggctgggttcatactgtgaaataaactaaaatgaaaccaaaacgttcctgccgtaaatacgtggcacagcactgcagaaaaagcagtcacctctattcgtgagtccccaagccatagcagggcgtctgtaaaagaagggaaactgcacccaggaagtggtgggcgtcagacgcatcctttcgcccgtagttcatgaaatagttccggctttggtcttccagaaaatctcaacttcaccgtgcacaagtgttaccgggtctttttagtgtagccatggaagatactttcaaaaggacatcttcagatcataagtcttaggaccaaaggtgtttttaatgagataatctttttgattttctaacaagaaaggaaatattcactttacattttaacatcaacttttaagtgatattcagaattaattgaccatggtgatacgttgtaaaatgttttcatattaagaatgtaattatttccttattgtattttttaaaagctaaagtcatatttaaaattctctttgaaagaaacaggcaaagaaacagcaaagatttttttaaattaaatatgttagtagtgcccacttcaaatgactgtaaatatattttcactgtttctcaatgtatttaattcataaagtaaaaattttatgaaaagaaacttgcaaggaaaatcctagttttcagtccactcgccccactttgtagtagcttcactgaatttcctgctttcctggttgaattttctactgtttcacgtggtgtaaccctagactggcgcccttggcgtgcccctttgtgtatgaataaacttctctccccc

SEQ ID NO: 49556 - DNA, 2445 bp, Artificial Sequence
  derived and/or modified sequence
atggaggagctgatcgtggagctgagactgttcctggagctgctggaccacgagtacctgaccagcaccgtgagagagaagaaggccgtgatcaccaacatcctgctgagaatccagagcagcaagggcttcgacgtgaaggaccacgcccagaagcaggagaccgccaacagcctgcccgcccccccccagatgcccctgcccgagatcccccagccctggctgccccccgacagcggccccccccccctgcccaccagcagcctgcccgagggctactacgaggaggccgtgcccctgagccccggcaaggcccccgagtacatcaccagcaactacgacagcgacgccatgagcagcagctacgagagctacgacgaggaggaggaggacggcaagggcaagaagaccagacaccagtggcccagcgaggaggccagcatggacctggtgaaggacgccaagatctgcgccttcctgctgagaaagaagagattcggccagtggaccaagctgctgtgcgtgatcaaggacaccaagctgctgtgctacaagagcagcaaggaccagcagccccagatggagctgcccctgcagggctgcaacatcacctacatccccaaggacagcaagaagaagaagcacgagctgaagatcacccagcagggcaccgaccccctggtgctggccgtgcagagcaaggagcaggccgagcagtggctgaaggtgatcaaggaggcctacagcggctgcagcggccccgtggacagcgagtgcccccccccccccagcagccccgtgcacaaggccgagctggagaagaagctgagcagcgagagacccagcagcgacggcgagggcgtggtggagaacggcatcaccacctgcaacggcaaggagcaggtgaagagaaagaagagcagcaagagcgaggccaagggcaccgtgagcaaggtgaccggcaagaagatcaccaagatcatcagcctgggcaagaagaagcccagcaccgacgagcagaccagcagcgccgaggaggacgtgcccacctgcggctacctgaacgtgctgagcaacagcagatggagagagagatggtgcagagtgaaggacaacaagctgatcttccacaaggacagaaccgacctgaagacccacatcgtgagcatccccctgagaggctgcgaggtgatccccggcctggacagcaagcaccccctgaccttcagactgctgagaaacggccaggaggtggccgtgctggaggccagcagcagcgaggacatgggcagatggatcggcatcctgctggccgagaccggcagcagcaccgaccccgaggccctgcactacgactacatcgacgtggagatgagcgccagcgtgatccagaccgccaagcagaccttctgcttcatgaacagaagagtgatcagcgccaacccctacctgggcggcaccagcaacggctacgcccaccccagcggcaccgccctgcactacgacgacgtgccctgcatcaacggcagctgggagcccgaggacggcttccccgccagctgcagcagaggcctgggcgaggaggtgctgtacgacaacgccggcctgtacgacaacctgccccccccccacatcttcgccagatacagccccgccgacagaaaggccagcagactgagcgccgacaagctgagcagcaaccactacaagtaccccgccagcgcccagagcgtgaccaacaccagcagcgtgggcagagccagcctgggcctgaacagccagctgaagggcaagaagccccccgtggccagcaacggcgtgaccggcaagggcaagaccctgagcagccagcccaagaaggccgaccccgccgccgtggtgaagagaaccggcagcaacgccgcccagtacaagtacggcaagaacagagtggaggccgacgccaagagactgcagaccaaggaggaggagctgctgaagagaaaggaggccctgagaaacagactggcccagctgagaaaggagagaaaggacctgagagccgccatcgaggtgaacgccggcagaaagccccaggccatcctggaggagaagctgaagcagctggaggaggagtgcagacagaaggaggccgagagagtgagcctggagctggagctgaccgaggtgaaggagagcctgaagaaggccctggccggcggcgtgaccctgggcctggccatcgagcccaagagcggcaccagcagcccccagagccccgtgttcagacacagaaccctggagaacagccccatcagcagctgcgacaccagcgacaccgagggccccgtgcccgtgaacagcgccgccgtgctgaagaagagccaggccgcccccggcagcagcccctgcagaggccacgtgctgagaaaggccaaggagtgggagctgaagaacggcacctag

SEQ ID NO: 49557 - DNA, 357 bp, Artificial Sequence
  derived and/or modified sequence
atgaggggggagcgcaggcctctgtgggaagaagagagtaacgcaaaaggcggtgtctggaaaatgaaagtccccaaagatagcacatccaccgtctggaaagagctgctactcgcaacgatcggagagcagtttaccgattgtgcagcagcagacgacgaggtgatcggcgtgtcggtttccgttcgggatagggaggatgttgtgcaggtctggaacgtgaatgcctccctcgtaggggaagccacggtccttgagaaaatctacgagctcctaccacatatcaccttcaaagccgtgttctacaagccacacgaggagcaccatgctttcgagggcggaagaggaaaacactag

SEQ ID NO: 49558 - DNA, 357 bp, Artificial Sequence
  derived and/or modified sequence
atgcgcggcgagcgccgcccactctgggaagaagaaagtaacgctaaggggggagtctggaagatgaaggtgcctaaagactccactagcaccgtgtggaaggagctcctactggctacaatcggtgaacagttcaccgactgcgcagcggccgacgatgaagtgattggggtaagcgtgtcagtccgcgacagggaggatgtcgtccaggtatggaacgtaaacgccagcttagtaggtgaagctacagtgctggagaaaatctatgaactcctgcctcatataaccttcaaggccgtgttctataaaccccacgaagaacaccacgcgttcgagggaggtagagggaaacactag

SEQ ID NO: 49559 - DNA, 357 bp, Artificial Sequence
  derived and/or modified sequence
atgagaggagaacgccggcccctgtgggaggaggagagcaacgctaaggggggtgtgtggaagatgaaggtccccaaggacagtacgtcaacggtgtggaaagagttgttacttgctacaattggggaacaatttaccgattgcgccgcggcagacgacgaggtgatcggcgttagtgtgtccgtccgggaccgcgaagatgtcgtacaagtgtggaatgttaacgctagcctggtaggcgaggccaccgttcttgaaaagatttacgagctacttccgcacatcaccttcaaggcggtcttctataagccccatgaggagcatcatgcctttgaggggggacggggaaaacactag

SEQ ID NO: 49560 - DNA, 357 bp, Artificial Sequence
  derived and/or modified sequence
atgcggggtgaaagacgccctctttgggaggaagagtctaatgcgaaaggcggagtatggaagatgaaggtcccaaaggatagtacgtccacagtgtggaaggaactgctgctagctactattggagaacaatttaccgattgtgccgccgccgacgacgaagtaattggagtgagtgtatctgttcgcgaccgggaggacgtggtgcaagtatggaacgttaacgcatccctggtgggggaggccactgtgctcgagaaaatctatgaacttttgccccatattacattcaaggccgtgttctacaagccgcatgaggagcaccacgctttcgaagggggtaggggaaaacactag

SEQ ID NO: 49561 - DNA, 135 bp, Artificial Sequence
  derived and/or modified sequence
atgcgtggggagcgccgtcccctctgggaggaggagtcaaatgcgaaggggggtgtttggaagatgaaggtgcccaaggattctacaagtaccgtctggaaggaactcctactggctacgatcggggagcaatag

SEQ ID NO: 49562 - DNA, 156 bp, Artificial Sequence
  derived and/or modified sequence
atgaggggggaacggaggccactttgggaagaggagagtaacgccaaaggcggagtatggaagatgaaagtgcccaaggattctacttctacagtgtggaaagaacttcttctggccacaatcggcgaacaatttaccgattgtgcggctgcgtag

SEQ ID NO: 49563 - DNA, 282 bp, Artificial Sequence
  derived and/or modified sequence
atgcgaggcgagcgacggccgctctgggaggaggaatccaatgcaaaaggcggagtgtggaaaatgaaggtcccaaaggactccacatcaactgtgtggaaagaactgcttctggctactatcggtgagcagttcacagattgtgcagcagctgatgacgaggtgattggtgtcagcgtctcagtacgagatagagaggatgtggtgcaggtctggaatgtaaacgcgtctttagtgggtgaggccacggtgctggaaaagatttatgagctgctcccgtag

SEQ ID NO: 49564 - DNA, 357 bp, Artificial Sequence
  derived and/or modified sequence
atgagaggagagcggcggcccctgtgggaggaggagagcaatgccaagggcggcgtgtggaagatgaaggtgcccaaggacagcaccagcacagtgtggaaggagctgctgctggccaccatcggggagcagttcacagactgtgccgctgctgatgatgaagtcatcggcgtgtctgtgtctgtgcgggaccgggaggatgtggtgcaggtgtggaatgtgaatgccagcctggtgggggaggccaccgtgctggagaagatctatgagctgctgccccacatcaccttcaaggctgtgttctacaagccccatgaggagcaccacgcctttgaaggaggccggggcaagcactag

SEQ ID NO: 49565 - DNA, 135 bp, Artificial Sequence
  derived and/or modified sequence
atgagaggagagcggcggcccctgtgggaggaggagagcaatgccaagggcggcgtgtggaagatgaaggtgcccaaggacagcaccagcacagtgtggaaggagctgctgctggccaccatcggggagcagtag

SEQ ID NO: 49566 - DNA, 156 bp, Artificial Sequence
  derived and/or modified sequence
atgagaggagagcggcggcccctgtgggaggaggagagcaatgccaagggcggcgtgtggaagatgaaggtgcccaaggacagcaccagcacagtgtggaaggagctgctgctggccaccatcggggagcagttcacagactgtgccgccgcctag

SEQ ID NO: 49567 - DNA, 282 bp, Artificial Sequence
  derived and/or modified sequence
atgagaggagagcggcggcccctgtgggaggaggagagcaatgccaagggcggcgtgtggaagatgaaggtgcccaaggacagcaccagcacagtgtggaaggagctgctgctggccaccatcggggagcagttcacagactgtgccgctgctgatgatgaagtcatcggcgtgtctgtgtctgtgcgggaccgggaggatgtggtgcaggtgtggaatgtgaatgccagcctggtgggggaggccaccgtgctggagaagatctatgagctgctgccctag

SEQ ID NO: 49568 - DNA, 357 bp, Artificial Sequence
  derived and/or modified sequence
atgcggggcgagcggcggcccctgtgggaggaggagagcaacgccaaaggcggggtctggaagatgaaagtgcctaaagattctacctctaccgtctggaaagagctgctgctcgcaacgattggagaacagtttactgactgtgccgcagcggatgacgaggtgattggagtgagcgtgagcgtgagggacagagaagacgtggtgcaggtgtggaatgtgaacgcctccctcgtgggtgaagctactgtgctcgagaaaatctatgaactgctcccccatattacttttaaagcggtgttctacaaaccacacgaggaacatcacgcctttgagggcggcaggggcaaacattag

SEQ ID NO: 49569 - DNA, 357 bp, Artificial Sequence
  derived and/or modified sequence
atgcggggcgagcggcggcccctgtgggaggaggagagcaacgccaaagggggagtgtggaagatgaaagtgcccaaagactcgacttctacagtctggaaggagctactgctcgccacaataggcgaacaatttactgactgcgctgccgcggacgatgaggtcattggcgtgagtgtttctgtgagggatagggaagatgtggtccaggtgtggaatgtcaatgcctcactcgtgggcgaggctactgtgctcgaaaaaatctatgaactcctcccccatatcaccttcaaggccgtcttttacaagccgcacgaagagcaccacgcatttgaagggggcaggggcaagcactag

SEQ ID NO: 49570 - DNA, 357 bp, Artificial Sequence
  derived and/or modified sequence
atgcggggcgagcggcggcccctgtgggaggaggagagcaacgccaaaggcggagtgtggaagatgaaggtgcccaaggactccacatctactgtctggaaggagctcctgctggccaccatcggcgagcagttcactgactgcgcggccgccgacgacgaagtgattggagttagcgtcagcgtgcgcgatagggaggacgtggtacaggtgtggaatgtaaatgcgagcctggttggggaagctacggtgctagagaagatctatgagttgcttccacacattaccttcaaggccgtcttttataaaccacacgaagaacatcacgccttcgaagggggccgtggtaagcactag

SEQ ID NO: 49571 - DNA, 357 bp, Artificial Sequence
  derived and/or modified sequence
atgcggggcgagcggcggcccctgtgggaggaggagagcaacgccaaggggggggtgtggaagatgaaggttccgaaggacagtacctcaactgtctggaaggagctgctgctggctacgataggtgaacagtttacagattgcgcagctgccgatgatgaagtcattggggtttctgtttctgtcagggatcgcgaggatgtggtacaagtgtggaatgtgaatgctagcttagttggcgaagccacagtgttagagaaaatctacgaactcctcccccatattaccttcaaagctgtgttctataaaccacatgaggagcatcatgcttttgagggaggtcgggggaagcactag

SEQ ID NO: 49572 - DNA, 135 bp, Artificial Sequence
  derived and/or modified sequence
atgcggggcgagcggcggcccctgtgggaggaggagagcaacgccaaaggcggggtctggaagatgaaggtacccaaggattcaacgtccactgtgtggaaagagctgctgttggcaacaataggtgagcagtag

SEQ ID NO: 49573 - DNA, 156 bp, Artificial Sequence
  derived and/or modified sequence
atgcggggcgagcggcggcccctgtgggaggaggagagcaacgccaagggtggggtgtggaaaatgaaagtgcctaaggactctacatcaaccgtctggaaggagctacttctggccacaattggagagcagttcactgactgtgccgccgcgtag

SEQ ID NO: 49574 - DNA, 282 bp, Artificial Sequence
  derived and/or modified sequence
atgcggggcgagcggcggcccctgtgggaggaggagagcaacgccaaggggggggtctggaaaatgaaagtaccaaaagattccacctctacagtttggaaggagctgcttcttgccaccattggggagcagtttacagactgcgcggccgccgacgatgaagtaataggggtgtctgtctcggtacgagatagagaagacgtagttcaggtgtggaatgtcaatgcatccctagtcggagaagcaaccgtcttggagaagatttatgaacttctgccatag

SEQ ID NO: 49575 - DNA, 357 bp, Artificial Sequence
  derived and/or modified sequence
atgcggggagagcgccgtccactgtgggaggaggaaagtaacgccaaggggggagtgtggaaaatgaaggtccccaaagactcaaccagcacggtatggaaggagctgctgctggcaacaatcggagagcagttcaccgactgcgccgctgcagacgatgaagtgataggggtgagtgtttcagtcagggacagagaggatgttgttcaggtgtggaatgtgaatgctagtcttgtgggtgaggccaccgtcctcgaaaaaatttacgagctgctgcctcatatcaccttcaaggcggtcttttacaaacctcacgaggaacaccacgccttcgaaggagggaggggaaagcactag

SEQ ID NO: 49576 - DNA, 357 bp, Artificial Sequence
  derived and/or modified sequence
atgcgcggagagcggaggcccctgtgggaggaggagtcaaatgcgaaggggggtgtctggaaaatgaaggtgccaaaggatagcaccagcactgtgtggaaggaactgctcctggcaaccatcggtgaacagttcaccgactgcgcggctgcagacgacgaggttatcggggtgagtgtgtctgtccgcgatagagaagacgtggtgcaagtttggaatgtgaatgcttccctcgtgggcgaggctacggtgcttgagaaaatctatgagctgttgcctcatattaccttcaaggcagttttctacaagccccatgaagaacatcatgcctttgagggaggcagaggaaagcattag

SEQ ID NO: 49577 - DNA, 357 bp, Artificial Sequence
  derived and/or modified sequence
atgcgtggcgagcggagacccctgtgggaagaggagtccaatgcgaaagggggtgtgtggaagatgaaagtgcccaaggactcaaccagcactgtctggaaagagctcctgctcgcgacaattggtgaacagtttacagattgtgctgcggcagacgatgaagtcatcggagttagtgtaagcgtgcgggacagggaggacgtcgtacaggtctggaacgtcaatgcttccctggtgggcgaggcaacagttctggagaagatatacgagcttctaccacacatcaccttcaaggcagtcttctataagccgcacgaagagcaccacgcttttgagggcggtcggggaaaacattag

SEQ ID NO: 49578 - DNA, 357 bp, Artificial Sequence
  derived and/or modified sequence
atgaggggggaaagacgccctttgtgggaagaggagtccaatgccaaggggggtgtttggaagatgaaggtgcctaaggattccaccagcactgtgtggaaagaactcttgctcgctacaattggggagcagttcaccgactgtgccgctgccgatgatgaggtcattggggtgtcggtatcagttcgtgaccgggaagatgtagtccaggtgtggaatgtgaacgcaagtctagttggcgaagcgaccgtcctggagaaaatttacgagttgctgcctcacattacttttaaggccgtgttttataaaccccacgaagagcaccacgcatttgagggagggagggggaagcactag

SEQ ID NO: 49579 - DNA, 135 bp, Artificial Sequence
  derived and/or modified sequence
atgagaggggagcgtaggcccctatgggaggaggaatccaatgccaagggtggggtctggaaaatgaaggtccccaaagattcaaccagcacagtgtggaaagagctgctcctggcgacaatcggcgagcaatag

SEQ ID NO: 49580 - DNA, 156 bp, Artificial Sequence
  derived and/or modified sequence
atgcgcggagaaaggcgaccactgtgggaagaggaaagtaatgccaagggcggtgtatggaagatgaaggtgcctaaggactccacttccactgtttggaaggagttactactggccacgatcggcgaacagtttaccgactgcgcagcggcttag

SEQ ID NO: 49581 - DNA, 282 bp, Artificial Sequence
  derived and/or modified sequence
atgcgaggggagagaaggcccctgtgggaggaggagagcaacgcaaagggaggggtctggaagatgaaggtgcctaaggattccacctccacggtatggaaggagctgctgttggctacgatcggagagcagttcaccgattgcgccgcagccgacgatgaggtcattggcgtctctgtctcagttcgcgatagggaggatgttgttcaggtgtggaacgtgaatgcttctctcgtgggcgaggctactgtccttgagaagatctatgaactgctgccgtag

SEQ ID NO: 49582 - DNA, 357 bp, Artificial Sequence
  derived and/or modified sequence
atgagaggcgagagaagacccctgtgggaggaggagagcaacgccaagggcggcgtgtggaagatgaaggtgcccaaggacagcaccagcaccgtgtggaaggagctgctgctggccaccatcggcgagcagttcaccgactgcgccgccgccgacgacgaggtgatcggcgtgagcgtgagcgtgagagacagagaggacgtggtgcaggtgtggaacgtgaacgccagcctggtgggcgaggccaccgtgctggagaagatctacgagctgctgccccacatcaccttcaaggccgtgttctacaagccccacgaggagcaccacgccttcgagggcggcagaggcaagcactag

SEQ ID NO: 49583 - DNA, 135 bp, Artificial Sequence
  derived and/or modified sequence
atgagaggcgagagaagacccctgtgggaggaggagagcaacgccaagggcggcgtgtggaagatgaaggtgcccaaggacagcaccagcaccgtgtggaaggagctgctgctggccaccatcggcgagcagtag

SEQ ID NO: 49584 - DNA, 156 bp, Artificial Sequence
  derived and/or modified sequence
atgagaggcgagagaagacccctgtgggaggaggagagcaacgccaagggcggcgtgtggaagatgaaggtgcccaaggacagcaccagcaccgtgtggaaggagctgctgctggccaccatcggcgagcagttcaccgactgcgccgccgcctag

SEQ ID NO: 49585 - DNA, 282 bp, Artificial Sequence
  derived and/or modified sequence
atgagaggcgagagaagacccctgtgggaggaggagagcaacgccaagggcggcgtgtggaagatgaaggtgcccaaggacagcaccagcaccgtgtggaaggagctgctgctggccaccatcggcgagcagttcaccgactgcgccgccgccgacgacgaggtgatcggcgtgagcgtgagcgtgagagacagagaggacgtggtgcaggtgtggaacgtgaacgccagcctggtgggcgaggccaccgtgctggagaagatctacgagctgctgccctag

SEQ ID NO: 49586 - protein, 118 aa, Artificial Sequence
  derived and/or modified sequence
MRGERRPLWEEESNAKGGVWKMKVPKDSTSTVWKELLLATIGEQFTDCAAADDEVIGVSVSVRDREDVVQVWNVNASLVGEATVLEKIYELLPHITFKAVFYKPHEEHHAFEGGRGKH

SEQ ID NO: 49587 - protein, 224 aa, Artificial Sequence
  derived and/or modified sequence
MALPPAAAPPAGAREPPGSRAAAAAAAPEPPLGLQQLSALQPEPGGVPLHSSWTFWLDRSLPGATAAECASNLKKIYTVQTVQIFWSVYNNIPPVTSLPLRCSYHLMRGERRPLWEEESNAKGGVWKMKVPKDSTSTVWKELLLATIGEQFTDCAAADDEVIGVSVSVRDREDVVQVWNVNASLVGEATVLEKIYELLPHITFKAVFYKPHEEHHAFEGGRGKH

SEQ ID NO: 49588 - protein, 44 aa, Artificial Sequence
  derived and/or modified sequence
MRGERRPLWEEESNAKGGVWKMKVPKDSTSTVWKELLLATIGEQ

SEQ ID NO: 49589 - protein, 51 aa, Artificial Sequence
  derived and/or modified sequence
MRGERRPLWEEESNAKGGVWKMKVPKDSTSTVWKELLLATIGEQFTDCAAA

SEQ ID NO: 49590 - protein, 93 aa, Artificial Sequence
  derived and/or modified sequence
MRGERRPLWEEESNAKGGVWKMKVPKDSTSTVWKELLLATIGEQFTDCAAADDEVIGVSVSVRDREDVVQVWNVNASLVGEATVLEKIYELLP

SEQ ID NO: 49591 - DNA, 2764 bp, Artificial Sequence
  derived and/or modified sequence
gcgcgcagcgcggccgccgccgccagccccgccgaggcatcccgcaccgcctgggcccggctgggctgggggcgcctccgcagcagccgcggggtcgggaggcggccgggagggaggcagggcccaggacgcaaggtggcgacaagtcgcgtttggccccaggggctgtggggtcaccttctcttcctctcttctgccaccccaagtcgtctgtgttgcgtgtcatgcagtgggacagcacgttggtccggacctcaagctacccacgttctagtcccgcctctgtcatttcctagagctgtggcctcggatccctccctggtgccacagcagctgagtgcgcatcaaatctgaagaaaatctacacagtacagacagtacagatattttggagtgtatacaataatatccctcctgtgactagcctgcctttgagatgtagttatcatttaatgagaggagagaggcgaccactttgggaagaggagagtaatgcaaagggtggcgtatggaagatgaaagtccccaaggacagcacgtccacagtttggaaagagttgctgttagcaaccatcggggaacagttcacagactgtgccgcagcagatgatgaagtaataggagttagtgtcagtgttcgggaccgagaagacgtcgtccaagtctggaatgtaaatgcctctttagtgggtgaagcgactgttttagaaaagatctatgaacttctgccccacataacttttaaagcagtattttataaaccccatgaagagcatcatgcttttgaaggtggacgtggaaaacactaattgcactctgtaaagaattctttgtcctttgctgattggttttggaaacggtcttaacaggagggagagtgaagagaagacttgccgaagccgatgctggtcaatttagagtgggtttctgtccttgcagatgggcaattaggactcaaagtggcaggtggggtggggggagattgtgtgggtttctaccgtcacattacttgctttttaaaaaaaacacacacaaaaaactttttttttggctttctaaattctctgttcttttcactctgatttttttttttttttgccgtttaaaattccttattcagcctaattattgttttctacactcccctttcattgaggcacaagaaatgggtttccctttaagtagctctgctgtacctagttaatgagaatatgcataatcgtgacaatactgcttttgaataccacactgtacaaggaggaacactagcttggagaaatctgtcttctgattatttgttgtgacacattcctatgtactgtgagctgggcattgtttttttctgtcccagggaaaagaaaaaccatacttaatgtgattttgcactgacagcacacaaatctttaattttcctttttaaaacatttttttttagtgataaaaggaaaataatagttggattgcataacatgaaaactataatcacaattcagtatcaggatataaatcaagctctaagtctttggaccctctgtggaaacatttctaacccgaattttaatttggccttttcaaccaaaggcttagagtggtagcaagggatttcttccaataggaaacctgatgtttctgatttaaagagaaggtgatattttaattgtttgaattaagctccttgcaaagttcgggtgtgtttacccacttagggctttctttcccagtcaacgctaacacattttgttaaatgatccctttccctgctcacattgtgtgtcatttctcatcatcagtagtcctccagcctgggcagctgtccccaccctttttcatgtaggtgcaggaagttaaatctcatttccaggatgcatgtgaacatttacaaagttgaactttgagtgcattctgctcatatgaattattgggattgttgatatatattgtattatgctaccaaagaaatattggttttattagaaggaaatggtcatcctctggaccatggagactagctcagaatacgctgatttccctctcctgactttgccaagcctttggctgcttttgcctgataaagggcagggccatctgaagacacttcccccagtcggctttggagtcacgggagctagtgcctgctcacacatttttcaaaagggcagtgcactcagaacttcactgtacctgggatttttaattcctcttgcagtgttgaccagcagagagacttgaggctactttaagcctccactatgtgtttgtagataaaattctccattcaaacattttaaaggactttgaacattatctgcttatggaagttgtgcccttcacttggttagtaaccacctcagccataatacttaccatcataggtttcttaaaatgctttttttttttccctaaacttgagtttccttagtgatttcaaaatgaagtataagaatatcagatccagttagcaaaagcctaggacttgtttctccaaacattgtactaacattcaacttgttttaaaattatgactcaagaattttaaaaaattattctggacatgaattaaaacttttttataatataagtatttttctgattgaaaaaaggatataattgacttcactctaattgtcatgtatatttccataagtaaatggattttgaagtatttttattttttgaactttatttaaagcatttgtgatgacatgttcaacttttgcatgtatgtagcctttgaagtaaaaataaataggaatgttaggctcac

SEQ ID NO: 49592 - DNA, 6083 bp, Artificial Sequence
  derived and/or modified sequence
gctgatgggattaccagctcctgctaattgcatatgagtgctcaggggctgtggggtcaccttctcttcctctcttctgccaccccaagtcgtctgtgttgcgtgtcatgcagtgggacagcacgttggtccggacctcaagctacccacgttctagtcccgcctctgtcatttcctagagctgtggcctcggatccctccctggtgccacagcagctgagtgcgcatcaaatctgaagaaaatctacacagtacagacagtacagatattttggagtgtatacaataatatccctcctgtgactagcctgcctttgagatgtagttatcatttaatgagaggagagaggcgaccactttgggaagaggagagtaatgcaaagggtggcgtatggaagatgaaagtccccaaggacagcacgtccacagtttggaaagagttgctgttagcaaccatcggggaacagttcacagactgtgccgcagcagatgatgaagtaataggagttagtgtcagtgttcgggaccgagaagacgtcgtccaagtctggaatgtaaatgcctctttagtgggtgaagcgactgttttagaaaagatctatgaacttctgccccacataacttttaaagcagtattttataaaccccatgaagagcatcatgcttttgaaggtggacgtggaaaacactaattgcactctgtaaagaattctttgtcctttgctgattggttttggaaacggtcttaacaggagggagagtgaagagaagacttgccgaagccgatgctggtcaatttagagtgggtttctgtccttgcagatgggcaattaggactcaaagtggcaggtggggtggggggagattgtgtgggtttctaccgtcacattacttgctttttaaaaaaaacacacacaaaaaactttttttttggctttctaaattctctgttcttttcactctgatttttttttttttttgccgtttaaaattccttattcagcctaattattgttttctacactcccctttcattgaggcacaagaaatgggtttccctttaagtagctctgctgtacctagttaatgagaatatgcataatcgtgacaatactgcttttgaataccacactgtacaaggaggaacactagcttggagaaatctgtcttctgattatttgttgtgacacattcctatgtactgtgagctgggcattgtttttttctgtcccagggaaaagaaaaaccatacttaatgtgattttgcactgacagcacacaaatctttaattttcctttttaaaacatttttttttagtgataaaaggaaaataatagttggattgcataacatgaaaactataatcacaattcagtatcaggatataaatcaagctctaagtctttggaccctctgtggaaacatttctaacccgaattttaatttggccttttcaaccaaaggcttagagtggtagcaagggatttcttccaataggaaacctgatgtttctgatttaaagagaaggtgatattttaattgtttgaattaagctccttgcaaagttcgggtgtgtttacccacttagggctttctttcccagtcaacgctaacacattttgttaaatgatccctttccctgctcacattgtgtgtcatttctcatcatcagtagtcctccagcctgggcagctgtccccaccctttttcatgtaggtgcaggaagttaaatctcatttccaggatgcatgtgaacatttacaaagttgaactttgagtgcattctgctcatatgaattattgggattgttgatatatattgtattatgctaccaaagaaatattggttttattagaaggaaatggtcatcctctggaccatggagactagctcagaatacgctgatttccctctcctgactttgccaagcctttggctgcttttgcctgataaagggcagggccatctgaagacacttcccccagtcggctttggagtcacgggagctagtgcctgctcacacatttttcaaaagggcagtgcactcagaacttcactgtacctgggatttttaattcctcttgcagtgttgaccagcagagagacttgaggctactttaagcctccactatgtgtttgtagataaaattctccattcaaacattttaaaggactttgaacattatctgcttatggaagttgtgcccttcacttggttagtaaccacctcagccataatacttaccatcataggtttcttaaaatgctttttttttttccctaaacttgagtttccttagtgatttcaaaatgaagtataagaatatcagatccagttagcaaaagcctaggacttgtttctccaaacattgtactaacattcaacttgttttaaaattatgactcaagaattttaaaaaattattctggacatgaattaaaacttttttataatataagtatttttctgattgaaaaaaggatataattgacttcactctaattgtcatgtatatttccataagtaaatggattttgaagtatttttattttttgaactttatttaaagcatttgtgatgacatgttcaacttttgcatgtatgtagcctttgaagtaaaaataaataggaatgttaggctcacgttaatatttctagtttctgtttatgatcatggaacatgactagcacacaaagtagatttttgccccagtgaacttctgcaactgtttctgaccctttagaaaataccaactgtgagaaggatttaatttgcctaatgttaaaaacctatcatctaaattactttcagagaggattttgtcagattttggtttggaaattgttttaattgaatatttaatcataatagactttgtatgaactaagctgatttaatcagtttaaaaacctctcattaccttcttagattaaagaagctaatactgttttgagatagaaggaaatattttgtggggcatgtgacttttgtgttaaggcagtttacccatcttggctgatgtggggaaagtgcaaacttccagtagaatcccggtcttttcatccaagtgcttgcaggggcagccttgtagtctgcaaagaaccatgcagaaaccaaagagcttgcttttttgtctttgtaattccttagggtctgtgatatatgccaggaaatctgattgaaactaatatgctttttattctcccattattccctaaattgttatatcacaggcacttgcctacattgggaaagtaaggacaaataatacccatttaaagtaacttgcctatattttgactgtctttcgtaagcacttgctgaactgctgacttaactcagttttaagatttcctctttccccccaacttttccacatttcttaaatgagggtgtaatttactgcaaacatgtacatttaatataatattgctgttagattcgtggtacactttatgaagcaaaaacatgaaaaggaaaccacaactctaataaactttaaattaaagattaagatgactctttctcacccctcttcttgagtttagcccatgtctacaccatgcacacagtcacaagactttatagcttagaaactttaggtataattgggtcctatagacataatatacaatccaccaactgagccttggccgaacttgtcccttgttaaagacgtagggctagccagccacagagctgggtattgaagtcggcaagttgtatcccggtgcaggcgtccttaaatggagagtactcagaatctgccagccttaacctgcccactagccaccctaatcaagcattaaatatctgatccaatctggccactggtgtaactccgtaatcagacatcctgtttgtaaacagctcctccttctctccctctccctctcagagacagaagtggtgctggggtttggagtttgaaaataaccttcctatgacaggaagtgggcttttgctattagttgcccaactcttagaggatcccagcttgtgtctttagacaaaactgacagcctttggaacgatcgcatggtggcgctgccttccagccaacagttctggctcagcagcagaatttatccagctatgtttgtagaatttttttaagatcctactgcattttgctcttaagcttttataaaaatttgacgagaaaatgtaaaaatgatacttggcaataagacatttagttttcatgcacctaataaaaatgtgtcaaagctagatcgctccagatgtgcttaaaatatctcaaatcctaggctctcattggccttataagtgattgggaagaaaaagaataaaataaactcacatataggagatatggaaaatatttcatcaaatattatgcccaaagagagaaaattaggagttgattttttttagcactctgaatatggaacttccttttaaaaatgtaattctacccttcacctttcctacattgtatgtttctgtgagattttactcattacaagtgaaagtagaggactgcctgtgaattgttcacttctgaaaagaatatattgagatcagttaaaattactcaagagtttggtgactcaggattgtaaaaagcctggatctcaacagctgggaggagtcagagggtgaagtgggaaaaaatagggactgagaggcaacgaaaagtccctttgaacctgtggtcatttatagcaattagagtgggttgcccctctacttctcccaagaagaaatcccaaatagattcctttcatgtcagattatactgttctgattttattttctattatttttacatatacatccaaatctaagaatacttattcagattggcccactcaggccaaaagtcactgtcttgtgttctagaaattctttcatgttgctgacataaatccatttttaaaagaacattcagggactcttagaattttagagtggaagggacctttgagatcatctaccagtgcttctcaccccttagcatgcagcaaaatcactcagatacttacttattattcacatttcttgaccccagcactagaaatctgggaggatatctgcatttttaacaagtgccctagtgattctaatgctgatggtgctcagatcgctcttggagaacccctgattttatccaactcccacatatgacaaatgaggaaagcctcccaaccctaagctctgtcaggtgacctgattccaatgtatgataccaacaatcttatgaaggctggagaaaaccattaatactgagacttgagtagatgatgctcgtgaataagaactttatggctgggaccacagcagtcatgggagcccatccctggaagtccataatataaagcctttaatacagagtggtggtttttctcttttctaaataccatttcagtctgttaagagaaaagaaattagtgttcagaaaagtagttactccatatgtgcagtaactacttttctataatgtcttatggcatctggggttcagcatcattgaacaagattaaatgaacgttatagagctataaaattgcatgtaaaataacacaaaactgttcaaatgactatcaaagtagcctgggaatgaatttccactaaaattaattgtcactttcaaaacgtagcttagcaaagctgttactaaactggagagatcctttaatacatagaaatgtcaaaaaaatcaaataagtattccctaaacgatgtgagtgataagcaaaagtcattgcaaagtcagtatttttttgttcatcattgctactgaaattcagagttccattgtatatgtgtgtcttgagtgtaccttattagaatatccaatacaatagcttttggatattctatgcttttgtgtccttcagaaatcatgagattgaaggaatctgtgttaaatgtttttgttttggttgctgcctgaaaaaagttaccaactcatttagtgaaatgcaagatttctttatgaaaatttcaatttctaatatcgaagtcagataatttttcttgaacttttattttggaacagatgtttatttcggatctattaaagtgtcaactttgcattatagaactgaacatg

SEQ ID NO: 49593 - DNA, 777 bp, Artificial Sequence
  derived and/or modified sequence
agttggcggccgcctggccggtggcgcccgggccgtggaaggtccagtcgtggctgacggcgggcaccaggcgcgcgggccgcatcttgcggcggtcgtggatgaagaagagcaggcggaggtagacgaggggctgtggggtcaccttctcttcctctcttctgccaccccaagtcgtctgtgttgcgtgtcatgcagtgggacagcacgttggtccggacctcaagctacccacgttctagtcccgcctctgtcatttcctagagctgtggcctcggatccctccctggtgccacagcagctgagtgcgcatcaaatctgaagaaaatctacacagtacagacagtacagatattttggagtgtatacaataatatccctcctgtgactagcctgcctttgagatgtagttatcatttaatgagaggagagaggcgaccactttgggaagaggagagtaatgcaaagggtggcgtatggaagatgaaagtccccaaggacagcacgtccacagtttggaaagagttgctgttagcaaccatcggggaacagttcacagactgtgccgcagcagatgatgaagtaataggagttagtgtcagtgttcgggaccgagaagacgtcgtccaagtctggaatgtaaatgcctctttagtgggtgaagcgactgttttagaaaagatctatgaacttctgccccacataacttttaaagcagtattttataaaccccatgaagagcatcatgcttttgaaggtggacgtggaaaacactaa

SEQ ID NO: 49594 - DNA, 6076 bp, Artificial Sequence
  derived and/or modified sequence
cggagaaaatggcgctgcccccggccgccgcgccccccgccggggcccgggagccgccggggtcccgcgccgccgccgctgccgccgcccccgagccgccgctcggcctgcagcagctgtcggcgctgcagcctgagccgggcggggtcccgctgcactcgtcctggaccttctggctcgacagatccctccctggtgccacagcagctgagtgcgcatcaaatctgaagaaaatctacacagtacagacagtacagatattttggagtgtatacaataatatccctcctgtgactagcctgcctttgagatgtagttatcatttaatgagaggagagaggcgaccactttgggaagaggagagtaatgcaaagggtggcgtatggaagatgaaagtccccaaggacagcacgtccacagtttggaaagagttgctgttagcaaccatcggggaacagttcacagactgtgccgcagcagatgatgaagtaataggagttagtgtcagtgttcgggaccgagaagacgtcgtccaagtctggaatgtaaatgcctctttagtgggtgaagcgactgttttagaaaagatctatgaacttctgccccacataacttttaaagcagtattttataaaccccatgaagagcatcatgcttttgaaggtggacgtggaaaacactaattgcactctgtaaagaattctttgtcctttgctgattggttttggaaacggtcttaacaggagggagagtgaagagaagacttgccgaagccgatgctggtcaatttagagtgggtttctgtccttgcagatgggcaattaggactcaaagtggcaggtggggtggggggagattgtgtgggtttctaccgtcacattacttgctttttaaaaaaaacacacacaaaaaactttttttttggctttctaaattctctgttcttttcactctgatttttttttttttttgccgtttaaaattccttattcagcctaattattgttttctacactcccctttcattgaggcacaagaaatgggtttccctttaagtagctctgctgtacctagttaatgagaatatgcataatcgtgacaatactgcttttgaataccacactgtacaaggaggaacactagcttggagaaatctgtcttctgattatttgttgtgacacattcctatgtactgtgagctgggcattgtttttttctgtcccagggaaaagaaaaaccatacttaatgtgattttgcactgacagcacacaaatctttaattttcctttttaaaacatttttttttagtgataaaaggaaaataatagttggattgcataacatgaaaactataatcacaattcagtatcaggatataaatcaagctctaagtctttggaccctctgtggaaacatttctaacccgaattttaatttggccttttcaaccaaaggcttagagtggtagcaagggatttcttccaataggaaacctgatgtttctgatttaaagagaaggtgatattttaattgtttgaattaagctccttgcaaagttcgggtgtgtttacccacttagggctttctttcccagtcaacgctaacacattttgttaaatgatccctttccctgctcacattgtgtgtcatttctcatcatcagtagtcctccagcctgggcagctgtccccaccctttttcatgtaggtgcaggaagttaaatctcatttccaggatgcatgtgaacatttacaaagttgaactttgagtgcattctgctcatatgaattattgggattgttgatatatattgtattatgctaccaaagaaatattggttttattagaaggaaatggtcatcctctggaccatggagactagctcagaatacgctgatttccctctcctgactttgccaagcctttggctgcttttgcctgataaagggcagggccatctgaagacacttcccccagtcggctttggagtcacgggagctagtgcctgctcacacatttttcaaaagggcagtgcactcagaacttcactgtacctgggatttttaattcctcttgcagtgttgaccagcagagagacttgaggctactttaagcctccactatgtgtttgtagataaaattctccattcaaacattttaaaggactttgaacattatctgcttatggaagttgtgcccttcacttggttagtaaccacctcagccataatacttaccatcataggtttcttaaaatgctttttttttttccctaaacttgagtttccttagtgatttcaaaatgaagtataagaatatcagatccagttagcaaaagcctaggacttgtttctccaaacattgtactaacattcaacttgttttaaaattatgactcaagaattttaaaaaattattctggacatgaattaaaacttttttataatataagtatttttctgattgaaaaaaggatataattgacttcactctaattgtcatgtatatttccataagtaaatggattttgaagtatttttattttttgaactttatttaaagcatttgtgatgacatgttcaacttttgcatgtatgtagcctttgaagtaaaaataaataggaatgttaggctcacgttaatatttctagtttctgtttatgatcatggaacatgactagcacacaaagtagatttttgccccagtgaacttctgcaactgtttctgaccctttagaaaataccaactgtgagaaggatttaatttgcctaatgttaaaaacctatcatctaaattactttcagagaggattttgtcagattttggtttggaaattgttttaattgaatatttaatcataatagactttgtatgaactaagctgatttaatcagtttaaaaacctctcattaccttcttagattaaagaagctaatactgttttgagatagaaggaaatattttgtggggcatgtgacttttgtgttaaggcagtttacccatcttggctgatgtggggaaagtgcaaacttccagtagaatcccggtcttttcatccaagtgcttgcaggggcagccttgtagtctgcaaagaaccatgcagaaaccaaagagcttgcttttttgtctttgtaattccttagggtctgtgatatatgccaggaaatctgattgaaactaatatgctttttattctcccattattccctaaattgttatatcacaggcacttgcctacattgggaaagtaaggacaaataatacccatttaaagtaacttgcctatattttgactgtctttcgtaagcacttgctgaactgctgacttaactcagttttaagatttcctctttccccccaacttttccacatttcttaaatgagggtgtaatttactgcaaacatgtacatttaatataatattgctgttagattcgtggtacactttatgaagcaaaaacatgaaaaggaaaccacaactctaataaactttaaattaaagattaagatgactctttctcacccctcttcttgagtttagcccatgtctacaccatgcacacagtcacaagactttatagcttagaaactttaggtataattgggtcctatagacataatatacaatccaccaactgagccttggccgaacttgtcccttgttaaagacgtagggctagccagccacagagctgggtattgaagtcggcaagttgtatcccggtgcaggcgtccttaaatggagagtactcagaatctgccagccttaacctgcccactagccaccctaatcaagcattaaatatctgatccaatctggccactggtgtaactccgtaatcagacatcctgtttgtaaacagctcctccttctctccctctccctctcagagacagaagtggtgctggggtttggagtttgaaaataaccttcctatgacaggaagtgggcttttgctattagttgcccaactcttagaggatcccagcttgtgtctttagacaaaactgacagcctttggaacgatcgcatggtggcgctgccttccagccaacagttctggctcagcagcagaatttatccagctatgtttgtagaatttttttaagatcctactgcattttgctcttaagcttttataaaaatttgacgagaaaatgtaaaaatgatacttggcaataagacatttagttttcatgcacctaataaaaatgtgtcaaagctagatcgctccagatgtgcttaaaatatctcaaatcctaggctctcattggccttataagtgattgggaagaaaaagaataaaataaactcacatataggagatatggaaaatatttcatcaaatattatgcccaaagagagaaaattaggagttgattttttttagcactctgaatatggaacttccttttaaaaatgtaattctacccttcacctttcctacattgtatgtttctgtgagattttactcattacaagtgaaagtagaggactgcctgtgaattgttcacttctgaaaagaatatattgagatcagttaaaattactcaagagtttggtgactcaggattgtaaaaagcctggatctcaacagctgggaggagtcagagggtgaagtgggaaaaaatagggactgagaggcaacgaaaagtccctttgaacctgtggtcatttatagcaattagagtgggttgcccctctacttctcccaagaagaaatcccaaatagattcctttcatgtcagattatactgttctgattttattttctattatttttacatatacatccaaatctaagaatacttattcagattggcccactcaggccaaaagtcactgtcttgtgttctagaaattctttcatgttgctgacataaatccatttttaaaagaacattcagggactcttagaattttagagtggaagggacctttgagatcatctaccagtgcttctcaccccttagcatgcagcaaaatcactcagatacttacttattattcacatttcttgaccccagcactagaaatctgggaggatatctgcatttttaacaagtgccctagtgattctaatgctgatggtgctcagatcgctcttggagaacccctgattttatccaactcccacatatgacaaatgaggaaagcctcccaaccctaagctctgtcaggtgacctgattccaatgtatgataccaacaatcttatgaaggctggagaaaaccattaatactgagacttgagtagatgatgctcgtgaataagaactttatggctgggaccacagcagtcatgggagcccatccctggaagtccataatataaagcctttaatacagagtggtggtttttctcttttctaaataccatttcagtctgttaagagaaaagaaattagtgttcagaaaagtagttactccatatgtgcagtaactacttttctataatgtcttatggcatctggggttcagcatcattgaacaagattaaatgaacgttatagagctataaaattgcatgtaaaataacacaaaactgttcaaatgactatcaaagtagcctgggaatgaatttccactaaaattaattgtcactttcaaaacgtagcttagcaaagctgttactaaactggagagatcctttaatacatagaaatgtcaaaaaaatcaaataagtattccctaaacgatgtgagtgataagcaaaagtcattgcaaagtcagtatttttttgttcatcattgctactgaaattcagagttccattgtatatgtgtgtcttgagtgtaccttattagaatatccaatacaatagcttttggatattctatgcttttgtgtccttcagaaatcatgagattgaaggaatctgtgttaaatgtttttgttttggttgctgcctgaaaaaagttaccaactcatttagtgaaatgcaagatttctttatgaaaatttcaatttctaatatcgaagtcagataatttttcttgaacttttattttggaacagatgtttatttcggatctattaaagtgtcaactttgcattatagaactgaacatgaa

SEQ ID NO: 49595 - DNA, 6205 bp, Artificial Sequence
  derived and/or modified sequence
aaggcggcgtggaagcagaagagcgcggccaggaaggcgagcagcttgcagcccagcgcgcccggcggcgcccccgccgcggccgccgcacgccgcgccgccagcatgacggccgggaggcaggcgagcgcgcgcagcccgtcggccaggcacaggtcgagcagcaggggctgtggggtcaccttctcttcctctcttctgccaccccaagtcgtctgtgttgcgtgtcatgcagtgggacagcacgttggtccggacctcaagctacccacgttctagtcccgcctctgtcatttcctagagctgtggcctcggatccctccctggtgccacagcagctgagtgcgcatcaaatctgaagaaaatctacacagtacagacagtacagatattttggagtgtatacaataatatccctcctgtgactagcctgcctttgagatgtagttatcatttaatgagaggagagaggcgaccactttgggaagaggagagtaatgcaaagggtggcgtatggaagatgaaagtccccaaggacagcacgtccacagtttggaaagagttgctgttagcaaccatcggggaacagttcacagactgtgccgcagcagatgatgaagtaataggagttagtgtcagtgttcgggaccgagaagacgtcgtccaagtctggaatgtaaatgcctctttagtgggtgaagcgactgttttagaaaagatctatgaacttctgccccacataacttttaaagcagtattttataaaccccatgaagagcatcatgcttttgaaggtggacgtggaaaacactaattgcactctgtaaagaattctttgtcctttgctgattggttttggaaacggtcttaacaggagggagagtgaagagaagacttgccgaagccgatgctggtcaatttagagtgggtttctgtccttgcagatgggcaattaggactcaaagtggcaggtggggtggggggagattgtgtgggtttctaccgtcacattacttgctttttaaaaaaaacacacacaaaaaactttttttttggctttctaaattctctgttcttttcactctgatttttttttttttttgccgtttaaaattccttattcagcctaattattgttttctacactcccctttcattgaggcacaagaaatgggtttccctttaagtagctctgctgtacctagttaatgagaatatgcataatcgtgacaatactgcttttgaataccacactgtacaaggaggaacactagcttggagaaatctgtcttctgattatttgttgtgacacattcctatgtactgtgagctgggcattgtttttttctgtcccagggaaaagaaaaaccatacttaatgtgattttgcactgacagcacacaaatctttaattttcctttttaaaacatttttttttagtgataaaaggaaaataatagttggattgcataacatgaaaactataatcacaattcagtatcaggatataaatcaagctctaagtctttggaccctctgtggaaacatttctaacccgaattttaatttggccttttcaaccaaaggcttagagtggtagcaagggatttcttccaataggaaacctgatgtttctgatttaaagagaaggtgatattttaattgtttgaattaagctccttgcaaagttcgggtgtgtttacccacttagggctttctttcccagtcaacgctaacacattttgttaaatgatccctttccctgctcacattgtgtgtcatttctcatcatcagtagtcctccagcctgggcagctgtccccaccctttttcatgtaggtgcaggaagttaaatctcatttccaggatgcatgtgaacatttacaaagttgaactttgagtgcattctgctcatatgaattattgggattgttgatatatattgtattatgctaccaaagaaatattggttttattagaaggaaatggtcatcctctggaccatggagactagctcagaatacgctgatttccctctcctgactttgccaagcctttggctgcttttgcctgataaagggcagggccatctgaagacacttcccccagtcggctttggagtcacgggagctagtgcctgctcacacatttttcaaaagggcagtgcactcagaacttcactgtacctgggatttttaattcctcttgcagtgttgaccagcagagagacttgaggctactttaagcctccactatgtgtttgtagataaaattctccattcaaacattttaaaggactttgaacattatctgcttatggaagttgtgcccttcacttggttagtaaccacctcagccataatacttaccatcataggtttcttaaaatgctttttttttttccctaaacttgagtttccttagtgatttcaaaatgaagtataagaatatcagatccagttagcaaaagcctaggacttgtttctccaaacattgtactaacattcaacttgttttaaaattatgactcaagaattttaaaaaattattctggacatgaattaaaacttttttataatataagtatttttctgattgaaaaaaggatataattgacttcactctaattgtcatgtatatttccataagtaaatggattttgaagtatttttattttttgaactttatttaaagcatttgtgatgacatgttcaacttttgcatgtatgtagcctttgaagtaaaaataaataggaatgttaggctcacgttaatatttctagtttctgtttatgatcatggaacatgactagcacacaaagtagatttttgccccagtgaacttctgcaactgtttctgaccctttagaaaataccaactgtgagaaggatttaatttgcctaatgttaaaaacctatcatctaaattactttcagagaggattttgtcagattttggtttggaaattgttttaattgaatatttaatcataatagactttgtatgaactaagctgatttaatcagtttaaaaacctctcattaccttcttagattaaagaagctaatactgttttgagatagaaggaaatattttgtggggcatgtgacttttgtgttaaggcagtttacccatcttggctgatgtggggaaagtgcaaacttccagtagaatcccggtcttttcatccaagtgcttgcaggggcagccttgtagtctgcaaagaaccatgcagaaaccaaagagcttgcttttttgtctttgtaattccttagggtctgtgatatatgccaggaaatctgattgaaactaatatgctttttattctcccattattccctaaattgttatatcacaggcacttgcctacattgggaaagtaaggacaaataatacccatttaaagtaacttgcctatattttgactgtctttcgtaagcacttgctgaactgctgacttaactcagttttaagatttcctctttccccccaacttttccacatttcttaaatgagggtgtaatttactgcaaacatgtacatttaatataatattgctgttagattcgtggtacactttatgaagcaaaaacatgaaaaggaaaccacaactctaataaactttaaattaaagattaagatgactctttctcacccctcttcttgagtttagcccatgtctacaccatgcacacagtcacaagactttatagcttagaaactttaggtataattgggtcctatagacataatatacaatccaccaactgagccttggccgaacttgtcccttgttaaagacgtagggctagccagccacagagctgggtattgaagtcggcaagttgtatcccggtgcaggcgtccttaaatggagagtactcagaatctgccagccttaacctgcccactagccaccctaatcaagcattaaatatctgatccaatctggccactggtgtaactccgtaatcagacatcctgtttgtaaacagctcctccttctctccctctccctctcagagacagaagtggtgctggggtttggagtttgaaaataaccttcctatgacaggaagtgggcttttgctattagttgcccaactcttagaggatcccagcttgtgtctttagacaaaactgacagcctttggaacgatcgcatggtggcgctgccttccagccaacagttctggctcagcagcagaatttatccagctatgtttgtagaatttttttaagatcctactgcattttgctcttaagcttttataaaaatttgacgagaaaatgtaaaaatgatacttggcaataagacatttagttttcatgcacctaataaaaatgtgtcaaagctagatcgctccagatgtgcttaaaatatctcaaatcctaggctctcattggccttataagtgattgggaagaaaaagaataaaataaactcacatataggagatatggaaaatatttcatcaaatattatgcccaaagagagaaaattaggagttgattttttttagcactctgaatatggaacttccttttaaaaatgtaattctacccttcacctttcctacattgtatgtttctgtgagattttactcattacaagtgaaagtagaggactgcctgtgaattgttcacttctgaaaagaatatattgagatcagttaaaattactcaagagtttggtgactcaggattgtaaaaagcctggatctcaacagctgggaggagtcagagggtgaagtgggaaaaaatagggactgagaggcaacgaaaagtccctttgaacctgtggtcatttatagcaattagagtgggttgcccctctacttctcccaagaagaaatcccaaatagattcctttcatgtcagattatactgttctgattttattttctattatttttacatatacatccaaatctaagaatacttattcagattggcccactcaggccaaaagtcactgtcttgtgttctagaaattctttcatgttgctgacataaatccatttttaaaagaacattcagggactcttagaattttagagtggaagggacctttgagatcatctaccagtgcttctcaccccttagcatgcagcaaaatcactcagatacttacttattattcacatttcttgaccccagcactagaaatctgggaggatatctgcatttttaacaagtgccctagtgattctaatgctgatggtgctcagatcgctcttggagaacccctgattttatccaactcccacatatgacaaatgaggaaagcctcccaaccctaagctctgtcaggtgacctgattccaatgtatgataccaacaatcttatgaaggctggagaaaaccattaatactgagacttgagtagatgatgctcgtgaataagaactttatggctgggaccacagcagtcatgggagcccatccctggaagtccataatataaagcctttaatacagagtggtggtttttctcttttctaaataccatttcagtctgttaagagaaaagaaattagtgttcagaaaagtagttactccatatgtgcagtaactacttttctataatgtcttatggcatctggggttcagcatcattgaacaagattaaatgaacgttatagagctataaaattgcatgtaaaataacacaaaactgttcaaatgactatcaaagtagcctgggaatgaatttccactaaaattaattgtcactttcaaaacgtagcttagcaaagctgttactaaactggagagatcctttaatacatagaaatgtcaaaaaaatcaaataagtattccctaaacgatgtgagtgataagcaaaagtcattgcaaagtcagtatttttttgttcatcattgctactgaaattcagagttccattgtatatgtgtgtcttgagtgtaccttattagaatatccaatacaatagcttttggatattctatgcttttgtgtccttcagaaatcatgagattgaaggaatctgtgttaaatgtttttgttttggttgctgcctgaaaaaagttaccaactcatttagtgaaatgcaagatttctttatgaaaatttcaatttctaatatcgaagtcagataatttttcttgaacttttattttggaacagatgtttatttcggatctattaaagtgtcaactttgcattatagaactgaacatg

SEQ ID NO: 49596 - DNA, 519 bp, Artificial Sequence
  derived and/or modified sequence
ggtgactggatgctggaggggaggggagtagctgctgcagctaattgcttaattatttatgagtgcctcaagtccttcttgttgtttttgttgctaggggctgtggggtcaccttctcttcctctcttctgccaccccaagtcgtctgtgttgcgtgtcatgcagtgggacagcacgttggtccggacctcaagctacccacgttctagtcccgcctctgtcatttcctagagctgtggcctcggatccctccctggtgccacagcagctgagtgcgcatcaaatctgaagaaaatctacacagtacagacagtacagatattttggagtgtatacaataatatccctcctgtgactagcctgcctttgagatgtagttatcatttaatgagaggagagaggcgaccactttgggaagaggagagtaatgcaaagggtggcgtatggaagatgaaagtccccaaggacagcacgtccacagtttggaaagagttgctgttagcaaccatcggggaacag

SEQ ID NO: 49597 - DNA, 613 bp, Artificial Sequence
  derived and/or modified sequence
ggaaggcggcgtggaagcagaagagcgcggccaggaaggcgagcagcttgcagcccagcgcgcccggcggcgcccccgccgcggccgccgcacgccgcgccgccagcatgacggccgggaggcaggcgagcgcgcgcagcccgtcggccaggcacaggtcgagcagcaggggctgtggggtcaccttctcttcctctcttctgccaccccaagtcgtctgtgttgcgtgtcatgcagtgggacagcacgttggtccggacctcaagctacccacgttctagtcccgcctctgtcatttcctagagctgtggcctcggatccctccctggtgccacagcagctgagtgcgcatcaaatctgaagaaaatctacacagtacagacagtacagatattttggagtgtatacaataatatccctcctgtgactagcctgcctttgagatgtagttatcatttaatgagaggagagaggcgaccactttgggaagaggagagtaatgcaaagggtggcgtatggaagatgaaagtccccaaggacagcacgtccacagtttggaaagagttgctgttagcaaccatcggggaacagttcacagactgtgccgcagcag

SEQ ID NO: 49598 - DNA, 693 bp, Artificial Sequence
  derived and/or modified sequence
gtagaagagagaggaccacttgttgctaggcaaccagcacccacctcacccatgttgccatggtgatgatgaaagttgggctgatgggattaccagctcctgctaattgcatatgagtgctcaggggctgtggggtcaccttctcttcctctcttctgccaccccaagtcgtctgtgttgcgtgtcatgcagtgggacagcacgttggtccggacctcaagctacccacgttctagtcccgcctctgtcatttcctagagctgtggcctcggatccctccctggtgccacagcagctgagtgcgcatcaaatctgaagaaaatctacacagtacagacagtacagatattttggagtgtatacaataatatccctcctgtgactagcctgcctttgagatgtagttatcatttaatgagaggagagaggcgaccactttgggaagaggagagtaatgcaaagggtggcgtatggaagatgaaagtccccaaggacagcacgtccacagtttggaaagagttgctgttagcaaccatcggggaacagttcacagactgtgccgcagcagatgatgaagtaataggagttagtgtcagtgttcgggaccgagaagacgtcgtccaagtctggaatgtaaatgcctctttagtgggtgaagcgactgttttagaaaagatctatgaacttctgccc

SEQ ID NO: 49599 - DNA, 675 bp, Artificial Sequence
  derived and/or modified sequence
atggcgctgcctccagcagctgcaccacctgcgggtgcacgcgaacctccgggctcacgcgccgccgccgcagctgcagctcccgagccacccctgggactgcagcagctttctgcccttcagcccgaaccggggggtgttcctttacattcttcttggacgttctggctcgatcggagtctgcctggggccaccgcagctgagtgcgcatccaacctcaaaaagatctacactgtacagaccgtacagattttttggtctgtgtataacaacataccacctgtaacctcattgcccctgcgatgttcatatcacctcatgcgtggtgaacgcagacccttatgggaagaggagtcaaacgccaagggaggagtttggaaaatgaaagtgcctaaggacagcacctctactgtctggaaggagctgctactggcgacgattggcgagcagttcaccgattgtgctgctgctgatgatgaggtcataggagtgtctgtctctgttcgtgacagggaggatgtggttcaggtatggaacgtcaatgcttccctggtgggagaggctactgtgctcgaaaaaatctacgaattattaccacacatcactttcaaggcagtattctacaagcctcatgaagagcatcacgcatttgagggcggacggggaaagcattag

SEQ ID NO: 49600 - DNA, 675 bp, Artificial Sequence
  derived and/or modified sequence
atggccctgcccccagctgctgcccctcctgctggggcccgggagcccccaggcagcagagctgctgctgctgctgctgcccctgagccccccctgggcctgcagcagctgagcgccctgcagcctgagcccggcggcgtgcccctgcacagctcctggaccttctggctggacaggagcctgcccggggccacagctgctgaatgtgccagcaacctgaagaagatctacacagtgcagacagtgcagatcttctggagcgtgtacaacaacatcccccctgtgaccagcctgcccctgcgctgcagctaccacctgatgagaggagagcggcggcccctgtgggaggaggagagcaatgccaagggcggcgtgtggaagatgaaggtgcccaaggacagcaccagcacagtgtggaaggagctgctgctggccaccatcggggagcagttcacagactgtgccgctgctgatgatgaagtcatcggcgtgtctgtgtctgtgcgggaccgggaggatgtggtgcaggtgtggaatgtgaatgccagcctggtgggggaggccaccgtgctggagaagatctatgagctgctgccccacatcaccttcaaggctgtgttctacaagccccatgaggagcaccacgcctttgaaggaggccggggcaagcactag

SEQ ID NO: 49601 - DNA, 675 bp, Artificial Sequence
  derived and/or modified sequence
atggccctgccccccgccgccgccccccccgccggcgcccgggagccacccggatcccgggccgctgccgctgcggcagcccccgaacctccactggggttacagcagctaagcgctctgcagccagaacctgggggtgttcctttgcattcaagctggacattttggctcgataggtccctgcctggcgctacagctgccgagtgcgcctctaatctgaagaagatttacacagtgcagactgtccagatattttggagcgtgtacaacaacatcccccccgtgacatccttacctctgcgctgcagttaccacttgatgaggggcgagagaaggcctctctgggaagaggaatctaacgccaaaggtggagtgtggaagatgaaagtacccaaggactcaactagcaccgtttggaaagaacttctcctggccaccattggcgaacagttcacagattgcgctgccgccgatgatgaagtgatcggtgtgagcgtgagcgtccgtgaccgtgaggatgtggtgcaggtgtggaacgtaaatgcctcacttgtcggcgaggccaccgtattagaaaaaatttatgagttgttaccacacattacattcaaggcggtgttttacaaacctcatgaggaacaccacgcatttgaaggcggcaggggaaagcactag

SEQ ID NO: 49602 - DNA, 675 bp, Artificial Sequence
  derived and/or modified sequence
atggctctgcctcccgcagcggctccacctgccggtgctcgggaaccacctggtagcagagctgcagcagctgctgcagctccagagcctccgctcggtctgcaacagctgtctgcgttgcaaccagaacccggaggggtgccactgcattctagttggactttttggcttgaccggagtctgcctggtgcgactgcagcagagtgtgcaagcaacctgaagaagatctacaccgttcagaccgtacagatattttggagcgtatacaataacataccacccgtgacatctctgcccctgaggtgttcttaccacctgatgcgcggagaacggaggcctttgtgggaggaagagagcaacgctaaggggggagtgtggaaaatgaaggtacctaaggattctacttctactgtgtggaaggagctgctcctggctaccattggagagcagttcactgattgtgctgcagccgacgacgaggtcatcggagtaagtgtgtccgttagagatagggaagatgtggtgcaggtctggaatgtcaatgcatcattagtgggcgaggctactgttctcgagaaaatctacgagctgctgccccacataacctttaaggcggttttttataaaccacatgaggaacatcatgcattcgagggagggagaggaaaacactag

SEQ ID NO: 49603 - DNA, 675 bp, Artificial Sequence
  derived and/or modified sequence
atggccctgccccccgccgccgccccccccgccggcgccagagagccccccggcagcagagccgccgccgccgccgccgcccccgagccccccctgggcctgcagcagctgagcgccctgcagcccgagcccggcggcgtgcccctgcacagcagctggaccttctggctggacagaagcctgcccggcgccaccgccgccgagtgcgccagcaacctgaagaagatctacaccgtgcagaccgtgcagatcttctggagcgtgtacaacaacatcccccccgtgaccagcctgcccctgagatgcagctaccacctgatgagaggcgagagaagacccctgtgggaggaggagagcaacgccaagggcggcgtgtggaagatgaaggtgcccaaggacagcaccagcaccgtgtggaaggagctgctgctggccaccatcggcgagcagttcaccgactgcgccgccgccgacgacgaggtgatcggcgtgagcgtgagcgtgagagacagagaggacgtggtgcaggtgtggaacgtgaacgccagcctggtgggcgaggccaccgtgctggagaagatctacgagctgctgccccacatcaccttcaaggccgtgttctacaagccccacgaggagcaccacgccttcgagggcggcagaggcaagcactag

SEQ ID NO: 49604 - protein, 365 aa, Artificial Sequence
  derived and/or modified sequence
MRPQDSTGVAELQEPGLPLTDDAPPGATEEPAAAEAAGAPDRGRCWLCLSSPCCSRTEPEAKKKAPCPGLGLFYTLLSAFLFSVGSLFVKKVQDVHAVEISAFRCVFQMLVVIPCLIYRKTGFIGPKGQRIFLILRGVLGSTAMMLIYYAYQTMSLADATVITFSSPVFTSIFAWICLKEKYSPWDALFTVFTITGVILIVRPPFLFGSDTSGMEESYSGHLKGTFAAIGSAVFAASTLVILRKMGKSVDYFLSIWYYVVLGLVESVIILSVLGEWSLPYCGLDRLFLIFIGLFGLGGQIFITKALQIEKAGPVAIMKTMDVVFAFIFQIIFFNNVPTWWTVGGALCVVASNVGAAIRKWYQSSK

SEQ ID NO: 49605 - DNA, 1098 bp, Artificial Sequence
  derived and/or modified sequence
atgagaccccaggacagcaccggcgtggccgagctgcaggagcccggcctgcccctgaccgacgacgccccccccggcgccaccgaggagcccgccgccgccgaggccgccggcgcccccgacagaggcagatgctggctgtgcctgagcagcccctgctgcagcagaaccgagcccgaggccaagaagaaggccccctgccccggcctgggcctgttctacaccctgctgagcgccttcctgttcagcgtgggcagcctgttcgtgaagaaggtgcaggacgtgcacgccgtggagatcagcgccttcagatgcgtgttccagatgctggtggtgatcccctgcctgatctacagaaagaccggcttcatcggccccaagggccagagaatcttcctgatcctgagaggcgtgctgggcagcaccgccatgatgctgatctactacgcctaccagaccatgagcctggccgacgccaccgtgatcaccttcagcagccccgtgttcaccagcatcttcgcctggatctgcctgaaggagaagtacagcccctgggacgccctgttcaccgtgttcaccatcaccggcgtgatcctgatcgtgagaccccccttcctgttcggcagcgacaccagcggcatggaggagagctacagcggccacctgaagggcaccttcgccgccatcggcagcgccgtgttcgccgccagcaccctggtgatcctgagaaagatgggcaagagcgtggactacttcctgagcatctggtactacgtggtgctgggcctggtggagagcgtgatcatcctgagcgtgctgggcgagtggagcctgccctactgcggcctggacagactgttcctgatcttcatcggcctgttcggcctgggcggccagatcttcatcaccaaggccctgcagatcgagaaggccggccccgtggccatcatgaagaccatggacgtggtgttcgccttcatcttccagatcatcttcttcaacaacgtgcccacctggtggaccgtgggcggcgccctgtgcgtggtggccagcaacgtgggcgccgccatcagaaagtggtaccagagcagcaagtag

SEQ ID NO: 49606 - DNA, 1098 bp, Artificial Sequence
  derived and/or modified sequence
atgcgaccacaggattcgaccggtgtggctgaattgcaggagcccggcctgcctctgacagacgatgcacctcctggcgctactgaagaaccagccgctgccgaggcagccggggcaccagacagaggacgttgctggctttgtctcagcagcccgtgctgttctcgaacagagcctgaggccaagaaaaaggcaccatgtcccgggctgggcctgttttatacgctactttccgcattcctgtttagtgtcgggtccctgttcgtcaaaaaagtccaggatgtccacgctgtggagatttccgcatttaggtgcgttttccagatgctggttgttatcccctgcctcatctaccgcaaaacaggcttcatcggtcccaagggtcaacggatcttcctaatattgcggggggttctggggtccactgcaatgatgttgatttactacgcctatcaaaccatgagtcttgccgatgcaactgttattacattttccagcccagtgttcacttcaattttcgcctggatttgccttaaggagaaatacagcccatgggacgccctgtttaccgtgtttaccatcaccggagtgatcctgattgtcagaccccctttcctgttcggatccgacaccagcggcatggaagagtcatattctgggcacttgaaggggacctttgctgcaatcggcagtgctgtgtttgcagctagcaccctagtgattcttaggaagatgggaaagtcagtggactatttcttgtctatttggtactacgtagttctcggattggttgagagcgtaatcatcctctcagtgcttggggagtggtccctcccatattgcggcctcgaccgcttgtttctcatcttcattggtctgttcggccttggtgggcagatcttcatcacgaaggcgctgcaaatcgaaaaggctggaccagtggctataatgaagacaatggatgtggtgtttgcatttatttttcagataatctttttcaataacgtgccaacatggtggactgtcggcggggcgctgtgtgtggtcgcgagcaacgtgggcgccgcaatccgaaaatggtatcagtccagcaaatag

SEQ ID NO: 49607 - DNA, 1098 bp, Artificial Sequence
  derived and/or modified sequence
atgaggccccaggacagcactggagtggccgagctgcaggagcccggcctgcccctgacagatgatgcccctcctggggccacagaggagcctgctgctgctgaggccgccggggccccagaccggggccgctgctggctgtgcctgagcagcccctgctgcagcaggacagagcctgaggccaagaagaaggccccctgccccggcctgggcctcttctacaccctgctgagcgccttcctgttctctgtgggcagcctgtttgtgaagaaggtgcaggatgtgcatgctgtggagatcagcgccttccgctgtgtgttccagatgctggtggtgatcccctgcctgatctacaggaagacaggcttcatcggccccaagggccagaggatcttcctgatcctgcggggcgtgctgggcagcacagccatgatgctgatctactatgcctaccagaccatgagcctggctgatgccaccgtcatcaccttcagcagccctgtgttcaccagcatctttgcctggatctgcctgaaggagaagtacagcccctgggatgccctcttcaccgtcttcaccatcactggagtcatcctgattgtgcggccccccttcctgtttggaagtgacaccagcggcatggaggagagctacagcggccacctgaagggcacctttgctgccatcggcagcgctgtgtttgctgccagcaccctggtgatcctgaggaagatgggcaagtctgtggactacttcctgagcatctggtactacgtggtgctgggcctggtggagagcgtcatcatcctgtctgtgctgggggagtggagcctgccctactgcggcctggacaggctcttcctgatcttcatcggcctgtttggcctgggcggccagatcttcatcaccaaggccctgcagatcgagaaggccggccctgtggccatcatgaagaccatggatgtggtgtttgccttcatcttccagatcatcttcttcaacaacgtgcccacctggtggacagtgggcggggccctgtgtgtggtggccagcaatgtgggcgccgccatcaggaagtggtaccagagcagcaagtag

SEQ ID NO: 49608 - DNA, 1098 bp, Artificial Sequence
  derived and/or modified sequence
atgcggccccaggacagcaccggcgtggccgagctgcaggagcccgggcttccattaactgatgacgctccgcctggcgcaactgaggaaccagccgccgccgaagctgcaggggctccggacagaggacgctgctggctttgtctgtcgagtccgtgctgttcacggaccgaaccagaggcaaagaaaaaggcaccctgccccggtctgggtctgttctatactctcctgtctgccttcttattctccgtggggtccctctttgtgaaaaaagttcaggacgtgcacgcagttgagatttctgccttcaggtgcgtctttcagatgctcgtggtgattccttgtctgatctacaggaagacgggcttcattggacccaaagggcagagaatcttcctcatccttcgaggcgtacttggcagcacagcaatgatgttgatatactatgcgtaccagactatgtccctggctgatgccactgtgattaccttctcctctcctgtatttacgtccatttttgcctggatttgccttaaagagaaatactctccttgggacgcactgttcacagtcttcacaatcacaggggtaattctcattgtgaggccccctttccttttcggtagcgacaccagtggaatggaagaatcctatagcggacacctgaagggaacgtttgcggctattggtagcgcggtctttgccgcctcaactttggtcatactccgaaaaatgggtaaatccgtagattacttcctgtcaatatggtattacgtcgttctggggctggtggaatcggtgatcattctgtctgttttaggggaatggtccctgccatactgcggactggataggttatttcttatcttcattgggctgtttggactgggaggccaaatttttattacaaaagccctccagattgagaaagccggccccgtggccattatgaagacaatggacgtggttttcgcatttattttccagatcatctttttcaataacgtccctacatggtggacggtgggcggtgctctttgcgtggtcgcctccaatgtcggtgctgccattagaaaatggtaccaaagcagcaaatag

SEQ ID NO: 49609 - DNA, 1098 bp, Artificial Sequence
  derived and/or modified sequence
atgcggcctcaggactccaccggagtagcagagctgcaagaacccggactaccgctcacagatgacgctccacccggtgcaactgaagaacctgcggcagccgaggcggctggggcaccggaccgaggaagatgttggctttgcctaagctccccatgttgttctaggacggaaccggaggccaagaagaaggccccatgtcccggacttggacttttttacactttactctccgcgtttctgttttctgtcggctctctgtttgtaaagaaggttcaagatgtccatgccgtagagatctctgcattccgatgcgtgttccaaatgctggtggtgattccctgtctgatataccggaagaccgggttcattgggcctaaagggcagcgcatttttctgatcctccggggagttctgggatcaactgcgatgatgctgatatattatgcataccaaaccatgtccctcgccgacgctacagtgatcactttctcatccccagtgttcacctcgattttcgcgtggatatgcctgaaggaaaaatactctccctgggacgctctgtttaccgtgttcaccattactggggtaattcttatcgtccgaccaccgtttctgttcggttccgatacctccggtatggaggagagctattccggacacctcaaagggaccttcgctgccattggttctgccgtgttcgccgcaagcaccctggtgatcctccggaaaatggggaagagcgtggattatttcttgagcatatggtattatgtggtgctgggcctcgtggaatccgtcatcatcttgagcgtgctgggcgaatggtccttaccgtactgtggtcttgaccggcttttcctaatattcatcggactgttcgggctcggcggacaaatattcataacgaaagccttacagatcgagaaggcaggacccgtagccattatgaaaactatggacgtggttttcgcttttatctttcagataatttttttcaataatgttcctacgtggtggacggtgggaggcgctctgtgcgtggtggcctctaatgtgggcgctgccattcggaaatggtatcagtcctcgaagtag

SEQ ID NO: 49610 - DNA, 2402 bp, Artificial Sequence
  derived and/or modified sequence
agcccaggcgctgctgctggcgccagacggcaccggccgctggtagagcgcgtgccgcgagatgcggcctcaggacagcaccggggtcgcggagctccaggagcccgggctgccgctaacggacgatgcacccccgggcgccactgaggagccggcggccgccgaggcagctggggcgccagaccgcggtaggtgctggctctgcctttcctcgccgtgttgctcccgcaccgagccggaagccaagaagaaagcaccctgtcctggacttggcttgttttacacattattgtctgccttccttttctcagtgggctctttatttgttaaaaaagtgcaagacgtccatgctgtagagattagtgcgtttcgatgtgtgttccaaatgctagttgttatcccttgcttaatatacagaaaaactgggtttataggcccaaaaggtcaacgaattttcctcattctcagaggagtccttggttctaccgccatgatgcttatatactatgcttaccagacaatgtccctcgctgatgccacagttatcacgtttagcagtccagtgtttacgtccatatttgcttggatatgtctcaaggaaaaatatagcccttgggatgctcttttcaccgtgttcacaatcactggagtgatccttatcgtgagaccaccatttttgtttggttccgacacttcggggatggaagaaagctattcaggccaccttaagggaacattcgcagcaattggaagtgccgtatttgctgcatcgactctagttatcctaagaaaaatgggaaaatctgtggactactttctgagcatttggtattatgtagtacttggcctcgttgaaagtgtcatcatcctctctgtattaggagagtggagtctgccttactgtgggttggacaggctatttctcatattcattgggctctttggtttggggggtcagatatttatcacaaaagcacttcaaatagaaaaagcagggccagtagcaataatgaagacaatggatgtggtctttgcttttatctttcagattattttctttaataatgtgccaacgtggtggacagtgggtggtgctctctgcgtagtagccagtaatgttggagcggccattcgtaaatggtaccaaagttccaaatgaagcatcattgctgaaatacatatttttttcaagtacaccatcacctaattcacatacagcatacgcacacatctggaaaatctgcattttcttcattggttgtatttaataaattgcctaaagtaccatttttgaatatagtatgtctttagttaagaatagctagtctgtttggtgtaacaattttttggtagctttggttttggttttggttttttttgttgttgttgttggggtcaagttggtgagaggagagctcattgtttgaagaaaaaccaaaacattttatggctagtaatatttatgtaatttttaaaatgtatttttggtactgatgggatatgggtggggaggctattttagatattcttttagcagtgtagagcctaagaaacttggttctactaccatgatctttataaactatgccttccagacaattgataatgctgctataattagtattatgttgataattcatttgcaaccttattctatttaggaggatgaagttgaagcttagaataggtgcctgcttaatggtgttaataatacaaatgaattggccttattttcaaggattttataaatgattatcatacttgtaactcatatttgtgccttttcattttaatgctggaatttttattatgtcacctctaaaacacttaaattgccaaatttggctagtagttttgtttcagtggcattagcaactgcagctagcatactataattttaattgtcctcacttttttttgaaactgcactaaatttttcttaacattccaagatttcagatctctaaatcacaaagagaaatcttggcatgaccagtgtgcacgtttccatcctgaagtgttttctcttcactagaaatgtgattttctataaattccccttgaatttatagtgtgatgccaaataaaattttctcaggatcttattaggttgaaccatatgtaattgccaagattttactattttaacttagaaaaaccatcgtttcatatgattcaccctaatagatacctccattattctctaaatgaaatagaagactttggagtatatgtttttaaagtaattttttaaaatatggtaatgtattaaacttatttttatagttatgaaattatgtgtaataatgctttatgttatacattaaatgtaaagacttgtgaatccatgtttgattgactttcatagtttcctgcattgaaataaaatcactatgaattct

SEQ ID NO: 49611 - protein, 339 aa, Artificial Sequence
  derived and/or modified sequence
MSSEMLPAFIETSNVDKKQGINEDQEESQKPRLGEGCEPISKRQMKKLIKQKQWEEQRELRKQKRKEKRKRKKLERQCQMEPNSDGHDRKRVRRDVVHSTLRLIIDCSFDHLMVLKDIKKLHKQIQRCYAENRRALHPVQFYLTSHGGQLKKNMDENDKGWVNWKDIHIKPEHYSELIKKEDLIYLTSDSPNILKELDESKAYVIGGLVDHNHHKGLTYKQASDYGINHAQLPLGNFVKMNSRKVLAVNHVFEIILEYLETRDWQEAFFTILPQRKGAVPTDKACESASHDNQSVRMEEGGSDSDSSEEEYSRNELDSPHEEKQDKENHTESTVNSLPH

SEQ ID NO: 49612 - protein, 206 aa, Artificial Sequence
  derived and/or modified sequence
MSSEMLPAFIETSNVDKKQGINEDQEESQKPRLGEGCEPISKRQMKKLIKQKQWEEQRELRKQKRKEKRKRKKLERQCQMEPNSDGHDRKRVRRDVVHSTLRLIIDCSFDHLMVLKDIKKLHKQIQRCYAENRRALHPVQFYLTSHGGQLKKNMDENDKGWVNWKDIHIKPEHYSELIKKEDLIYLTSDSPNILKELDESKAYVIG

SEQ ID NO: 49613 - protein, 200 aa, Artificial Sequence
  derived and/or modified sequence
MSSEMLPAFIETSNVDKKQGINEDQEESQKPRLGEGCEPISKRQMKKLIKQKQWEEQRELRKQKRKEKRKRKKLERQCQMEPNSDGHDRKRVRRDVVHSTLRLIIDCSFDHLMVLKDIKKLHKQIQRCYAENRRALHPVQFYLTSHGGQLKKNMDENDKGWVNWKDIHIKPEHYSELIKKEDLIYLTSDSPNILKELDES

SEQ ID NO: 49614 - DNA, 1020 bp, Artificial Sequence
  derived and/or modified sequence
atgagcagcgagatgctgcccgccttcatcgagaccagcaacgtggacaagaagcagggcatcaacgaggaccaggaggagagccagaagcccagactgggcgagggctgcgagcccatcagcaagagacagatgaagaagctgatcaagcagaagcagtgggaggagcagagagagctgagaaagcagaagagaaaggagaagagaaagagaaagaagctggagagacagtgccagatggagcccaacagcgacggccacgacagaaagagagtgagaagagacgtggtgcacagcaccctgagactgatcatcgactgcagcttcgaccacctgatggtgctgaaggacatcaagaagctgcacaagcagatccagagatgctacgccgagaacagaagagccctgcaccccgtgcagttctacctgaccagccacggcggccagctgaagaagaacatggacgagaacgacaagggctgggtgaactggaaggacatccacatcaagcccgagcactacagcgagctgatcaagaaggaggacctgatctacctgaccagcgacagccccaacatcctgaaggagctggacgagagcaaggcctacgtgatcggcggcctggtggaccacaaccaccacaagggcctgacctacaagcaggccagcgactacggcatcaaccacgcccagctgcccctgggcaacttcgtgaagatgaacagcagaaaggtgctggccgtgaaccacgtgttcgagatcatcctggagtacctggagaccagagactggcaggaggccttcttcaccatcctgccccagagaaagggcgccgtgcccaccgacaaggcctgcgagagcgccagccacgacaaccagagcgtgagaatggaggagggcggcagcgacagcgacagcagcgaggaggagtacagcagaaacgagctggacagcccccacgaggagaagcaggacaaggagaaccacaccgagagcaccgtgaacagcctgccccactag

SEQ ID NO: 49615 - DNA, 1020 bp, Artificial Sequence
  derived and/or modified sequence
atgagctcagaaatgctgccggcctttatagaaacaagcaatgtggataaaaagcagggaataaacgaagaccaggaggaaagtcagaagccccgtctgggtgaaggctgtgaacctattagcaagaggcagatgaagaagctgattaaacagaagcaatgggaagagcaacgggaactcaggaaacagaagagaaaagagaaacggaagcggaagaaactggagcggcagtgtcagatggaacccaattccgacgggcacgacagaaaacgggtccggcgggatgtagttcattccaccctgcgactcataattgattgcagctttgatcacctcatggtcctcaaggatatcaaaaaactgcacaaacagatccaacgatgttacgcggagaatcgccgcgcattgcacccagtacagttctacctgaccagccatggtggccagctgaaaaagaatatggacgagaacgataagggttgggtaaattggaaggacatccacatcaaaccagaacactattctgagctcatcaagaaagaggatctgatatatctgacatcagacagtcccaatatattgaaagaactagatgaatccaaagcctatgtgattggaggcctggtagaccataaccaccacaaaggtttgacatacaagcaagcgtccgattacggcatcaaccatgcccagctgcccctcggcaacttcgtgaaaatgaactccagaaaggttctggcagtgaaccacgtattcgagataattctggaatacctggagactcgagactggcaggaggctttttttacgatcttgccacagcgtaaaggggccgtgccgactgataaagcatgtgaaagcgccagccacgataaccagagcgtgagaatggaggaaggaggaagtgactcggacagttctgaggaggaatactcacggaacgagcttgactcccctcatgaagagaaacaggataaggaaaaccataccgagtccactgtcaactcccttccgcactag

SEQ ID NO: 49616 - DNA, 1020 bp, Artificial Sequence
  derived and/or modified sequence
atgagttctgagatgctgcctgcttttatcgaaacatcaaacgtggataagaaacagggcattaacgaggaccaggaagagagtcagaaaccaagactcggtgaaggctgtgaacctatatcgaaacgtcaaatgaagaaactgataaagcagaaacagtgggaagagcagcgggagcttcggaaacagaagcggaaggaaaagcggaaacggaaaaagctcgagaggcagtgccagatggagcctaattcagatggccatgaccgaaagcgggtgaggcgagatgtggttcactcaactttgcggttgattatagactgttcatttgatcacctaatggtcctgaaagatatcaaaaagctccataaacagatccaacgctgctacgccgagaataggcgggccttacatccagtccagttttatctcacgagccatgggggtcagctgaaaaagaacatggacgagaatgacaaggggtgggtcaactggaaagacatccacatcaagccagagcactactcggaactcatcaagaaagaggacctgatttatctgacaagtgattctccaaacatcctcaaagagctggacgagagcaaggcttacgtgattggcggattggtagatcataatcatcacaagggccttacttacaagcaagcatctgactacggtattaaccacgcccaactgcctttaggaaatttcgttaagatgaactccaggaaggtgctggccgttaatcacgttttcgaaattatactggagtacctagaaacaagagactggcaagaggccttcttcaccatcttaccccagaggaagggagccgtgcctacagacaaagcatgcgagagcgcctcccatgacaatcagtctgtgaggatggaggaaggagggagcgactcggatagtagcgaggaggaatacagccggaacgaactagactcccctcatgaggagaaacaggataaggaaaatcacacggagtcaactgtaaattccttgcctcactag

SEQ ID NO: 49617 - DNA, 1020 bp, Artificial Sequence
  derived and/or modified sequence
atgagcagcgaaatgctgcctgctttcatcgagacttcaaacgtggataagaagcaggggattaacgaggaccaggaggagtcccagaaaccacgcctgggcgagggctgtgagcctatctctaaacgccagatgaaaaaactaattaaacagaagcagtgggaggagcagcgagaactgcgcaagcaaaaacggaaagaaaagcgaaagcggaagaaactggaacggcaatgtcaaatggagccaaattcggacgggcatgaccggaaacgagtgagacgggatgtggtccattccacactcaggctcatcattgactgcagctttgaccacctcatggtgctaaaagatatcaagaaacttcacaagcagattcagagatgctatgctgagaatcgtcgcgccctgcatccagttcagttctacttaacctcacatggggggcaactcaagaagaacatggatgagaacgataagggatgggtcaactggaaggacatccacattaagcctgaacactatagcgagcttatcaaaaaggaagacttgatttacctgacctctgactcaccgaatattctgaaagaactagacgagtcaaaggcatacgttattggaggtctggtggaccataatcatcacaagggactgacctataagcaggcgtctgactatgggatcaatcatgcgcaattgccactaggtaactttgtgaagatgaacagcagaaaggtcctcgcagtgaatcacgtgttcgagataattttggaatatttggaaacaagggactggcaggaggctttttttacaatcttgccacagcgaaagggcgctgtccccaccgacaaggcctgtgagtccgcctcccatgataatcaatctgtgaggatggaggaaggaggttccgactctgactcttcggaagaggaatattcccgtaatgagctcgattcccctcatgaagagaagcaagataaagaaaaccataccgagagtaccgttaacagcctgccacactag

SEQ ID NO: 49618 - DNA, 1020 bp, Artificial Sequence
  derived and/or modified sequence
atgagcagcgagatgctgcctgccttcatcgagaccagcaatgtggacaagaagcagggcatcaatgaagaccaggaggagagccagaagccccggctgggggagggctgtgagcccatcagcaagaggcagatgaagaagctgatcaagcagaagcagtgggaggagcagcgggagctgaggaagcagaagaggaaggagaagaggaagaggaagaagctggagcggcagtgccagatggagcccaacagtgatggccatgacaggaagagggtgagaagagatgtggtgcacagcaccctgcggctcatcatcgactgcagctttgaccacctgatggtgctgaaggacatcaagaagctgcacaagcagatccagcgctgctacgcagaaaatagaagagccctgcaccctgtgcagttctacctgaccagccacggcggccagctgaagaagaacatggatgaaaatgacaagggctgggtgaactggaaggacatccacatcaagccagagcactacagcgagctgatcaagaaggaggacctgatctacctgaccagtgacagccccaacatcctgaaggagctggatgagagcaaggcctacgtgattggaggcctggtggaccacaaccaccacaagggcctgacctacaagcaggccagtgactatggcatcaaccacgcccagctgcccctgggcaactttgtgaagatgaacagcaggaaggtgctggccgtgaaccacgtgtttgagatcatcctggagtacctggagacccgggactggcaggaggccttcttcaccatcctgccccagaggaaaggagctgtgcccacagacaaggcctgtgagagcgccagccatgacaaccagagcgtgaggatggaggagggcggcagtgacagcgacagcagcgaggaggagtacagcagaaatgagctggacagcccccatgaggagaagcaggacaaggagaaccacacagagagcacagtgaacagcctgccccactag

SEQ ID NO: 49619 - DNA, 1020 bp, Artificial Sequence
  derived and/or modified sequence
atgagcagcgagatgctgcccgccttcatcgagaccagcaacgtggacaaaaaacagggtatcaacgaggaccaggaagaatcccagaagcccagactgggcgagggctgtgagccaatcagtaaacggcagatgaagaagctgatcaagcaaaaacagtgggaagaacagagagaactgcgcaagcaaaagcgtaaggaaaaaaggaagaggaagaagctggaaaggcagtgccaaatggaacctaactctgacggacacgaccgcaagagggtccgccgtgacgttgttcatagtactctgagactcattattgactgcagcttcgaccacctcatggtgttaaaagacattaaaaaactccacaagcagatccagagatgttacgctgagaacaggcgagccctccacccagttcagttctatctcacctctcacgggggacaactgaagaaaaatatggacgagaacgacaaaggctgggtgaattggaaggacattcacattaaaccagagcattactcagagctgatcaaaaaggaagacctaatatatctgacaagcgatagtcctaatatcctgaaggagctggatgaatctaaggcctacgtaatcggcggcctagtggatcacaatcaccacaaaggtctgacatacaagcaggcgtccgattatgggataaatcatgcccagctgcccctgggcaactttgtgaaaatgaactcacggaaggtgcttgcagtgaatcacgttttcgagatcattcttgagtacctggagacccgcgactggcaggaggcattttttactattttgccccagaggaagggggccgttcccacagacaaggcatgcgaaagcgcctcccacgataaccagtcagttaggatggaggagggaggcagtgactcagactccagcgaggaggaatactccagaaacgagctagacagtccgcacgaggaaaagcaggacaaagagaaccacactgagagtacagtgaactcccttccccactag

SEQ ID NO: 49620 - DNA, 1020 bp, Artificial Sequence
  derived and/or modified sequence
atgagcagcgagatgctgcccgccttcatcgagaccagcaacgtggacaagaagcaggggatcaatgaagaccaggaggagtcacagaagcccagactcggggaaggatgtgagccaatttcaaagagacagatgaaaaagttgataaagcaaaagcaatgggaggagcaaagggaactgcggaaacagaagcgcaaagaaaagcgaaaaagaaagaagctggagcgtcagtgccagatggaacctaatagcgacggccacgatagaaaacgcgtccgcagagacgttgtacactccactctgaggctgattatcgactgctccttcgatcacctgatggtccttaaagatatcaaaaagctacataagcagatccagcgatgttatgccgagaaccggcgggccctccaccccgttcagttttacttgaccagccatggagggcaattgaagaaaaacatggacgagaacgacaaaggttgggtgaactggaaagatatccacattaagccagaacattattctgagctaattaaaaaagaagacctgatatacctgacgtcagattcacccaatattttaaaagagctggacgaaagcaaagcatacgtgattggaggcctggtggatcataaccaccataaaggacttacctacaaacaagcaagcgattacggcattaatcacgcccaactcccactgggcaacttcgtgaagatgaactctcgcaaagtgcttgcagtcaaccatgtattcgagatcatacttgagtatctggagacccgcgactggcaggaagcgttcttcaccatattgccccaacgtaagggggcagtgccaaccgacaaggcatgtgagtctgcctcccacgataatcagagcgtacggatggaggagggaggctccgattccgatagctccgaggaggagtacagccggaatgaactggacagcccacatgaagagaaacaggacaaagaaaaccatacggagtcaacagttaacagcttgccacactag

SEQ ID NO: 49621 - DNA, 1020 bp, Artificial Sequence
  derived and/or modified sequence
atgagcagcgagatgctgcccgccttcatcgagaccagcaacgtggacaaaaagcaagggattaatgaggatcaggaggagagtcagaaacccaggctgggtgaaggctgcgagcccatttccaaacggcaaatgaaaaagctgataaaacaaaagcagtgggaagagcaaagagagctgaggaagcaaaagcgcaaagaaaaacgcaagcgtaagaagctcgagcgacagtgccagatggagccaaatagtgacggtcatgaccggaaaagggtgagaagggacgtggttcactctacactgaggctgattatcgactgtagcttcgaccacctgatggtcctcaaagacattaagaaactgcacaagcagatccaaagatgctacgccgagaaccgacgtgctctccacccggttcagttttatttaactagccacggggggcaactgaagaagaacatggatgagaacgacaagggatgggttaactggaaggatattcacattaaacccgagcactatagcgaattaatcaagaaggaggacctcatttatctgacctccgatagtcctaatatattgaaggagctcgacgagtcgaaagcctatgttatcggaggactcgtcgatcacaaccaccataagggtctaacgtacaaacaggcatcagactacgggatcaaccatgcgcagctgccactcggcaacttcgtgaaaatgaattccaggaaggttctggctgtgaaccacgtctttgaaatcattctggaatatctggagacgagggactggcaagaagccttcttcacaatcctcccccagcgcaaaggagcggtccctactgacaaagcatgcgagagtgcatcgcacgataaccagagtgttagaatggaagagggagggagtgattctgatagctctgaagaggaatattcgagaaacgaacttgatagccctcatgaggagaaacaggataaggaaaaccacaccgaatcaaccgtaaactccctaccacactag

SEQ ID NO: 49622 - DNA, 1020 bp, Artificial Sequence
  derived and/or modified sequence
atgagctcagagatgctccctgccttcatcgaaaccagcaatgtggacaaaaaacagggaatcaacgaggatcaggaagagtcacagaagccccgtctgggcgaggggtgtgaacctatttccaaaaggcagatgaagaaactcatcaagcagaaacagtgggaagagcaacgcgaactccgtaagcagaagaggaaagagaaaagaaaacgcaagaagctcgaaagacagtgccaaatggagcctaatagcgatgggcacgataggaaaagagttcgccgagacgtcgttcactctaccttgagactgattatcgattgttctttcgaccacctcatggtgctgaaagacattaagaagctgcacaagcaaatacagcggtgttacgcagagaaccggcgagcccttcacccagtgcagttctacctcaccagccatgggggacaactgaagaagaatatggatgagaatgataaagggtgggtgaactggaaggacattcatatcaaaccagaacattattcagagctgataaaaaaggaagacctcatctacctgacgagcgactcccccaatatcttgaaagagcttgacgaatcaaaggcctacgtcatcgggggtctagtggatcacaatcatcacaagggcctgacctataagcaagcaagcgactatgggatcaaccacgcgcagctccccttaggaaacttcgtcaagatgaacagcaggaaagtgctcgcggtgaaccacgtattcgaaatcattctggagtaccttgaaaccagagactggcaagaagctttttttactattctgccccagcgcaagggggctgtgccgactgacaaagcgtgtgagtcagctagtcacgacaatcaatcagtgagaatggaggaggggggaagcgactcagactcaagcgaagaagaatactctcgtaacgagttagactcaccccatgaggaaaagcaggataaagaaaatcacacagagtctaccgtaaactcactgccacactag

SEQ ID NO: 49623 - DNA, 1020 bp, Artificial Sequence
  derived and/or modified sequence
atgtcttccgaaatgttaccagccttcatagaaaccagcaatgtggacaagaagcagggaatcaatgaggaccaagaggaatcgcagaagccaaggctgggggaaggctgtgaacccatctcaaaacgtcagatgaaaaagctgattaagcagaaacagtgggaagagcagcgcgagctaaggaaacagaagagaaaagaaaagaggaaacggaaaaaactggagaggcagtgccaaatggagcctaatagcgatggacacgatagaaaacgtgtcaggcgagacgtggttcattccactctacgtctaatcatagattgcagctttgatcacctgatggttctcaaggatataaaaaaattacacaagcaaatccaaaggtgttacgcagagaatagaagagcactccacccggtccagttctacttgacttctcacgggggacagctcaaaaagaacatggacgaaaacgataaagggtgggtgaactggaaggacatccatatcaagccggaacattactctgagctaatcaaaaaggaggatctaatttacctaaccagtgacagccccaatatcctaaaggagttggacgagagcaaggcctatgtgatcggaggcctcgtagatcacaatcaccataagggccttacgtacaaacaggcatccgactatggcatcaatcacgcccagctaccgctcggtaactttgtaaagatgaatagtaggaaagtgctggctgtgaaccatgttttcgaaattattctggagtatctcgaaacgagggactggcaggaagctttctttacaatcttgccacaacggaaaggcgcagtgccaacagataaggcttgcgaatcagccagccacgataaccaatctgtgagaatggaagaggggggttctgattccgacagtagtgaggaagagtactccaggaatgagctggactctccacacgaggaaaagcaagacaaagagaaccacaccgagtccactgtcaactcgctaccgcactag

SEQ ID NO: 49624 - DNA, 1020 bp, Artificial Sequence
  derived and/or modified sequence
atgtcctccgaaatgttgcctgcattcattgagacgtctaacgtggacaagaaacaaggcatcaatgaggaccaggaagagagtcagaagcctcgcctgggggaggggtgcgaacctatctccaaacggcaaatgaagaaactgattaagcagaagcaatgggaagagcagcgcgaactgcgcaaacaaaagcggaaagagaaaagaaagagaaaaaaactggagcgtcagtgccaaatggaaccgaactccgatggccacgaccgaaagagggttagacgtgacgtagtccattccacattgagactcattatagattgtagtttcgatcacttaatggttctcaaagacatcaagaagctgcataagcagatccagcgatgttacgcagaaaaccgacgagcgcttcaccccgtgcagttctacctgacgtcgcacggaggccagctcaaaaagaatatggacgaaaatgacaagggatgggttaattggaaggacatccatattaagcctgaacattacagcgagcttataaagaaggaggaccttatttatttgacctcagactcgccaaacattttgaaagaactcgacgagtcaaaagcttacgtgatcggtggcctggtagaccacaatcaccacaaaggcctgacttataagcaggccagtgactacgggatcaaccacgcccagctaccgctgggcaatttcgttaagatgaattcacgaaaagtcctggcagtgaaccatgtcttcgagattatactcgagtatctggaaactagggattggcaagaggcgttttttaccatcctcccccagcgcaagggggcagtgcctaccgacaaggcgtgcgaatccgcttctcacgacaaccagagtgtgcgaatggaggagggcggatccgactccgatagcagcgaggaggaatacagcaggaatgagttggactcaccccatgaggaaaagcaagacaaggaaaaccacacagagagtaccgtaaacagtctcccgcattag

SEQ ID NO: 49625 - DNA, 3694 bp, Artificial Sequence
  derived and/or modified sequence
gtttgctggctgggagcctagaagggatagtgggcgaggctccgccccgtggtggggcgctttccgtcggcgtgtgttttggggttgccatcggcccgtagtatgtgaaaagtgagtttgcaaagaatcagtgggaaatctgtactctaaagggccggaaagcgtgttatggccctgccacttcgtggctagagaccgtgggctttacctctttaaagctgccttacctcatttttcctgcaaagggctgacgtcgctgaactctctgaaatgtagagagcccgaggggaagttgctgcagaggcaccaaataatgtcatctgaaatgttgccagcatttattgaaacttctaatgttgacaaaaagcaaggcataaatgaagatcaagaggagagccagaagccaagattaggtgaagggtgtgaaccaatatctaaacgacaaatgaaaaaactaataaaacagaaacaatgggaagagcaacgggaactccgcaaacaaaagcgaaaagaaaaacgcaagaggaaaaaattagagcgacaatgtcaaatggaaccaaactcagatggacatgacagaaaacgtgttcgaagagatgttgttcatagcacccttcgccttattattgactgtagttttgatcacttgatggtattaaaggacattaagaaacttcataagcagattcaacgatgttacgcagaaaaccgacgggcactgcatcctgtgcagttttacttgacaagccacggaggccagctgaaaaagaacatggatgaaaatgacaaaggatgggtcaactggaaggatatccatatcaaaccagagcactatagtgaactcataaagaaagaagacctgatttaccttacgtcagattcacctaatatactgaaggaattagatgaatcaaaggcctatgtgattggaggattagtagatcacaaccatcacaagggactcacatataaacaagcgtcagattatggaatcaatcatgcacagctcccacttggaaattttgtgaagatgaatagtcgaaaagttttggcagttaatcatgtgtttgaaattattctggaatacctggaaacaagagactggcaagaagcattttttactatcttgccccaacggaaaggagctgttcccacagacaaagcctgtgaaagtgcttctcatgacaatcagtctgtcaggatggaggaaggtggatcggacagtgattccagtgaggaggaatatagcagaaatgaactagattcaccacatgaagaaaagcaggataaggaaaatcacactgaatctacagtgaactctctgccacactaatgttacctggtttccttttagtttaaggaaaaattaggagaaagtgaggtgctatatagaatattgaaattggaagaacattttattttctcttatttctgttgtgatttttaaaaacttttttttggacctaaataataataaaaaaaaaagccctttaaactttgtaaggaaatattttttgattttgcgtaagaagatttaaatgtgtatgtgattttttttgtttttgtttttaaagcctcagtagtttctagataattttactgtattagtatattttcattttctttcattttatattctttagaatgtgccttctgacctttcagttttttaattttatagtcacatcaacatctttatgatctattgcctatatatctgtgagggcacatattcataaatatactgtcaatctatcagcatttgtgtatggtaggttaccctctatttgcagcttttatgtttaaattagttacttgaaagaatgtagtaattttaggaagaagtatcagtttgatagacttaataattcatttcttttggactatggagcgcatatctgttccttctttatgatgcctttttatggttctgaagtaattactgaagagttgagaatctctttaatgcattttcttaattcttacaatggtgataagttacttcaattataaaattgaattttgcagactaaattattttataaggctgttgctattgaaagatcaattttgtctttacctgcatttaaaatggaacagctcttagcagctgtggtttttttttccatattttttttaaatttgttggctcttaagatgaataaagtttataggtgcatctgcctcctcttctctaagaatatgcatactaatgtttgtttctataaatcaaatacacatgtgataatatgcatgtaaatacataactatcctcatcatgtatggctctcagttcttaattgatgataacatgattgaattgccatatatctgtattacttgtgtgaatggttgtgttgaacacgctaagaacaatttgaattttattaagtacaaaaatccttaacgtttgtatgggaacattggcaagaaagaatagtgtgaaagggaactgttttagtttcctatcagtaattgtacatgcagttaaatgtttaaggtaaaatgattggtctctgtcacagctaaaagatttcagtagccttcattgagtttgggtaaaataagttgctgttcttttgtcttctttttaatatataaaagttatatttaaaaagtatataacatactatatatgttacatactaacatatatatacacaacagaaagtttattggatttagtactgatatttactgtctatttttgttactttgttcttagtaatctattatagttacctattttaaggtaaggtctgtaggcaagatatgtaagtaaagacaagccctacaattttaaaataacaaagcttatgtcttaagttgtattttttcaaaggttcatgtttttctgagtaaatgtggtttattagcatgaaatattatgccttttacttaaattattttatgtaaaatagggcactgtttaattatgaaagggggaaaatcattccaaataagagtttaatttttattaattataaaaaactctgtattagtttcctagatgtgctagaacaaattaccacaaactgggtggctttaaacaacagaaatttattctcttaacagttccagagactaaatgtccagactcacaatgtcccagtgccatgcttcctccttaggccctaggaaagaatacttcctagcctcttcctggcttttggtggttgccagcaatccctgctgttccttagcctatagtggcttgactccaatctcagttttgttgtcaagtggtcttctaccctgtcttctatgtttgtatccgtgtccaaactctttttctagggagaccagcactggattagagttcaccatgatccaatatgacctcatcttgactacatccgcaaagaccctgtctccaaataaggtcacatttacagggtaccatgtgttaggatttgacatatcttttgggggacacaattctacccactacaggcccatatcttatctaggatgttggtggcaagaaggtgaagattactacctcttttgatataactagtttctgaggtatttaaaaatttggttttaaaaatattaagctttttgctcatttgcatgtatacttttctctcaacattgttttggtttatttaggttatttgttaaaacttcagtaaatactaaagttacttgtattagaacataataaaagtagagaattaaactacctaaa

SEQ ID NO: 49626 - DNA, 1638 bp, Artificial Sequence
  derived and/or modified sequence
aactaccgcccctgcctctgggaattgaagtttctgtggaaggaagcgtgagccgtaaccaggccaacccagaaaggctttctttctgagatttcacttccctgtcaactcttcagctcgttgtttttcagaggcaccaaataatgtcatctgaaatgttgccagcatttattgaaacttctaatgttgacaaaaagcaaggcataaatgaagatcaagaggagagccagaagccaagattaggtgaagggtgtgaaccaatatctaaacgacaaatgaaaaaactaataaaacagaaacaatgggaagagcaacgggaactccgcaaacaaaagcgaaaagaaaaacgcaagaggaaaaaattagagcgacaatgtcaaatggaaccaaactcagatggacatgacagaaaacgtgttcgaagagatgttgttcatagcacccttcgccttattattgactgtagttttgatcacttgatggtattaaaggacattaagaaacttcataagcagattcaacgatgttacgcagaaaaccgacgggcactgcatcctgtgcagttttacttgacaagccacggaggccagctgaaaaagaacatggatgaaaatgacaaaggatgggtcaactggaaggatatccatatcaaaccagagcactatagtgaactcataaagaaagaagacctgatttaccttacgtcagattcacctaatatactgaaggaattagatgaatcaaaggcctatgtgattggaggattagtagatcacaaccatcacaagggactcacatataaacaagcgtcagattatggaatcaatcatgcacagctcccacttggaaattttgtgaagatgaatagtcgaaaagttttggcagttaatcatgtgtttgaaattattctggaatacctggaaacaagagactggcaagaagcattttttactatcttgccccaacggaaaggagctgttcccacagacaaagcctgtgaaagtgcttctcatgacaatcagtctgtcaggatggaggaaggtggatcggacagtgattccagtgaggaggaatatagcagaaatgaactagattcaccacatgaagaaaagcaggataaggaaaatcacactgaatctacagtgaactctctgccacactaatgttacctggtttccttttagtttaaggaaaaattaggagaaagtgaggtgctatatagaatattgaaattggaagaacattttattttctcttatttctgttgtgatttttaaaaacttttttttggacctaaataataataaaaaaaaaagccctttaaactttgtaaggaaatattttttgattttgcgtaagaagatttaaatgtgtatgtgattttttttgtttttgtttttaaagcctcagtagtttctagataattttactgtattagtatattttcattttctttcattttatattctttagaatgtgccttctgacctttcagttttttaattttatagtcacatcaacatctttatgatctattgcctatatatctgtgagggcacatattcataaatatactgtcaatctatcagcatttgtgtatggtaggttaccctctatttgcagcttttatgtttaaat

SEQ ID NO: 49627 - DNA, 3516 bp, Artificial Sequence
  derived and/or modified sequence
ctctgggaattgaagtttctgtggaaggaagcgtgagccgtaaccaggccaacccagaaaggctttctttctgagatttcacttccctgtcaactcttcagctcgaggcaccaaataatgtcatctgaaatgttgccagcatttattgaaacttctaatgttgacaaaaagcaaggcataaatgaagatcaagaggagagccagaagccaagattaggtgaagggtgtgaaccaatatctaaacgacaaatgaaaaaactaataaaacagaaacaatgggaagagcaacgggaactccgcaaacaaaagcgaaaagaaaaacgcaagaggaaaaaattagagcgacaatgtcaaatggaaccaaactcagatggacatgacagaaaacgtgttcgaagagatgttgttcatagcacccttcgccttattattgactgtagttttgatcacttgatggtattaaaggacattaagaaacttcataagcagattcaacgatgttacgcagaaaaccgacgggcactgcatcctgtgcagttttacttgacaagccacggaggccagctgaaaaagaacatggatgaaaatgacaaaggatgggtcaactggaaggatatccatatcaaaccagagcactatagtgaactcataaagaaagaagacctgatttaccttacgtcagattcacctaatatactgaaggaattagatgaatcaaaggcctatgtgattggaggattagtagatcacaaccatcacaagggactcacatataaacaagcgtcagattatggaatcaatcatgcacagctcccacttggaaattttgtgaagatgaatagtcgaaaagttttggcagttaatcatgtgtttgaaattattctggaatacctggaaacaagagactggcaagaagcattttttactatcttgccccaacggaaaggagctgttcccacagacaaagcctgtgaaagtgcttctcatgacaatcagtctgtcaggatggaggaaggtggatcggacagtgattccagtgaggaggaatatagcagaaatgaactagattcaccacatgaagaaaagcaggataaggaaaatcacactgaatctacagtgaactctctgccacactaatgttacctggtttccttttagtttaaggaaaaattaggagaaagtgaggtgctatatagaatattgaaattggaagaacattttattttctcttatttctgttgtgatttttaaaaacttttttttggacctaaataataataaaaaaaaaagccctttaaactttgtaaggaaatattttttgattttgcgtaagaagatttaaatgtgtatgtgattttttttgtttttgtttttaaagcctcagtagtttctagataattttactgtattagtatattttcattttctttcattttatattctttagaatgtgccttctgacctttcagttttttaattttatagtcacatcaacatctttatgatctattgcctatatatctgtgagggcacatattcataaatatactgtcaatctatcagcatttgtgtatggtaggttaccctctatttgcagcttttatgtttaaattagttacttgaaagaatgtagtaattttaggaagaagtatcagtttgatagacttaataattcatttcttttggactatggagcgcatatctgttccttctttatgatgcctttttatggttctgaagtaattactgaagagttgagaatctctttaatgcattttcttaattcttacaatggtgataagttacttcaattataaaattgaattttgcagactaaattattttataaggctgttgctattgaaagatcaattttgtctttacctgcatttaaaatggaacagctcttagcagctgtggtttttttttccatattttttttaaatttgttggctcttaagatgaataaagtttataggtgcatctgcctcctcttctctaagaatatgcatactaatgtttgtttctataaatcaaatacacatgtgataatatgcatgtaaatacataactatcctcatcatgtatggctctcagttcttaattgatgataacatgattgaattgccatatatctgtattacttgtgtgaatggttgtgttgaacacgctaagaacaatttgaattttattaagtacaaaaatccttaacgtttgtatgggaacattggcaagaaagaatagtgtgaaagggaactgttttagtttcctatcagtaattgtacatgcagttaaatgtttaaggtaaaatgattggtctctgtcacagctaaaagatttcagtagccttcattgagtttgggtaaaataagttgctgttcttttgtcttctttttaatatataaaagttatatttaaaaagtatataacatactatatatgttacatactaacatatatatacacaacagaaagtttattggatttagtactgatatttactgtctatttttgttactttgttcttagtaatctattatagttacctattttaaggtaaggtctgtaggcaagatatgtaagtaaagacaagccctacaattttaaaataacaaagcttatgtcttaagttgtattttttcaaaggttcatgtttttctgagtaaatgtggtttattagcatgaaatattatgccttttacttaaattattttatgtaaaatagggcactgtttaattatgaaagggggaaaatcattccaaataagagtttaatttttattaattataaaaaactctgtattagtttcctagatgtgctagaacaaattaccacaaactgggtggctttaaacaacagaaatttattctcttaacagttccagagactaaatgtccagactcacaatgtcccagtgccatgcttcctccttaggccctaggaaagaatacttcctagcctcttcctggcttttggtggttgccagcaatccctgctgttccttagcctatagtggcttgactccaatctcagttttgttgtcaagtggtcttctaccctgtcttctatgtttgtatccgtgtccaaactctttttctagggagaccagcactggattagagttcaccatgatccaatatgacctcatcttgactacatccgcaaagaccctgtctccaaataaggtcacatttacagggtaccatgtgttaggatttgacatatcttttgggggacacaattctacccactacaggcccatatcttatctaggatgttggtggcaagaaggtgaagattactacctcttttgatataactagtttctgaggtatttaaaaatttggttttaaaaatattaagctttttgctcatttgcatgtatacttttctctcaacattgttttggtttatttaggttatttgttaaaacttcagtaaatactaaagttacttgtattagaacataataaaagtagagaattaaactacctaaataaatgcatcaaaaaata

SEQ ID NO: 49628 - protein, 164 aa, Artificial Sequence
  derived and/or modified sequence
MLGPQVWSSVRQGLSRSLSRNVGVWASGEGKKVDIAGIYPPVTTPFTATAEVDYGKLEENLHKLGTFPFRGAVGGVCALANVLGAQVCQLERLCCTGQWEDAQKLQHRLIEPNAAVTRRFGIPGLKKIMDWFGYYGGPCRAPLQELSPAEEEALRMDFTSNGWL

SEQ ID NO: 49629 - DNA, 495 bp, Artificial Sequence
  derived and/or modified sequence
atgctgggcccccaggtgtggagcagcgtgagacagggcctgagcagaagcctgagcagaaacgtgggcgtgtgggccagcggcgagggcaagaaggtggacatcgccggcatctacccccccgtgaccacccccttcaccgccaccgccgaggtggactacggcaagctggaggagaacctgcacaagctgggcaccttccccttcagaggcgccgtgggcggcgtgtgcgccctggccaacgtgctgggcgcccaggtgtgccagctggagagactgtgctgcaccggccagtgggaggacgcccagaagctgcagcacagactgatcgagcccaacgccgccgtgaccagaagattcggcatccccggcctgaagaagatcatggactggttcggctactacggcggcccctgcagagcccccctgcaggagctgagccccgccgaggaggaggccctgagaatggacttcaccagcaacggctggctgtag

SEQ ID NO: 49630 - DNA, 1999 bp, Artificial Sequence
  derived and/or modified sequence
ggctgggcttctggcttcagagctgggaattgtgggaggagggcccagatcccactggagataccgaaggagatactctttagtattgggatcccagaaaccagtcctatatctggccagagggacactgggttgtggcatctctctagctgctacccagaaggaacagggccccctggggcctataggccttgcccctgaccctgggaacacccagctcaggcctgccccagtggccacaagtcagggaggccgcaaatttttaactagaaacattgatcattaatagggggttagaaagagttcaaactaagtctcactctgggacatagaccaattgtgcttcaggcctcctgcagagatgctgggtccccaagtctggtcttctgtgaggcaggggctaagcaggagcttgtccaggaatgtgggggtctgggcctcaggggaggggaagaaggtggacattgcgggtatctacccccctgtgaccacccccttcactgccactgcagaggtggactatgggaaactggaggagaatctgcacaaactgggcaccttccccttccgaggagctgtggggggcgtctgcgccctggccaatgtcctgggggctcaggtgtgccagctggagcgactgtgctgcacggggcaatgggaagatgcccagaaactgcagcaccgcctcattgagccaaacgctgcggtgacccggcgctttgggatcccagggctgaagaaaatcatggactggtttggctactatggaggcccctgccgcgcccccttgcaggagctgagccccgctgaggaggaggcactgcgcatggatttcaccagcaacggctggctctgagggcaggcagggtccatggctggcctgagcccatctcagcctcctgccttgcacttgcagcctgaagcggagagcacagggggatgagggtggcaggcagcggggagccgatagaggctcctttgcctgctgtggtcctccaggcagcctttcacaggcacgcccatgcatatctcctattctaacggcccctgacctctcccttttggatcctaaactgtgtctctggtctgaagactgggaaggagcaatttctcaatttatctttctactgtggatgctttcctacgccctgaggcacatgaagtcagaaaggaagggcagaggggcaagtaggcacagtaagggaattttcttttctttttttttttttttgagacagagtttcactctgtcacccaggctggagtgcaatggcatgatctcgcctcctgggttcaagcgattctcctgcctcagcctcccgagtagctgggattacaggcgcctgccaccacgcccagctaatttttgtatttttagcagagatggggtttcaccgtgttggccaggctggtcttgaactcctgacctcaggtgatccaactgcctcggcctcccaaagtgctgggattacagctgtgagccactgcacccggccgggaatttatcaaaggggggactacttagatttggggcttcaaacctgagtctagcacaatgcagctggaggccagggctactcctacaaacccaagttctgactccttccagggaagtatcagcttaagaaacttgatcaggaaagtgacactggtctttcaaagagccctctttaccctcccatccctgccctccacactgcaagctgcattccagccacaacgcccttttctaaatctattttcattcatctcctattctggtctgtagccttgattccaaccattgaatgcacggagacagcccagtggcttgtcagattggtaaataatgacacctggtggataaatgttacattctagaagactattctggtcagcctaggtctgaaacactaaggagacttggcctgagatagggccatccacttgcctacaggcactctgcttttattattaaaaatagtcactttgttactataataaaatttaacagaaaaaa

SEQ ID NO: 49631 - DNA, 495 bp, Artificial Sequence
  derived and/or modified sequence
atgctggggccccaggtgtggagttcggtacgccagggattgtcgagatccctctccagaaacgtgggcgtatgggcctcaggggaaggcaagaaggtcgatatcgccgggatctatccaccagtgacaactccattcaccgctacagccgaagttgactatggcaaattagaggaaaacctccacaagctaggaacattccccttccggggtgccgtgggcggggtgtgcgccttagccaacgtcctcggcgcccaggtctgtcagctggaacggctctgctgcaccggccagtgggaagacgctcagaagctgcagcataggctgatcgaaccaaacgcggccgtgacccgtcgctttgggattccaggcctgaagaagatcatggattggttcggatattacggcggtccatgtcgcgccccgcttcaggagctctcgcctgctgaagaagaggccctgcggatggatttcaccagtaacggatggctatag

SEQ ID NO: 49632 - DNA, 495 bp, Artificial Sequence
  derived and/or modified sequence
atgctgggcccccaggtgtggagctctgtgcggcagggcctgagccgcagcctgagcagaaatgtgggcgtgtgggccagcggggagggcaagaaggtggacattgctggcatctacccacctgtgaccacccccttcaccgccacagctgaggtggactatggcaagctggaggagaacctgcacaagctgggcaccttccccttcagaggagctgtgggcggcgtgtgtgccctggccaacgtgctgggcgcccaggtgtgccagctggagcggctgtgctgcaccggccagtgggaggatgcccagaagctgcagcacaggctcatcgagcccaatgctgctgtgacccggcgcttcggcatccctggcctgaagaagatcatggactggtttggctactatggaggcccctgccgggcccccctgcaggagctgagccctgctgaggaggaggccctgaggatggacttcaccagcaatggctggctgtag

SEQ ID NO: 49633 - DNA, 495 bp, Artificial Sequence
  derived and/or modified sequence
atgctgggcccccaggtgtggagcagcgtgcggcagggcctgagccggtccctgagtcgaaatgtgggagtttgggcttctggggaggggaaaaaagtcgacatcgcggggatatatccaccagttactactccgtttacagccaccgccgaagttgactacggaaagttagaggagaatctccacaaattaggtacattcccattcaggggggcggtaggcggggtttgtgccctggctaacgtgctgggtgcgcaagtttgccaactggagagactgtgctgcacaggtcagtgggaagacgcccaaaaactccaacaccggctgattgaacctaatgctgcagtcactagaagattcggcattcctggcctcaagaagatcatggactggttcggctattatggtggtccctgccgcgcacctttgcaagaactgagtccagctgaagaagaagccctgcgtatggacttcacctcaaatgggtggctctag

SEQ ID NO: 49634 - DNA, 495 bp, Artificial Sequence
  derived and/or modified sequence
atgctaggacctcaagtgtggagtagcgtccgtcaggggctctcacgcagcctttcaaggaatgtcggcgtgtgggcaagtggagaagggaagaaggtggacatagcaggaatatacccaccagtgactactccgtttaccgccaccgccgaggtggattacggcaaactggaggagaatctgcataagttgggaactttcccctttcggggtgcggtaggcggtgtgtgtgccctcgccaacgtcttgggtgctcaggtttgccaactcgagcggctctgctgcacaggccaatgggaagatgcccagaaactgcagcaccggctgattgagcccaatgcagcggtgacccggagattcggcattcccggattaaagaagattatggactggttcggctactatggcggtccctgcagagctcccctgcaggagctctcacctgcagaagaagaggctttgcggatggacttcacatctaacgggtggttgtag

SEQ ID NO: 49635 - protein, 231 aa, Artificial Sequence
  derived and/or modified sequence
MSDIGDWFRSIPAITRYWFAATVAVPLVGKLGLISPAYLFLWPEAFLYRFQIWRPITATFYFPVGPGTGFLYLVNLYFLYQYSTRLETGAFDGRPADYLFMLLFNWICIVITGLAMDMQLLMIPLIMSVLYVWAQLNRDMIVSFWFGTRFKACYLPWVILGFNYIIGGSYPMDLGGRNFLSTPQFLYRWLPSRRGGVSGFGVPPASMRRAADQNGGGGRHNWGQGFRLGDQ

SEQ ID NO: 49636 - DNA, 696 bp, Artificial Sequence
  derived and/or modified sequence
atgagcgacatcggcgactggttcagaagcatccccgccatcaccagatactggttcgccgccaccgtggccgtgcccctggtgggcaagctgggcctgatcagccccgcctacctgttcctgtggcccgaggccttcctgtacagattccagatctggagacccatcaccgccaccttctacttccccgtgggccccggcaccggcttcctgtacctggtgaacctgtacttcctgtaccagtacagcaccagactggagaccggcgccttcgacggcagacccgccgactacctgttcatgctgctgttcaactggatctgcatcgtgatcaccggcctggccatggacatgcagctgctgatgatccccctgatcatgagcgtgctgtacgtgtgggcccagctgaacagagacatgatcgtgagcttctggttcggcaccagattcaaggcctgctacctgccctgggtgatcctgggcttcaactacatcatcggcggcagctaccccatggacctgggcggcagaaacttcctgagcaccccccagttcctgtacagatggctgcccagcagaagaggcggcgtgagcggcttcggcgtgccccccgccagcatgagaagagccgccgaccagaacggcggcggcggcagacacaactggggccagggcttcagactgggcgaccagtag

SEQ ID NO: 49637 - DNA, 1994 bp, Artificial Sequence
  derived and/or modified sequence
atgtcggacatcggagactggttcaggagcatcccggcgatcacgcgctattggttcgccgccaccgtcgccgtgcccttggtcggcaaactcggcctcatcagcccggcctacctcttcctctggcccgaagccttcctttatcgctttcagatttggaggccaatcactgccaccttttatttccctgtgggtccaggaactggatttctttatttggtcaatttatatttcttatatcagtattctacgcgacttgaaacaggagcttttgatgggaggccagcagactatttattcatgctcctctttaactggatttgcatcgtgattactggcttagcaatggatatgcagttgctgatgattcctctgatcatgtcagtactttatgtctgggcccagctgaacagagacatgattgtatcattttggtttggaacacgatttaaggcctgctatttaccctgggttatccttggattcaactatatcatcggaggctcatacccaatggacttgggaggaagaaattttctatccacacctcagtttttgtaccgctggctgcccagtaggagaggaggagtatcaggatttggtgtgccccctgctagcatgaggcgagctgctgatcagaatggcggaggcgggagacacaactggggccagggctttcgacttggagaccagtgaaggggcggcctcgggcagccgctcctctcaagccacatttcctcccagtgctgggtgcacttaacaactgcgttctggctaacactgttggacctgacccacactgaatgtagtctttcagtacgagacaaagtttcttaaatcccgaagaaaaatataagtgttccacaagtttcacgattctcattcaagtccttactgctgtgaagaacaaataccaactgtgcaaattgcaaaactgactacattttttggtgtcttctcttctcccctttccgtctgaataatgggttttagcgggtcctagtctgctggcattgagctggggctgggtcaccaaacccttcccaaaaggacccttatctctttcttgcacacatgcctctctcccacttttcccaacccccacatttgcaactagaagaggttgcccataaaattgctctgcccttgacaggttctgttatttattgacttttgccaaggcttggtcacaacaatcatattcacgtaattttccccctttggtggcagaactgtagcaatagggggagaagacaagcagcggatgaagcgttttctcagcttttggaattgcttcgacctgacatccgttgtaaccgtttgccacttcttcagatatttttataaaaaagtaccactgagtcagtgagggccacagattggtattaatgagatacgagggttgttgctgggtgtttgtttcctgagctaagtgatcaagactgtagtggagttgcagctaacatgggttaggtttaaaccatgggggatgcaacccctttgcgtttcatatgtaggcctactggctttgtgtagctggagtagttgggttgctttgtgttaggaggatccagatcatgttggctacagggagatgctctctttgagaggctcctgggcattgattccatttcaatctcattctggatatgtgttcattgagtaaaggaggagagaccctcatacgctatttaaatgtcacttttttgcctatcccccgttttttggtcatgtttcaattaattgtgaggaaggcgcagctcctctctgcacgtagatcattttttaaagctaatgtaagcacatctaagggaataacatgatttaaggttgaaatggctttagaatcatttgggtttgagggtgtgttattttgagtcatgaatgtacaagctctgtgaatcagaccagcttaaatacccacacctttttttcgtaggtgggcttttcctatcagagcttggctcataaccaaataaagttttttgaaggcc

SEQ ID NO: 49638 - DNA, 696 bp, Artificial Sequence
  derived and/or modified sequence
atgtccgacatcggggactggtttagatccataccagccatcactcgctactggttcgccgctaccgttgccgtcccactggtcggtaagctgggtttaatttcaccggcatacctgttcctatggccagaggcctttctgtacagattccaaatttggaggccaataactgctacattctactttcccgtgggacctggcaccggcttcctttacttggtcaacctgtatttcctctaccagtactctacgaggctggagacaggggcatttgatggtcgacccgctgattatctcttcatgttattgttcaattggatatgcatagttatcactggcctcgccatggatatgcaattgctgatgatccccctgatcatgtctgtgttgtacgtgtgggcgcaattgaacagggacatgatcgtctccttttggttcggaacccgcttcaaagcctgttatctgccatgggtgatcctcggatttaactatatcattggaggaagctatcccatggatctcgggggcagaaacttcctctcaacccctcagttcctgtatcggtggctcccctctagacgcgggggggtttccggttttggagttccaccagcgtccatgcggcgggcagcagatcaaaatggaggtgggggccgccataactgggggcagggcttccgtctcggggaccagtag

SEQ ID NO: 49639 - DNA, 696 bp, Artificial Sequence
  derived and/or modified sequence
atgtctgacatcggggactggttccgcagcatcccagccatcacccgctactggtttgctgccaccgtggccgtgcccctggtgggcaagctgggcctcatcagccctgcctacctgttcctgtggccagaggccttcctgtaccgcttccagatctggaggcccatcacagccaccttctacttccctgtgggccctggcaccggcttcctgtacctggtgaacctgtacttcctgtaccagtacagcacccggctggagaccggggcctttgatggccggcctgctgactacctgttcatgctgctcttcaactggatctgcatcgtcatcaccggcctggccatggacatgcagctgctgatgatccccctcatcatgtctgtgctgtatgtgtgggcccagctgaacagagacatgattgtgtccttctggtttggcacccgcttcaaggcctgctacctgccctgggtgatcctgggcttcaactacatcatcggcggcagctaccccatggacctgggcggcaggaacttcctgagcaccccccagttcctgtaccgctggctgcccagcagaagaggaggagtgtctggcttcggcgtgcccccagcctccatgagaagagctgctgaccagaatggaggcggcggccgccacaactggggccagggcttccggctgggggaccagtag

SEQ ID NO: 49640 - DNA, 696 bp, Artificial Sequence
  derived and/or modified sequence
atgagcgacatcggcgactggttccggagcatccccgccatcacccgctattggtttgccgccactgtggctgtccccctggtgggaaagctgggactaatcagtcctgcatatctgttcctgtggcccgaggcgttcttgtaccgcttccagatctggcgcccgatcactgccacgttttatttcccggtgggtcccggaacaggattcttgtacttggtcaacctgtacttcctgtaccaatactctacgcgcttggagaccggcgccttcgacggtcgccctgcggattatctgttcatgctcctttttaattggatctgtattgtcattacgggtctcgcaatggacatgcagctgctaatgattcccttaattatgagcgtgctgtatgtttgggcacagctgaaccgggatatgatcgtgtccttttggttcgggacccgtttcaaagcatgctatctaccatgggttatactgggatttaactatatcattggtggcagctaccccatggatctgggagggcgcaatttcctctctacccctcagttcctgtataggtggctccctagcagacgcggtggggttagcgggttcggggttccccccgcgagcatgaggagagccgccgaccagaatggcggggggggcaggcataactgggggcagggcttccgcctgggagaccagtag

SEQ ID NO: 49641 - DNA, 696 bp, Artificial Sequence
  derived and/or modified sequence
atgtctgatattggtgactggtttagatccattccagctattaccagatactggttcgcggcaaccgtcgcagtaccgttggtcggtaagttgggactgattagtccagcctacctgttcctgtggccagaagcgtttctatatcgatttcagatctggaggccgataactgccactttttacttcccagtgggcccaggcaccggatttctgtatctcgtgaatctatactttctgtaccagtactccactcgcctcgagacaggggcattcgatggaaggccagcagactatttgttcatgctcctttttaactggatatgcatcgtaattaccgggctggccatggatatgcaactgctgatgatccccttgataatgagtgttctatatgtctgggctcagctgaaccgggacatgattgtctctttctggtttggcactagattcaaagcctgttatttaccctgggtgattctggggttcaactatatcattgggggatcttacccgatggaccttggtgggagaaattttctcagcactcctcagttcctgtatcgatggctgcccagccggagaggcggagtgtccggttttggggtgccacctgctagcatgcgacgggctgctgaccagaacgggggaggcggacggcacaattgggggcagggctttcgtctcggagatcagtag

SEQ ID NO: 49642 - protein, 396 aa, Artificial Sequence
  derived and/or modified sequence
MASLSRALRVAAAHPRQSPTRGMGPCNLSSAAGPTAEKSVPYQRTLKEGQGTSVVAQGPSRPLPSTANVVVIGGGSLGCQTLYHLAKLGMSGAVLLERERLTSGTTWHTAGLLWQLRPSDVEVELLAHTRRVVSRELEEETGLHTGWIQNGGLFIASNRQRLDEYKRLMSLGKAYGVESHVLSPAETKTLYPLMNVDDLYGTLYVPHDGTMDPAGTCTTLARAASARGAQVIENCPVTGIRVWTDDFGVRRVAGVETQHGSIQTPCVVNCAGVWASAVGRMAGVKVPLVAMHHAYVVTERIEGIQSFTLLPTLEYSGTVSAHCNLRLPGSSNSRASASHVAGIKCARHHTRLIFFCILVETEFHHVAKAGLELLSSGNPPISDFQSARITGVSHHA

SEQ ID NO: 49643 - protein, 283 aa, Artificial Sequence
  derived and/or modified sequence
MSGAVLLERERLTSGTTWHTAGLLWQLRPSDVEVELLAHTRRVVSRELEEETGLHTGWIQNGGLFIASNRQRLDEYKRLMSLGKAYGVESHVLSPAETKTLYPLMNVDDLYGTLYVPHDGTMDPAGTCTTLARAASARGAQVIENCPVTGIRVWTDDFGVRRVAGVETQHGSIQTPCVVNCAGVWASAVGRMAGVKVPLVAMHHAYVVTERIEGIQNMPNVRDHDASVYLRLQGDALSVGGYEANPIFWEEAVKYRPRAAGGLCLKTSTEKVCAVWSDDLRRA

SEQ ID NO: 49644 - protein, 368 aa, Artificial Sequence
  derived and/or modified sequence
MSYFGKFYLVGLDARKAADWLFSADVSRPPGSTVYTCMLNHRGGTESDLTVSRLAPSHQASPLAPAFEGDGYYLAMGGAVAQHNWSHITTVLQDQKSQCQLIDSSEDLGMISIQGPASRAILQEVLDADLSNEAFPFSTHKLLRAAGHLVRAMRLSFVGELGWELHIPKASCVPVYRAVMAAGAKHGLINAGYRAIDSLSIEKGYRHWHADLRPDDSPLEAGLAFTCKLKSPVPFLGREALEQQRAAGLRRRLVCFTMEEPLWTRPHPAVSGAPAFSTASSSKVPMFGLEAIWRNGQVVGHVRRADFGFAIDKTIAYGYIHDPSGGPVSLDFVKSGDYALERMGVTYGAQAHLKSPFDPNNKRVKGIY

SEQ ID NO: 49645 - protein, 918 aa, Artificial Sequence
  derived and/or modified sequence
MASLSRALRVAAAHPRQSPTRGMGPCNLSSAAGPTAEKSVPYQRTLKEGQGTSVVAQGPSRPLPSTANVVVIGGGSLGCQTLYHLAKLGMSGAVLLERERLTSGTTWHTAGLLWQLRPSDVEVELLAHTRRVVSRELEEETGLHTGWIQNGGLFIASNRQRLDEYKRLMSLGKAYGVESHVLSPAETKTLYPLMNVDDLYGTLYVPHDGTMDPAGTCTTLARAASARGAQVIENCPVTGIRVWTDDFGVRRVAGVETQHGSIQTPCVVNCAGVWASAVGRMAGVKVPLVAMHHAYVVTERIEGIQNMPNVRDHDASVYLRLQGDALSVGGYEANPIFWEEVSDKFAFGLFDLDWEVFTQHIEGAINRVPVLEKTGIKSTVCGPESFTPDHKPLMGEAPELRGFFLGCGFNSAGMMLGGGCGQELAHWIIHGRPEKDMHGYDIRRFHHSLTDHPRWIRERSHESYAKNYSVVFPHDEPLAGRNMRRDPLHEELLGQGCVFQERHGWERPGWFHPRGPAPVLEYDYYGAYGSRAHEDYAYRRLLADEYTFAFPPHHDTIKKECLACRGAAAVFDMSYFGKFYLVGLDARKAADWLFSADVSRPPGSTVYTCMLNHRGGTESDLTVSRLAPSHQASPLAPAFEGDGYYLAMGGAVAQHNWSHITTVLQDQKSQCQLIDSSEDLGMISIQGPASRAILQEVLDADLSNEAFPFSTHKLLRAAGHLVRAMRLSFVGELGWELHIPKASCVPVYRAVMAAGAKHGLINAGYRAIDSLSIEKGYRHWHADLRPDDSPLEAGLAFTCKLKSPVPFLGREALEQQRAAGLRRRLVCFTMEDKVPMFGLEAIWRNGQVVGHVRRADFGFAIDKTIAYGYIHDPSGGPVSLDFVKSGDYALERMGVTYGAQAHLKSPFDPNNKRVKGIY

SEQ ID NO: 49646 - protein, 350 aa, Artificial Sequence
  derived and/or modified sequence
MGPCNLSSAAGPTAEKSVPYQRTLKEGQGTSVVAQGPSRPLPSTANVVVIGGGSLGCQTLYHLAKLGMSGAVLLERERLTSGTTWHTAGLLWQLRPSDVEVELLAHTRRVVSRELEEETGLHTGWIQNGGLFIASNRQRLDEYKRLMSLGKAYGVESHVLSPAETKTLYPLMNVDDLYGTLYVPHDGTMDPAGTCTTLARAASARGAQVIENCPVTGIRVWTDDFGVRRVAGVETQHGSIQTPCVVNCAGVWASAVGRMAGVKVPLVAMHHAYVVTERIEGIQNMPNVRDHDASVYLRLQGDALSVGGYEANPIFWEEAVKYRPRAAGGLCLKTSTEKVCAVWSDDLRRA

SEQ ID NO: 49647 - protein, 750 aa, Artificial Sequence
  derived and/or modified sequence
MSLGKAYGVESHVLSPAETKTLYPLMNVDDLYGTLYVPHDGTMDPAGTCTTLARAASARGAQVIENCPVTGIRVWTDDFGVRRVAGVETQHGSIQTPCVVNCAGVWASAVGRMAGVKVPLVAMHHAYVVTERIEGIQNMPNVRDHDASVYLRLQGDALSVGGYEANPIFWEEVSDKFAFGLFDLDWEVFTQHIEGAINRVPVLEKTGIKSTVCGPESFTPDHKPLMGEAPELRGFFLGCGFNSAGMMLGGGCGQELAHWIIHGRPEKDMHGYDIRRFHHSLTDHPRWIRERSHESYAKNYSVVFPHDEPLAGRNMRRDPLHEELLGQGCVFQERHGWERPGWFHPRGPAPVLEYDYYGAYGSRAHEDYAYRRLLADEYTFAFPPHHDTIKKECLACRGAAAVFDMSYFGKFYLVGLDARKAADWLFSADVSRPPGSTVYTCMLNHRGGTESDLTVSRLAPSHQASPLAPAFEGDGYYLAMGGAVAQHNWSHITTVLQDQKSQCQLIDSSEDLGMISIQGPASRAILQEVLDADLSNEAFPFSTHKLLRAAGHLVRAMRLSFVGELGWELHIPKASCVPVYRAVMAAGAKHGLINAGYRAIDSLSIEKGYRHWHADLRPDDSPLEAGLAFTCKLKSPVPFLGREALEQQRAAGLRRRLVCFTMEDKVPMFGLEAIWRNGQVVGHVRRADFGFAIDKTIAYGYIHDPSGGPVSLDFVKSGDYALERMGVTYGAQAHLKSPFDPNNKRVKGIY

SEQ ID NO: 49648 - protein, 609 aa, Artificial Sequence
  derived and/or modified sequence
MASLSRALRVAAAHPRQSPTRGMGPCNLSSAAGPTAEKSVPYQRTLKEGQGTSVVAQGPSRPLPSTANVVVIGGGSLGCQTLYHLAKLGMSGAVLLERERLTSGTTWHTAGLLWQLRPSDVEVELLAHTRRVVSRELEEETGLHTGWIQNGGLFIASNRQRLDEYKRLMSLGKAYGVESHVLSPAETKTLYPLMNVDDLYGTLYVPHDGTMDPAGTCTTLARAASARGAQVIENCPVTGIRVWTDDFGVRRVAGVETQHGSIQTPCVVNCAGVWASAVGRMAGVKVPLVAMHHAYVVTERIEGIQNMPNVRDHDASVYLRLQGDALSVGGYEANPIFWEEVSDKFAFGLFDLDWEVFTQHIEGAINRVPVLEKTGIKSTVCGPESFTPDHKPLMGEAPELRGFFLGCGFNSAGMMLGGGCGQELAHWIIHGRPEKDMHGYDIRRFHHSLTDHPRWIRERSHESYAKNYSVVFPHDEPLAGRNMRRDPLHEELLGQGCVFQERHGWERPGWFHPRGPAPVLEYDYYGAYGSRAHEDYAYRRLLADEYTFAFPPHHDTIKKECLACRGAAAVFDMSYFGKFYLVGLDARKAADWLFSADVSRPPGLHRVHV

SEQ ID NO: 49649 - protein, 422 aa, Artificial Sequence
  derived and/or modified sequence
MASLSRALRVAAAHPRQSPTRGMGPCNLSSAAGPTAEKSVPYQRTLKEGQGTSVVAQGPSRPLPSTANVVVIGGGSLGCQTLYHLAKLGMSGAVLLERERLTSGTTWHTAGLLWQLRPSDVEVELLAHTRRVVSRELEEETGLHTGWIQNGGLFIASNRQRLDEYKRLMSLGKAYGVESHVLSPAETKTLYPLMNVDDLYGTLYVPHDGTMDPAGTCTTLARAASARGAQVIENCPVTGIRVWTDDFGVRRVAGVETQHGSIQTPCVVNCAGVWASAVGRMAGVKVPLVAMHHAYVVTERIEGIQNMPNVRDHDASVYLRLQGDALSVGGYEANPIFWEEVSDKFAFGLFDLDWEVFTQHIEGAINRVPVLEKTGIKSTVCGPESFTPDHKPLMGEAPELRGFFLGCGFNSAGESGQALLAP

SEQ ID NO: 49650 - protein, 474 aa, Artificial Sequence
  derived and/or modified sequence
MASLSRALRVAAAHPRQSPTRGMGPCNLSSAAGPTAEKSVPYQRTLKEGQGTSVVAQGPSRPLPSTANVVVIGGGSLGCQTLYHLAKLGMSGAVLLERERLTSGTTWHTAGLLWQLRPSDVEVELLAHTRRVVSRELEEETGLHTGWIQNGGLFIASNRQRLDEYKRLMSLGKAYGVESHVLSPAETKTLYPLMNVDDLYGTLYVPHDGTMDPAGTCTTLARAASARGAQVIENCPVTGIRVWTDDFGVRRVAGVETQHGSIQTPCVVNCAGVWASAVGRMAGVKVPLVAMHHAYVVTERIEGIQNMPNVRDHDASVYLRLQGDALSVGGYEANPIFWEEVSDKFAFGLFDLDWEVFTQHIEGAINRVPVLEKTGIKSTVCGPESFTPDHKPLMGEAPELRGFFLGCGFNSAGMMLGGGCGQELAHWIIHGRPEKDMHGYDIRRFHHSLTDHPRWIRERSHESYQELLRRLPPR

SEQ ID NO: 49651 - DNA, 1107 bp, Artificial Sequence
  derived and/or modified sequence
atgagctacttcggcaagttctacctggtgggcctggacgccagaaaggccgccgactggctgttcagcgccgacgtgagcagaccccccggcagcaccgtgtacacctgcatgctgaaccacagaggcggcaccgagagcgacctgaccgtgagcagactggcccccagccaccaggccagccccctggcccccgccttcgagggcgacggctactacctggccatgggcggcgccgtggcccagcacaactggagccacatcaccaccgtgctgcaggaccagaagagccagtgccagctgatcgacagcagcgaggacctgggcatgatcagcatccagggccccgccagcagagccatcctgcaggaggtgctggacgccgacctgagcaacgaggccttccccttcagcacccacaagctgctgagagccgccggccacctggtgagagccatgagactgagcttcgtgggcgagctgggctgggagctgcacatccccaaggccagctgcgtgcccgtgtacagagccgtgatggccgccggcgccaagcacggcctgatcaacgccggctacagagccatcgacagcctgagcatcgagaagggctacagacactggcacgccgacctgagacccgacgacagccccctggaggccggcctggccttcacctgcaagctgaagagccccgtgcccttcctgggcagagaggccctggagcagcagagagccgccggcctgagaagaagactggtgtgcttcaccatggaggagcccctgtggaccagaccccaccccgccgtgagcggcgcccccgccttcagcaccgccagcagcagcaaggtgcccatgttcggcctggaggccatctggagaaacggccaggtggtgggccacgtgagaagagccgacttcggcttcgccatcgacaagaccatcgcctacggctacatccacgaccccagcggcggccccgtgagcctggacttcgtgaagagcggcgactacgccctggagagaatgggcgtgacctacggcgcccaggcccacctgaagagccccttcgaccccaacaacaagagagtgaagggcatctactag

SEQ ID NO: 49652 - DNA, 2757 bp, Artificial Sequence
  derived and/or modified sequence
atggccagcctgagcagagccctgagagtggccgccgcccaccccagacagagccccaccagaggcatgggcccctgcaacctgagcagcgccgccggccccaccgccgagaagagcgtgccctaccagagaaccctgaaggagggccagggcaccagcgtggtggcccagggccccagcagacccctgcccagcaccgccaacgtggtggtgatcggcggcggcagcctgggctgccagaccctgtaccacctggccaagctgggcatgagcggcgccgtgctgctggagagagagagactgaccagcggcaccacctggcacaccgccggcctgctgtggcagctgagacccagcgacgtggaggtggagctgctggcccacaccagaagagtggtgagcagagagctggaggaggagaccggcctgcacaccggctggatccagaacggcggcctgttcatcgccagcaacagacagagactggacgagtacaagagactgatgagcctgggcaaggcctacggcgtggagagccacgtgctgagccccgccgagaccaagaccctgtaccccctgatgaacgtggacgacctgtacggcaccctgtacgtgccccacgacggcaccatggaccccgccggcacctgcaccaccctggccagagccgccagcgccagaggcgcccaggtgatcgagaactgccccgtgaccggcatcagagtgtggaccgacgacttcggcgtgagaagagtggccggcgtggagacccagcacggcagcatccagaccccctgcgtggtgaactgcgccggcgtgtgggccagcgccgtgggcagaatggccggcgtgaaggtgcccctggtggccatgcaccacgcctacgtggtgaccgagagaatcgagggcatccagaacatgcccaacgtgagagaccacgacgccagcgtgtacctgagactgcagggcgacgccctgagcgtgggcggctacgaggccaaccccatcttctgggaggaggtgagcgacaagttcgccttcggcctgttcgacctggactgggaggtgttcacccagcacatcgagggcgccatcaacagagtgcccgtgctggagaagaccggcatcaagagcaccgtgtgcggccccgagagcttcacccccgaccacaagcccctgatgggcgaggcccccgagctgagaggcttcttcctgggctgcggcttcaacagcgccggcatgatgctgggcggcggctgcggccaggagctggcccactggatcatccacggcagacccgagaaggacatgcacggctacgacatcagaagattccaccacagcctgaccgaccaccccagatggatcagagagagaagccacgagagctacgccaagaactacagcgtggtgttcccccacgacgagcccctggccggcagaaacatgagaagagaccccctgcacgaggagctgctgggccagggctgcgtgttccaggagagacacggctgggagagacccggctggttccaccccagaggccccgcccccgtgctggagtacgactactacggcgcctacggcagcagagcccacgaggactacgcctacagaagactgctggccgacgagtacaccttcgccttccccccccaccacgacaccatcaagaaggagtgcctggcctgcagaggcgccgccgccgtgttcgacatgagctacttcggcaagttctacctggtgggcctggacgccagaaaggccgccgactggctgttcagcgccgacgtgagcagaccccccggcagcaccgtgtacacctgcatgctgaaccacagaggcggcaccgagagcgacctgaccgtgagcagactggcccccagccaccaggccagccccctggcccccgccttcgagggcgacggctactacctggccatgggcggcgccgtggcccagcacaactggagccacatcaccaccgtgctgcaggaccagaagagccagtgccagctgatcgacagcagcgaggacctgggcatgatcagcatccagggccccgccagcagagccatcctgcaggaggtgctggacgccgacctgagcaacgaggccttccccttcagcacccacaagctgctgagagccgccggccacctggtgagagccatgagactgagcttcgtgggcgagctgggctgggagctgcacatccccaaggccagctgcgtgcccgtgtacagagccgtgatggccgccggcgccaagcacggcctgatcaacgccggctacagagccatcgacagcctgagcatcgagaagggctacagacactggcacgccgacctgagacccgacgacagccccctggaggccggcctggccttcacctgcaagctgaagagccccgtgcccttcctgggcagagaggccctggagcagcagagagccgccggcctgagaagaagactggtgtgcttcaccatggaggacaaggtgcccatgttcggcctggaggccatctggagaaacggccaggtggtgggccacgtgagaagagccgacttcggcttcgccatcgacaagaccatcgcctacggctacatccacgaccccagcggcggccccgtgagcctggacttcgtgaagagcggcgactacgccctggagagaatgggcgtgacctacggcgcccaggcccacctgaagagccccttcgaccccaacaacaagagagtgaagggcatctactag

SEQ ID NO: 49653 - DNA, 2253 bp, Artificial Sequence
  derived and/or modified sequence
atgagcctgggcaaggcctacggcgtggagagccacgtgctgagccccgccgagaccaagaccctgtaccccctgatgaacgtggacgacctgtacggcaccctgtacgtgccccacgacggcaccatggaccccgccggcacctgcaccaccctggccagagccgccagcgccagaggcgcccaggtgatcgagaactgccccgtgaccggcatcagagtgtggaccgacgacttcggcgtgagaagagtggccggcgtggagacccagcacggcagcatccagaccccctgcgtggtgaactgcgccggcgtgtgggccagcgccgtgggcagaatggccggcgtgaaggtgcccctggtggccatgcaccacgcctacgtggtgaccgagagaatcgagggcatccagaacatgcccaacgtgagagaccacgacgccagcgtgtacctgagactgcagggcgacgccctgagcgtgggcggctacgaggccaaccccatcttctgggaggaggtgagcgacaagttcgccttcggcctgttcgacctggactgggaggtgttcacccagcacatcgagggcgccatcaacagagtgcccgtgctggagaagaccggcatcaagagcaccgtgtgcggccccgagagcttcacccccgaccacaagcccctgatgggcgaggcccccgagctgagaggcttcttcctgggctgcggcttcaacagcgccggcatgatgctgggcggcggctgcggccaggagctggcccactggatcatccacggcagacccgagaaggacatgcacggctacgacatcagaagattccaccacagcctgaccgaccaccccagatggatcagagagagaagccacgagagctacgccaagaactacagcgtggtgttcccccacgacgagcccctggccggcagaaacatgagaagagaccccctgcacgaggagctgctgggccagggctgcgtgttccaggagagacacggctgggagagacccggctggttccaccccagaggccccgcccccgtgctggagtacgactactacggcgcctacggcagcagagcccacgaggactacgcctacagaagactgctggccgacgagtacaccttcgccttccccccccaccacgacaccatcaagaaggagtgcctggcctgcagaggcgccgccgccgtgttcgacatgagctacttcggcaagttctacctggtgggcctggacgccagaaaggccgccgactggctgttcagcgccgacgtgagcagaccccccggcagcaccgtgtacacctgcatgctgaaccacagaggcggcaccgagagcgacctgaccgtgagcagactggcccccagccaccaggccagccccctggcccccgccttcgagggcgacggctactacctggccatgggcggcgccgtggcccagcacaactggagccacatcaccaccgtgctgcaggaccagaagagccagtgccagctgatcgacagcagcgaggacctgggcatgatcagcatccagggccccgccagcagagccatcctgcaggaggtgctggacgccgacctgagcaacgaggccttccccttcagcacccacaagctgctgagagccgccggccacctggtgagagccatgagactgagcttcgtgggcgagctgggctgggagctgcacatccccaaggccagctgcgtgcccgtgtacagagccgtgatggccgccggcgccaagcacggcctgatcaacgccggctacagagccatcgacagcctgagcatcgagaagggctacagacactggcacgccgacctgagacccgacgacagccccctggaggccggcctggccttcacctgcaagctgaagagccccgtgcccttcctgggcagagaggccctggagcagcagagagccgccggcctgagaagaagactggtgtgcttcaccatggaggacaaggtgcccatgttcggcctggaggccatctggagaaacggccaggtggtgggccacgtgagaagagccgacttcggcttcgccatcgacaagaccatcgcctacggctacatccacgaccccagcggcggccccgtgagcctggacttcgtgaagagcggcgactacgccctggagagaatgggcgtgacctacggcgcccaggcccacctgaagagccccttcgaccccaacaacaagagagtgaagggcatctactag

SEQ ID NO: 49654 - DNA, 1830 bp, Artificial Sequence
  derived and/or modified sequence
atggccagcctgagcagagccctgagagtggccgccgcccaccccagacagagccccaccagaggcatgggcccctgcaacctgagcagcgccgccggccccaccgccgagaagagcgtgccctaccagagaaccctgaaggagggccagggcaccagcgtggtggcccagggccccagcagacccctgcccagcaccgccaacgtggtggtgatcggcggcggcagcctgggctgccagaccctgtaccacctggccaagctgggcatgagcggcgccgtgctgctggagagagagagactgaccagcggcaccacctggcacaccgccggcctgctgtggcagctgagacccagcgacgtggaggtggagctgctggcccacaccagaagagtggtgagcagagagctggaggaggagaccggcctgcacaccggctggatccagaacggcggcctgttcatcgccagcaacagacagagactggacgagtacaagagactgatgagcctgggcaaggcctacggcgtggagagccacgtgctgagccccgccgagaccaagaccctgtaccccctgatgaacgtggacgacctgtacggcaccctgtacgtgccccacgacggcaccatggaccccgccggcacctgcaccaccctggccagagccgccagcgccagaggcgcccaggtgatcgagaactgccccgtgaccggcatcagagtgtggaccgacgacttcggcgtgagaagagtggccggcgtggagacccagcacggcagcatccagaccccctgcgtggtgaactgcgccggcgtgtgggccagcgccgtgggcagaatggccggcgtgaaggtgcccctggtggccatgcaccacgcctacgtggtgaccgagagaatcgagggcatccagaacatgcccaacgtgagagaccacgacgccagcgtgtacctgagactgcagggcgacgccctgagcgtgggcggctacgaggccaaccccatcttctgggaggaggtgagcgacaagttcgccttcggcctgttcgacctggactgggaggtgttcacccagcacatcgagggcgccatcaacagagtgcccgtgctggagaagaccggcatcaagagcaccgtgtgcggccccgagagcttcacccccgaccacaagcccctgatgggcgaggcccccgagctgagaggcttcttcctgggctgcggcttcaacagcgccggcatgatgctgggcggcggctgcggccaggagctggcccactggatcatccacggcagacccgagaaggacatgcacggctacgacatcagaagattccaccacagcctgaccgaccaccccagatggatcagagagagaagccacgagagctacgccaagaactacagcgtggtgttcccccacgacgagcccctggccggcagaaacatgagaagagaccccctgcacgaggagctgctgggccagggctgcgtgttccaggagagacacggctgggagagacccggctggttccaccccagaggccccgcccccgtgctggagtacgactactacggcgcctacggcagcagagcccacgaggactacgcctacagaagactgctggccgacgagtacaccttcgccttccccccccaccacgacaccatcaagaaggagtgcctggcctgcagaggcgccgccgccgtgttcgacatgagctacttcggcaagttctacctggtgggcctggacgccagaaaggccgccgactggctgttcagcgccgacgtgagcagaccccccggcctgcacagagtgcacgtgtag

SEQ ID NO: 49655 - DNA, 1425 bp, Artificial Sequence
  derived and/or modified sequence
atggccagcctgagcagagccctgagagtggccgccgcccaccccagacagagccccaccagaggcatgggcccctgcaacctgagcagcgccgccggccccaccgccgagaagagcgtgccctaccagagaaccctgaaggagggccagggcaccagcgtggtggcccagggccccagcagacccctgcccagcaccgccaacgtggtggtgatcggcggcggcagcctgggctgccagaccctgtaccacctggccaagctgggcatgagcggcgccgtgctgctggagagagagagactgaccagcggcaccacctggcacaccgccggcctgctgtggcagctgagacccagcgacgtggaggtggagctgctggcccacaccagaagagtggtgagcagagagctggaggaggagaccggcctgcacaccggctggatccagaacggcggcctgttcatcgccagcaacagacagagactggacgagtacaagagactgatgagcctgggcaaggcctacggcgtggagagccacgtgctgagccccgccgagaccaagaccctgtaccccctgatgaacgtggacgacctgtacggcaccctgtacgtgccccacgacggcaccatggaccccgccggcacctgcaccaccctggccagagccgccagcgccagaggcgcccaggtgatcgagaactgccccgtgaccggcatcagagtgtggaccgacgacttcggcgtgagaagagtggccggcgtggagacccagcacggcagcatccagaccccctgcgtggtgaactgcgccggcgtgtgggccagcgccgtgggcagaatggccggcgtgaaggtgcccctggtggccatgcaccacgcctacgtggtgaccgagagaatcgagggcatccagaacatgcccaacgtgagagaccacgacgccagcgtgtacctgagactgcagggcgacgccctgagcgtgggcggctacgaggccaaccccatcttctgggaggaggtgagcgacaagttcgccttcggcctgttcgacctggactgggaggtgttcacccagcacatcgagggcgccatcaacagagtgcccgtgctggagaagaccggcatcaagagcaccgtgtgcggccccgagagcttcacccccgaccacaagcccctgatgggcgaggcccccgagctgagaggcttcttcctgggctgcggcttcaacagcgccggcatgatgctgggcggcggctgcggccaggagctggcccactggatcatccacggcagacccgagaaggacatgcacggctacgacatcagaagattccaccacagcctgaccgaccaccccagatggatcagagagagaagccacgagagctaccaggagctgctgagaagactgccccccagatag

SEQ ID NO: 49656 - DNA, 1107 bp, Artificial Sequence
  derived and/or modified sequence
atgtcttacttcgggaagttctatctcgtgggactggacgcgcgcaaagccgcagattggctcttcagcgctgacgtaagtcggcctccaggatcaactgtttatacctgcatgctaaaccatcgcgggggaactgagagcgatcttacagtgtcacgtctcgcgccttcccaccaagccagccccttagcacctgccttcgaaggcgatggttattatctagccatggggggagcagtggcccagcacaattggtctcatattactacagtccttcaggatcagaagtctcaatgtcaactgattgactccagtgaagatttgggaatgatatctatccaaggtccggcaagccgggcaatactgcaggaagtacttgacgcagatctgtccaacgaggctttcccgttctcaacacataagctgctccgtgctgcggggcatttagtgcgtgcgatgcgtctgagctttgtcggcgagctgggctgggaactgcatattccaaaagcctcttgtgtgcctgtgtatcgagccgtgatggcagccggagccaaacatgggctaatcaacgcaggctatagagccattgatagtctgtctattgagaagggctaccggcattggcacgctgacctacgtccagatgactcacccctggaagcaggcctggccttcacctgcaagcttaagagccccgtgcctttcttggggagggaggccctggaacagcagcgcgctgccggccttagacggcggctggtctgtttcacaatggaggaacccctgtggacaaggcctcaccccgctgtcagcggggcacctgcctttagcaccgccagttcttcaaaggtaccaatgttcggattagaggccatctggaggaacggccaggtggttgggcacgttcgacgggccgattttggattcgccatcgataaaactattgcctacggatatattcatgatccctccgggggccccgtgagtttggactttgtgaaatcaggagattatgctctggagcggatgggggtcacatatggtgcccaggcccacttaaagagtccatttgaccccaacaataaacgcgtgaagggaatttactag

SEQ ID NO: 49657 - DNA, 2757 bp, Artificial Sequence
  derived and/or modified sequence
atggcttcattatcaagggccctcagggtggcagccgctcacccccgccagtctcctactcgcggcatgggcccctgtaacctttccagtgcggccggacccaccgcggaaaaatcggtcccttatcagaggactttaaaggagggccagggtactagtgttgtggcccaggggccatcaaggccacttcccagcactgctaacgtggtagttatcggcggcggctctctgggctgccagaccctctaccatctggctaaactgggcatgtccggagctgtgcttctggaaagggaacgactgaccagcggtaccacctggcacacagcgggattactctggcaactaaggccttccgatgttgaggtggagttgctggctcacaccagaagagttgttagtagggaacttgaagaggagaccgggctgcataccggatggatccagaatgggggactctttattgctagtaaccggcagcgactcgacgagtacaaacggctgatgagccttgggaaggcctacggggtcgagtcccacgtgctgtctccagctgagactaaaacactttaccccctgatgaatgtcgatgatctctatggcactctgtacgtgccccacgatggaacaatggaccctgcaggaacatgcaccacactcgcccgggccgccagtgcccggggtgctcaagtgatcgaaaactgccccgttactgggataagggtttggactgacgatttcggtgtcagaagagtcgccggtgtggaaactcaacatgggtcgattcagaccccctgcgtagttaattgcgctggagtatgggcatccgcagtggggcggatggctggcgttaaggtgccactggtcgcaatgcatcatgcctacgtagtgacggagcgtattgaggggattcagaacatgccaaatgtccgggatcacgacgcctctgtctaccttcggctccagggcgatgccctgtcagtgggggggtacgaggccaaccctatcttctgggaagaagtgtctgacaagttcgcctttggcctctttgacctggactgggaggtctttacacagcatatagagggagcaattaaccgggtacccgtcctcgaaaaaaccggcattaaatcaactgtgtgcggcccagagagcttcacacccgatcacaagcctttaatgggggaagcacccgagctgagaggttttttcctgggttgtgggttcaatagcgctggtatgatgcttggggggggttgcggacaggagctggcccactggattattcacggacggccggagaaggacatgcatggctatgatattagaaggtttcatcactccctgacagatcatccacggtggatcagggagcgaagtcatgagagttacgcgaagaattactctgtagtattccctcacgatgaaccattagccggtcggaatatgcgcagagatcctctccacgaagagctgctgggccagggttgcgtgttccaggagcgacacgggtgggagcgcccaggctggttccacccaaggggcccagcccctgtgcttgaatacgactattacggtgcttacggaagcagagcccatgaagattacgcgtaccggcggctcctggctgacgaatatacttttgcctttcctccccaccacgataccattaagaaggagtgccttgcatgtagaggagccgctgctgtcttcgatatgtcgtatttcggaaaattttacttagtgggattagatgcgcgaaaggctgctgactggctgttctccgcagatgtaagtagaccacccgggtcaacggtttatacctgcatgttaaaccacaggggcgggacagaatccgatctgactgtctctcggctggccccttctcaccaggccagtcccttggctcccgccttcgaaggcgacgggtactacctggcgatgggtggagcagtagctcagcataattggtcccatattaccaccgtgttacaggaccagaagagtcagtgccaactaatcgatagcagcgaagacttgggcatgatttctattcagggccctgcatctcgtgccatcctccaggaggtgttagacgcagatctgtcaaatgaagctttcccattcagcacccataagctccttagggcggctggacatctggttagggcaatgcggctgagctttgtcggggaactcggatgggagctccatattcccaaagcatcttgtgtacctgtctacagagcagtgatggcggctggtgctaagcacgggcttataaatgccggttatcgtgccattgattcgctaagcattgagaaggggtatagacactggcacgctgaccttcgcccggatgattcaccattggaggccgggttggctttcacttgtaaactgaagtcacctgtgccctttttggggcgggaagccctcgagcagcagcgcgctgccgggcttcgtagacgcttagtctgcttcacaatggaggacaaagtgcctatgtttggattggaagccatttggcggaatggccaagtggtgggacacgtgcggagagcagactttggcttcgccattgacaagactattgcctacggctacatccatgacccctctggcggccccgtgagcctggatttcgtgaagtctggcgattatgcccttgagagaatgggggtgacatacggcgctcaggcccacctcaagtctccctttgatcctaacaacaaacgggtcaaagggatttactag

SEQ ID NO: 49658 - DNA, 2253 bp, Artificial Sequence
  derived and/or modified sequence
atgagtcttggaaaggcgtacggtgtagaatcacatgtcttatcgccggccgagaccaagacactttatcctctcatgaacgtggatgacctgtatggtactttgtacgtcccgcacgacggcaccatggacccggccgggacttgcaccacacttgcacgcgcagccagcgcaagaggcgctcaggtgatagaaaactgccctgttactggcatcagagtttggactgatgacttcggcgtgagacgcgtagccggtgtcgaaactcagcatggctccattcaaaccccctgtgtcgtgaactgtgccggcgtttgggcatccgctgtgggaaggatggctggcgtaaaagtgccgctggtggcaatgcaccatgcttatgtggtcacggagcggattgaaggcattcagaacatgcctaacgttcgcgatcacgacgcctccgtttatttacgactccagggtgacgctctgtcagttggcggctacgaggccaatcctatcttctgggaagaagtatctgataaatttgcattcggattgtttgacttggactgggaggtgttcacccagcacatagagggggccatcaatagggtccccgtgctggagaaaacgggaataaagagtacagtttgtggccccgaatccttcacacctgaccataagccactcatgggagaggcacccgagctccgggggtttttcctgggctgcggtttcaattccgccggaatgatgctgggaggaggttgcggccaggagctggctcactggatcatacacggacgtccggaaaaggatatgcatggctatgatattcggcggttccaccactcgctgactgaccatccgaggtggatcagagaaaggagccacgagtcctacgccaagaattattccgttgtgtttcctcacgacgagcccctggctggacgaaatatgcgcagagatcccctccacgaggagctgctggggcagggatgcgtttttcaggagcgccacggctgggaaaggccagggtggtttcatcccaggggccccgctcctgtgctggagtacgattactacggcgcctatggctccagggcacacgaggactacgcctacaggcggctgctggctgacgagtatacctttgcattccccccccaccacgacaccattaagaaggagtgtctggcctgcagaggtgcagccgcagtttttgacatgagttattttgggaaattttacctggtcggcttggatgcaagaaaggccgctgattggcttttcagcgcggatgttagcagacctcccggatctacagtgtacacctgcatgctgaaccaccgaggtgggacagagagcgatctcacagttagccgtcttgctccgagccatcaggcgtcccctcttgcccctgctttcgagggggacggctattatctggcgatggggggcgccgtggctcagcacaactggtcccatatcactaccgtgctgcaggatcagaaatcacagtgtcaactcatcgactcgagcgaggacctgggaatgatctccatccagggccctgctagcagggcgatcctgcaggaggtgctagacgcagatctctctaacgaagcatttccattttcgacacacaagttgttgcgagcagccggacatctcgtgagggcaatgagacttagcttcgtgggggaactcggttgggagctgcacatcccaaaagctagttgcgtgcccgtgtatagagccgtaatggccgcgggggccaaacacgggttaatcaacgccggttacagagcgatagactccctgagtatcgagaagggctacaggcattggcacgccgatctccgtcctgatgattccccgttagaagctggattggccttcacttgtaaactgaaatctcccgtcccttttctaggtcgagaggccctggagcagcagcgggcagcaggactccgccgccgtcttgtgtgctttactatggaagacaaggtccctatgttcggcttagaggccatttggcgaaacggtcaggtggtgggtcacgtgcggagagccgactttggctttgccatcgacaaaactatagcgtacggctatatacatgacccgtccgggggacctgtgagcctggactttgtgaagagtggcgactacgcgctggagcgtatgggagtcacctatggcgctcaggctcacctgaaaagccccttcgatccaaacaacaagcgagttaaaggcatttactag

SEQ ID NO: 49659 - DNA, 1830 bp, Artificial Sequence
  derived and/or modified sequence
atggccagtctctcacgagcactgagagttgccgcagcccacccacgccagtctcctacccggggtatgggtccttgtaacttatccagtgcagcaggccctactgctgagaagtccgtcccctaccagcggacgttgaaagagggacagggcacttctgtggtcgctcagggaccttcccgaccacttccgagcaccgctaatgtggtggttattgggggtggcagcctggggtgccagactctttatcacttggcaaaactgggcatgtccggggctgttctgctggaaagggaaaggctgaccagcgggacaacctggcacaccgccggattgttgtggcagctgcggccctctgacgtagaagtcgagctgttggcgcatactcgccgcgtggtgtctagagaactcgaggaggaaacgggcctgcacacaggttggatccaaaacggaggccttttcattgcctccaaccgccagagacttgacgaatacaaacgcttaatgtccctagggaaggcatacggggtggaatcccacgtgttgagtccggccgagactaaaacactgtaccccttaatgaatgtggacgatctgtacgggacattgtacgtgccccatgatggtacaatggatccagctgggacttgcacaaccctggctcgagccgccagtgccaggggtgcacaggttatagagaattgtccggttacaggaattcgggtgtggactgatgatttcggagtgaggagagttgctggggtcgagactcaacatggttctatccagactccgtgtgtagtgaactgcgcaggagtgtgggcctcagctgtgggcaggatggctggcgttaaagtccccctcgttgctatgcaccatgcctacgtggtcacagaacgaattgagggtattcagaacatgcccaacgtgcgtgatcatgatgcctccgtctacctccgactgcagggggacgccctatcggtgggaggttacgaggccaatcctatattctgggaagaagtatcagacaagtttgcattcggcctgttcgacctggactgggaggtctttactcagcacatagaaggcgcaatcaatagagttccggtgctggaaaaaactggcatcaaatcgaccgtgtgcggccccgagtctttcacccctgaccataagcccttgatgggagaggcacccgagctccgaggatttttcctcgggtgcgggttcaatagcgctggtatgatgctgggcggcggttgcggccaggagctggcacattggatcatacacggtcgccccgaaaaagacatgcacggctatgacatccgccgctttcaccacagcctcacggatcacccgcggtggatcagggagcgaagtcacgagtcttatgccaagaattacagcgtcgttttcccacacgacgagcctttggccggccgtaatatgcggagggaccccctgcatgaggaactgctgggccagggatgcgtgtttcaagaacgccatggttgggaaaggcctggttggttccacccaagggggcctgctcccgtgctcgagtacgattactacggtgcgtacggctcccgtgctcacgaggactacgcttaccggagactgctggccgatgaatacacctttgccttccctccccaccatgacactattaaaaaagagtgtctggcatgccgaggggcagcagccgtgttcgacatgagctactttggcaaattctatctggttgggcttgatgctcgtaaggctgcagattggctgttctccgcagatgttagccgccccccagggctacatcgagtgcatgtgtag

SEQ ID NO: 49660 - DNA, 2757 bp, Artificial Sequence
  derived and/or modified sequence
atggcctccctgagtcgcgccctgagagtagccgcagctcatccgcgccagtctccaacaagagggatgggcccatgcaatctgagtagcgctgccggacccaccgcggaaaagagtgtaccctaccaaagaacgcttaaggagggtcagggaactagtgttgtggctcagggtccaagccggcccctcccatctacagcaaatgtggttgtcatcggagggggcagcctcggatgccagacgctctatcacctggcaaagctaggcatgtctggcgctgtgttgctggagagggagagactgactagtgggaccacgtggcatacagccggactactgtggcagctgcgacccagcgacgtcgaagtcgagctgctggcacacactcggagggtggtgagtcgtgaactggaggaagaaacaggcctgcacacagggtggatccagaacggcggcctgtttatcgctagcaacaggcagagactcgatgagtacaagagactgatgtccttgggaaaggcttacggggtcgaatctcacgtattgtcgcccgctgagaccaagactttatatcctctgatgaatgtggacgacttgtatgggaccctgtacgtcccacacgacgggacgatggacccagctggtacctgcacaactctggcgagagccgcgtccgccaggggtgcccaggtgatcgagaattgccctgtaacgggcatcagggtgtggaccgacgactttggggtccggcgcgtagccggggtcgagacacagcacggctccattcaaacaccatgtgtcgtaaattgtgccggcgtctgggcttccgcagtgggccggatggcaggagtgaaggttccccttgtggctatgcaccacgcatacgtggtgacagaaaggatcgaggggattcagaacatgccgaatgtccgggaccacgatgctagcgtgtatctgcggctgcagggagacgctttgtctgttggaggctacgaggccaaccccatattctgggaggaggtgtctgacaagtttgcattcggtctttttgacttggattgggaagtgttcacccaacacatagaaggcgccataaaccgggtgccggtccttgaaaagacaggtattaagtctactgtctgtggacccgaatcttttacacccgatcacaaaccacttatgggggaagcccctgagctgcggggcttcttcttaggatgcgggttcaactcggccggtatgatgctcggcggcgggtgtggacaggagctggcccattggattatccacggaagacctgagaaagacatgcatgggtacgacattagaaggttccaccactccctgaccgatcatcctagatggattcgggaacggtcgcatgagagttatgcgaagaactattccgttgtgtttccgcatgatgaacctttagctggtcgcaatatgcgccgagatccccttcatgaagagctattggggcaggggtgtgtttttcaagagagacacggatgggagcgccccggttggttccacccccgcggcccagcacccgtattggaatatgactattacggtgcatacggttcacgagctcacgaagactatgcctatcggaggcttctagccgatgagtacacttttgcttttcccccacatcacgataccatcaaaaaggagtgtctggcatgtaggggtgcagcagccgtcttcgacatgtcctattttgggaaattctacctcgtcggcttggatgccaggaaggccgcagattggctgttcagtgcagacgtgtctcgaccaccaggcagcaccgtgtacacatgcatgctcaaccatcgcggagggaccgaatctgatcttaccgtcagccggctcgcaccgagccatcaggcttccccattggcccccgcctttgagggcgacggatactacctggccatggggggggcggtggctcagcacaactggtcacacatcactacagtgctgcaggaccaaaagagccaatgccaactgatagactcatcggaggacttaggaatgatctccatacaaggtccggcctcaagggcgatcctgcaggaggtgcttgatgccgacttaagtaacgaggccttccctttttctactcacaagttgcttcgtgctgccggacatttagtacgcgccatgagactgagctttgtgggggagttagggtgggaactgcatatcccgaaagctagctgcgttccagtctaccgcgcggtgatggccgcgggagctaaacatgggctcatcaacgccggatacagagctatcgacagcctttctatcgagaagggctatcgacattggcacgccgacttgcggcctgatgactctcctctggaggccggcctcgccttcacgtgcaaactcaagtcacccgtgccctttctgggacgcgaggcacttgaacagcaacgagccgccgggctgaggagacggttggtctgtttcacaatggaggacaaggtgccaatgttcggcttggaagcgatctggcgtaatgggcaggtcgtggggcatgtgcgccgggctgacttcggctttgcaatcgataagacaatagcttacggctatatccatgatccctccggtggaccagtgtctctggatttcgtaaaaagcggagactacgcactggagagaatgggagtgacttatggagctcaggcccacctcaaaagtccttttgaccccaacaataagcgggtgaaaggaatctattag

SEQ ID NO: 49661 - DNA, 2266 bp, Artificial Sequence
  derived and/or modified sequence
gtgccgtgtcggcagttaggagggcaggtggcggggtggggggttgtctgcaggagcagcggccagggaggggcatggggctgtggggctgtggggtgtctgatgggggcagatcccagggaggccaaggcagtggcagaaaagctggactctggagcccacgcacctgcctggcttcgtgccactgccaggtccaggacttgtctgtgcccttgggcgagatataacttctctgcgcctcactttcctcatctgtagaaaggggcacacctggtaggagtgtaagacgcttcccgcaggggctggcccagagcaggagctgggcctgggattgccgtggctccagggagcagccctggctgaggtcctgggtaaccacctctccctgtcgttccccaccttgggtgcatccagctcctcctccagcctcctgggccctggctgggctctcagacccaccaggcaaccctgcggcctcctttgtgcctctgttttgcctggacctcatgggggccccctgcccgcgtccacaacacacgggcactcagtgcagggctctccgagggcagggccaggcctgaccccatcacagcctcagcgggaccccgctctggggagggaagcggggaggggccaaagaggcaggctgaggaccacgtcttttcttcccaggtcctcgagtacgactactacggggcttacgggagccgcgcgcacgaggactacgcctaccgcaggctgctggcagacgagtacaccttcgccttcccgccccaccacgacacgatcaagaaggagtgcctggcctgcagaggggccgccgctgtgtttgacatgtcctacttcgggaagttctacctggtggggctggatgcaaggaaggctgccgactggctcttctccgcagatgtcagccgacccccaggctccaccgtgtacacgtgcatgctcaaccaccgtgggggcaccgagagtgacctgactgtcagccgcctggcacccagccaccaggcctccccgctggcccccgcctttgaaggggacggttactacctggccatgggcggggccgtggcccagcacaactggtcccacatcaccaccgtgctgcaggaccagaagtcccagtgccagctcatcgacagctccgaggacctgggtatgatcagtatccagggcccagccagccgagccattttgcaggaggtgctggacgcagacctgagcaacgaggccttcccgttctccacccacaagctactgagagccgcagggcacctggtccgagccatgcggctgtcctttgtgggggagctgggctgggagctgcacattccaaaggcgtcctgcgtgcctgtgtaccgggctgtgatggccgcgggtgccaagcacggcctcatcaacgcagggtaccgcgccatcgactccctgagcattgagaaaggctaccggcactggcacgcggacctgcggccagacgacagccccctggaggcaggcctggccttcacctgcaagctcaagtcgccggtgcccttcctggggagggaggccctggagcagcagcgggccgcaggcctccgccggcgcctggtgtgcttcaccatggaggagccgctgtggacgcgtccccaccctgcggtttctggggccccagctttctctactgcttcttccagcaaagtacccatgtttggcctggaggccatctggaggaacggccaagtggtgggccatgtccggagggctgactttgggttcgccatcgacaagaccatcgcctacggttacatccatgaccccagcggtgggccggtctcgctggactttgtgaagagcggggactatgccctggagagaatgggggtgacctatggtgcccaggctcacctgaagtcgcccttcgaccccaacaacaagagggtgaagggaatctactgagggctcagaccacatgccccatcccatgctgtccatccattctcacaggtcccaaatggccctgggtcccaggaccctggacccagccagaacttgtgccctccctgtccttagcctaggcctagtcctgcgaaaacccccaaaccagatacggacagagaccaagatggcccatcctgtggtcactgactggaaggcagtctctaatccaccccaatcctcccagaaagcaaacctgtaagtgtcttgggctcagggaccatggcttgtagccctttccaagcttctagaaggtgcttagtaaatacttgataagccccacgtg

SEQ ID NO: 49662 - DNA, 3344 bp, Artificial Sequence
  derived and/or modified sequence
agtgtgggctacccggccactgccctggagctgtggtgactgctgcgtttttctcccatgcacttgcacgtccaggactcctgggagaacttgggccacactccttccttgccctcttgagctcattcgtcaccctgttgggtgagcacagccctagctcaggccactgggcaagccacaccatccaaagaggaggtcctctgccccaggacccccacaccaccccagctccctgtttcgctgaggcctggagcccccatggcctcactgagccgagccctacgtgtggctgctgcccaccctcgccagagccctacccggggcatggggccatgcaacctgtccagcgcagctggccccacagccgagaagagtgtgccatatcagcggaccctgaaggagggacagggcacctcggtggtggcccaaggcccaagccggcccctgcccagcacggccaacgtggtggtcattggtggaggcagcttgggctgccagaccctgtaccacctggccaagctgggcatgagtggggcggtgctgctggagcgggagcggctgacctccgggaccacctggcacacggcaggcctgctgtggcagctgcggcccagtgacgtggaggtggagcttctggcccacactcggcgggtggtgagccgggagctggaggaggagacgggactacacacgggctggatccagaatgggggcctcttcatcgcgtccaaccggcagcgcctggacgagtacaagaggctcatgtcgctgggcaaggcgtatggtgtggaatcccatgtgctgagcccggcagagaccaagactctgtacccgctgatgaatgtggacgacctctacgggaccctgtatgtgccgcacgacggtaccatggaccccgctggcacctgtaccaccctcgccagggcagcttctgcccgaggagcacaggtcattgagaactgcccagtgaccggcattcgtgtgtggacggatgattttggggtgcggcgggtcgcgggtgtggagactcagcatggttccatccagacaccctgcgtggtcaactgtgcaggagtgtgggcaagtgctgtgggccggatggctggagtcaaggtcccgctggtggccatgcaccatgcctatgtcgtcaccgagcgcatcgaggggattcagaacatgcccaatgtccgtgatcatgatgcctctgtctacctccgcctccaaggggatgccttgtctgtgggtggctatgaggccaaccccatcttttgggaggaggtgtcagacaagtttgccttcggcctctttgacctggactgggaggtgttcacccagcacattgaaggcgccatcaacagggtccccgtgctggagaagacaggaatcaagtccacggtctgcggccctgaatccttcacgcccgaccacaagcccctgatgggggaggcacctgagctccgagggttcttcctgggctgtggcttcaacagcgcaggaatgatgctgggtggtggctgtgggcaggagctggcccactggatcatccatgggcgcccggagaaggacatgcatggctatgacatcaggcgcttccatcactcgctcacggaccacccccgctggatccgagagcgaagccatgagtcctacgccaagaactactccgtcgtcttcccccacgatgagccgctggccgggcgcaacatgaggagagacccgctgcacgaggaactccttggacaaggctgcgtgttccaggagcggcatggctgggagcgaccgggatggtttcatccccgaggcccagctccggtcctcgagtacgactactacggggcttacgggagccgcgcgcacgaggactacgcctaccgcaggctgctggcagacgagtacaccttcgccttcccgccccaccacgacacgatcaagaaggagtgcctggcctgcagaggggccgccgctgtgtttgacatgtcctacttcgggaagttctacctggtggggctggatgcaaggaaggctgccgactggctcttctccgcagatgtcagccgacccccaggctccaccgtgtacacgtgcatgctcaaccaccgtgggggcaccgagagtgacctgactgtcagccgcctggcacccagccaccaggcctccccgctggcccccgcctttgaaggggacggttactacctggccatgggcggggccgtggcccagcacaactggtcccacatcaccaccgtgctgcaggaccagaagtcccagtgccagctcatcgacagctccgaggacctgggtatgatcagtatccagggcccagccagccgagccattttgcaggaggtgctggacgcagacctgagcaacgaggccttcccgttctccacccacaagctactgagagccgcagggcacctggtccgagccatgcggctgtcctttgtgggggagctgggctgggagctgcacattccaaaggcgtcctgcgtgcctgtgtaccgggctgtgatggccgcgggtgccaagcacggcctcatcaacgcagggtaccgcgccatcgactccctgagcattgagaaaggctaccggcactggcacgcggacctgcggccagacgacagccccctggaggcaggcctggccttcacctgcaagctcaagtcgccggtgcccttcctggggagggaggccctggagcagcagcgggccgcaggcctccgccggcgcctggtgtgcttcaccatggaggacaaagtacccatgtttggcctggaggccatctggaggaacggccaagtggtgggccatgtccggagggctgactttgggttcgccatcgacaagaccatcgcctacggttacatccatgaccccagcggtgggccggtctcgctggactttgtgaagagcggggactatgccctggagagaatgggggtgacctatggtgcccaggctcacctgaagtcgcccttcgaccccaacaacaagagggtgaagggaatctactgagggctcagaccacatgccccatcccatgctgtccatccattctcacaggtcccaaatggccctgggtcccaggaccctggacccagccagaacttgtgccctccctgtccttagcctaggcctagtcctgcgaaaacccccaaaccagatacggacagagaccaagatggcccatcctgtggtcactgactggaaggcagtctctaatccaccccaatcctcccagaaagcaaacctgtaagtgtcttgggctcagggaccatggcttgtagccctttccaagcttctagaaggtgcttagtaaatacttgataagccccacgtgaaaa

SEQ ID NO: 49663 - DNA, 1425 bp, Artificial Sequence
  derived and/or modified sequence
atggccagtctgtcccgcgctctaagagtggccgctgcacatccacggcagagccccacccggggcatggggccgtgtaacttgtcctcggccgctggacccacggccgagaagagtgtgccgtaccagcgcactttgaaagaaggccagggtacgagcgtggtggcacagggaccgagcagaccactgccttccaccgccaatgttgttgtgatcgggggaggcagcctgggatgccagactctctatcacctggctaaattgggtatgtctggcgctgtcctgttggaaagagagagattgacaagcgggaccacctggcatacagctggtctactctggcagctccgccccagcgatgtcgaggttgaactgctagcccacaccaggagggtggtttccagggaactggaagaagaaacgggcctgcacacagggtggatccaaaatggaggattatttattgccagtaatcgccaacggcttgatgagtataagcgactgatgagccttgggaaagcttacggcgtagaaagccacgtgctgagtcccgccgaaaccaaaacactgtacccacttatgaacgtggacgacctttatgggactctttacgttcctcacgacggaacaatggaccccgcagggacttgtaccaccttggcacgggccgcctccgcccgcggcgcccaggtcattgagaactgtcccgtaactggtataagagtctggacagacgattttggcgtgcgccgcgttgccggggtggagactcagcacggttctatacagacgccctgtgttgtaaactgtgctggagtctgggcgagtgccgtcggccggatggctggcgtgaaagtccctctcgtagccatgcaccacgcctatgtcgtcacagagcggatcgagggcatacagaacatgccaaacgtcagagaccacgatgctagtgtataccttaggctgcaaggtgatgcactctcagtcgggggttatgaggccaatcctatcttttgggaggaagtctccgacaagtttgccttcggcctatttgatctcgactgggaagtgttcacacagcacattgagggcgccataaatcgggtcccagtactggagaagactggtattaagagcacggtctgcggccctgagagtttcacgccggaccataaacctctgatgggagaggctcctgagctgcgggggtttttcttaggatgtggctttaactctgctggaatgatgctgggcggagggtgcggccaagaattagcccactggatcattcatgggagacctgagaaggacatgcacgggtatgatatccggagattccaccacagcttaaccgaccatccaagatggatccgcgagcgaagtcacgagtcttaccaagagctgctgcggcgactgccgcctcgatag

SEQ ID NO: 49664 - DNA, 1107 bp, Artificial Sequence
  derived and/or modified sequence
atgagctactttgggaagttctacctggtgggcctggatgccaggaaggctgctgactggctgttcagcgcagatgtgtccaggcctcctggcagcacagtgtacacctgcatgctgaaccacagaggaggaacagaaagtgacctgactgtgtcccggctggcccccagccaccaggccagccccctggccccagcctttgaaggagatggctactacctggccatgggcggcgctgtggcccagcacaactggagccacatcaccaccgtgctgcaggaccagaagagccagtgccagctgattgacagcagcgaggacctgggcatgatcagcatccagggccctgccagccgggccatcctgcaggaggtgctggatgctgacctgagcaatgaggccttccccttcagcacccacaagctgctgcgggccgccggccacctggtgcgggccatgaggctgagctttgtgggggagctgggctgggagctgcacatccccaaggccagctgtgtgcctgtgtacagagctgtgatggccgccggggccaagcacggcctcatcaatgccggctaccgggccatcgacagcctgagcattgagaagggctaccgccactggcacgccgacctgcggccagatgacagccccctggaggccggcctggccttcacctgcaagctgaagagccctgtgcccttcctgggccgggaggccctggagcagcagagagctgctggcctgcggcggcggctggtgtgcttcaccatggaggagcccctgtggacccggccccaccctgctgtgtctggggccccagccttcagcacagccagcagcagcaaggtgcccatgtttggcctggaggccatctggagaaatggccaggtggtgggccacgtgagaagagctgactttggatttgccatcgacaagaccatcgcctacggctacatccatgaccccagcggcggccctgtgtccctggactttgtgaagagcggggactatgccctggagaggatgggcgtgacctatggagcccaggcccacctgaagagcccctttgaccccaacaacaagagggtgaagggcatctactag

SEQ ID NO: 49665 - DNA, 2757 bp, Artificial Sequence
  derived and/or modified sequence
atggccagcctgagccgggccctgcgggtggccgccgcccacccccggcagagccccacccggggcatgggcccctgcaacctgagcagcgctgctggccccacagctgagaagtctgtgccctaccagaggaccctgaaggagggccagggcacctctgtggtggcccagggccccagccggcccctgcccagcacagccaacgtggtggtgattggaggcggcagcctgggctgccagaccctgtaccacctggccaagctgggcatgtctggagctgtgctgctggagcgggagcggctgaccagcggcaccacctggcacacagctggcctgctgtggcagctgcggcccagtgatgtggaggtggagctgctggcccacacccggcgggtggtgtcccgggagctggaggaggagaccggcctgcacacaggctggatccagaatggaggcctcttcatcgccagcaaccggcagaggctggatgagtacaagaggctgatgagcctgggcaaggcctatggagtggagagccacgtgctgagccctgctgagaccaagaccctgtaccccctgatgaatgtggatgacctgtatggcaccctgtatgtgccccatgatggcaccatggaccctgctggcacctgcaccaccctggcccgggccgccagcgcccggggggcccaggtgattgagaactgccctgtgacaggcatccgggtgtggacagatgactttggagtgcggcgggtggccggcgtggagacccagcacggcagcatccagaccccctgtgtggtgaactgtgccggcgtgtgggccagcgctgtgggccgcatggccggcgtgaaggtgcccctggtggccatgcaccacgcctacgtggtgacagaaagaattgagggcatccagaacatgcccaacgtgcgggaccatgatgcctctgtgtacctgcggctgcagggagatgccctgtctgtgggcggctatgaggccaaccccatcttctgggaggaggtgtctgacaagtttgccttcggcctgtttgacctggactgggaggtgttcacccagcacattgaaggagccatcaacagagtgcctgtgctggagaagacaggcatcaagagcacagtgtgtggccctgagagcttcaccccagaccacaagcccctgatgggagaggcccctgagctgcggggcttcttcctgggctgcggcttcaacagcgctggcatgatgctgggcggcggctgcggccaggagctggcccactggatcatccacggccggcctgagaaggacatgcacggctatgacatccgccgcttccaccacagcctgacagaccacccccgctggatccgggagaggagccatgagagctatgccaagaactacagcgtggtgttcccccatgatgagcccctggccggcaggaacatgaggcgggaccccctgcacgaggagctgctgggccagggctgtgtgttccaggagagacatggctgggagcggcccggctggttccacccccggggccctgcccctgtgctggagtatgactactatggagcctacggcagccgggcccacgaggactatgcctacagaaggctgctggctgatgagtacacctttgccttccccccccaccacgacaccatcaagaaggagtgcctggcctgcagaggagctgctgctgtgtttgacatgagctactttgggaagttctacctggtgggcctggatgccaggaaggctgctgactggctgttcagcgcagatgtgtccaggcctcctggcagcacagtgtacacctgcatgctgaaccacagaggaggaacagaaagtgacctgactgtgtcccggctggcccccagccaccaggccagccccctggccccagcctttgaaggagatggctactacctggccatgggcggcgctgtggcccagcacaactggagccacatcaccaccgtgctgcaggaccagaagagccagtgccagctgattgacagcagcgaggacctgggcatgatcagcatccagggccctgccagccgggccatcctgcaggaggtgctggatgctgacctgagcaatgaggccttccccttcagcacccacaagctgctgcgggccgccggccacctggtgcgggccatgaggctgagctttgtgggggagctgggctgggagctgcacatccccaaggccagctgtgtgcctgtgtacagagctgtgatggccgccggggccaagcacggcctcatcaatgccggctaccgggccatcgacagcctgagcattgagaagggctaccgccactggcacgccgacctgcggccagatgacagccccctggaggccggcctggccttcacctgcaagctgaagagccctgtgcccttcctgggccgggaggccctggagcagcagagagctgctggcctgcggcggcggctggtgtgcttcaccatggaggacaaggtgcccatgtttggcctggaggccatctggagaaatggccaggtggtgggccacgtgagaagagctgactttggatttgccatcgacaagaccatcgcctacggctacatccatgaccccagcggcggccctgtgtccctggactttgtgaagagcggggactatgccctggagaggatgggcgtgacctatggagcccaggcccacctgaagagcccctttgaccccaacaacaagagggtgaagggcatctactag

SEQ ID NO: 49666 - DNA, 2253 bp, Artificial Sequence
  derived and/or modified sequence
atgagcctgggcaaggcctatggagtggagagccacgtgctgagccctgctgagaccaagaccctgtaccccctgatgaatgtggatgacctgtatggcaccctgtatgtgccccatgatggcaccatggaccctgctggcacctgcaccaccctggcccgggccgccagcgcccggggggcccaggtgattgagaactgccctgtgacaggcatccgggtgtggacagatgactttggagtgcggcgggtggccggcgtggagacccagcacggcagcatccagaccccctgtgtggtgaactgtgccggcgtgtgggccagcgctgtgggccgcatggccggcgtgaaggtgcccctggtggccatgcaccacgcctacgtggtgacagaaagaattgagggcatccagaacatgcccaacgtgcgggaccatgatgcctctgtgtacctgcggctgcagggagatgccctgtctgtgggcggctatgaggccaaccccatcttctgggaggaggtgtctgacaagtttgccttcggcctgtttgacctggactgggaggtgttcacccagcacattgaaggagccatcaacagagtgcctgtgctggagaagacaggcatcaagagcacagtgtgtggccctgagagcttcaccccagaccacaagcccctgatgggagaggcccctgagctgcggggcttcttcctgggctgcggcttcaacagcgctggcatgatgctgggcggcggctgcggccaggagctggcccactggatcatccacggccggcctgagaaggacatgcacggctatgacatccgccgcttccaccacagcctgacagaccacccccgctggatccgggagaggagccatgagagctatgccaagaactacagcgtggtgttcccccatgatgagcccctggccggcaggaacatgaggcgggaccccctgcacgaggagctgctgggccagggctgtgtgttccaggagagacatggctgggagcggcccggctggttccacccccggggccctgcccctgtgctggagtatgactactatggagcctacggcagccgggcccacgaggactatgcctacagaaggctgctggctgatgagtacacctttgccttccccccccaccacgacaccatcaagaaggagtgcctggcctgcagaggagctgctgctgtgtttgacatgagctactttgggaagttctacctggtgggcctggatgccaggaaggctgctgactggctgttcagcgcagatgtgtccaggcctcctggcagcacagtgtacacctgcatgctgaaccacagaggaggaacagaaagtgacctgactgtgtcccggctggcccccagccaccaggccagccccctggccccagcctttgaaggagatggctactacctggccatgggcggcgctgtggcccagcacaactggagccacatcaccaccgtgctgcaggaccagaagagccagtgccagctgattgacagcagcgaggacctgggcatgatcagcatccagggccctgccagccgggccatcctgcaggaggtgctggatgctgacctgagcaatgaggccttccccttcagcacccacaagctgctgcgggccgccggccacctggtgcgggccatgaggctgagctttgtgggggagctgggctgggagctgcacatccccaaggccagctgtgtgcctgtgtacagagctgtgatggccgccggggccaagcacggcctcatcaatgccggctaccgggccatcgacagcctgagcattgagaagggctaccgccactggcacgccgacctgcggccagatgacagccccctggaggccggcctggccttcacctgcaagctgaagagccctgtgcccttcctgggccgggaggccctggagcagcagagagctgctggcctgcggcggcggctggtgtgcttcaccatggaggacaaggtgcccatgtttggcctggaggccatctggagaaatggccaggtggtgggccacgtgagaagagctgactttggatttgccatcgacaagaccatcgcctacggctacatccatgaccccagcggcggccctgtgtccctggactttgtgaagagcggggactatgccctggagaggatgggcgtgacctatggagcccaggcccacctgaagagcccctttgaccccaacaacaagagggtgaagggcatctactag

SEQ ID NO: 49667 - DNA, 1830 bp, Artificial Sequence
  derived and/or modified sequence
atggccagcctgagccgggccctgcgggtggccgccgcccacccccggcagagccccacccggggcatgggcccctgcaacctgagcagcgctgctggccccacagctgagaagtctgtgccctaccagaggaccctgaaggagggccagggcacctctgtggtggcccagggccccagccggcccctgcccagcacagccaacgtggtggtgattggaggcggcagcctgggctgccagaccctgtaccacctggccaagctgggcatgtctggagctgtgctgctggagcgggagcggctgaccagcggcaccacctggcacacagctggcctgctgtggcagctgcggcccagtgatgtggaggtggagctgctggcccacacccggcgggtggtgtcccgggagctggaggaggagaccggcctgcacacaggctggatccagaatggaggcctcttcatcgccagcaaccggcagaggctggatgagtacaagaggctgatgagcctgggcaaggcctatggagtggagagccacgtgctgagccctgctgagaccaagaccctgtaccccctgatgaatgtggatgacctgtatggcaccctgtatgtgccccatgatggcaccatggaccctgctggcacctgcaccaccctggcccgggccgccagcgcccggggggcccaggtgattgagaactgccctgtgacaggcatccgggtgtggacagatgactttggagtgcggcgggtggccggcgtggagacccagcacggcagcatccagaccccctgtgtggtgaactgtgccggcgtgtgggccagcgctgtgggccgcatggccggcgtgaaggtgcccctggtggccatgcaccacgcctacgtggtgacagaaagaattgagggcatccagaacatgcccaacgtgcgggaccatgatgcctctgtgtacctgcggctgcagggagatgccctgtctgtgggcggctatgaggccaaccccatcttctgggaggaggtgtctgacaagtttgccttcggcctgtttgacctggactgggaggtgttcacccagcacattgaaggagccatcaacagagtgcctgtgctggagaagacaggcatcaagagcacagtgtgtggccctgagagcttcaccccagaccacaagcccctgatgggagaggcccctgagctgcggggcttcttcctgggctgcggcttcaacagcgctggcatgatgctgggcggcggctgcggccaggagctggcccactggatcatccacggccggcctgagaaggacatgcacggctatgacatccgccgcttccaccacagcctgacagaccacccccgctggatccgggagaggagccatgagagctatgccaagaactacagcgtggtgttcccccatgatgagcccctggccggcaggaacatgaggcgggaccccctgcacgaggagctgctgggccagggctgtgtgttccaggagagacatggctgggagcggcccggctggttccacccccggggccctgcccctgtgctggagtatgactactatggagcctacggcagccgggcccacgaggactatgcctacagaaggctgctggctgatgagtacacctttgccttccccccccaccacgacaccatcaagaaggagtgcctggcctgcagaggagctgctgctgtgtttgacatgagctactttgggaagttctacctggtgggcctggatgccaggaaggctgctgactggctgttcagcgcagatgtgtccaggcctcctggcctgcaccgggtgcacgtgtag

SEQ ID NO: 49668 - DNA, 1425 bp, Artificial Sequence
  derived and/or modified sequence
atggccagcctgagccgggccctgcgggtggccgccgcccacccccggcagagccccacccggggcatgggcccctgcaacctgagcagcgctgctggccccacagctgagaagtctgtgccctaccagaggaccctgaaggagggccagggcacctctgtggtggcccagggccccagccggcccctgcccagcacagccaacgtggtggtgattggaggcggcagcctgggctgccagaccctgtaccacctggccaagctgggcatgtctggagctgtgctgctggagcgggagcggctgaccagcggcaccacctggcacacagctggcctgctgtggcagctgcggcccagtgatgtggaggtggagctgctggcccacacccggcgggtggtgtcccgggagctggaggaggagaccggcctgcacacaggctggatccagaatggaggcctcttcatcgccagcaaccggcagaggctggatgagtacaagaggctgatgagcctgggcaaggcctatggagtggagagccacgtgctgagccctgctgagaccaagaccctgtaccccctgatgaatgtggatgacctgtatggcaccctgtatgtgccccatgatggcaccatggaccctgctggcacctgcaccaccctggcccgggccgccagcgcccggggggcccaggtgattgagaactgccctgtgacaggcatccgggtgtggacagatgactttggagtgcggcgggtggccggcgtggagacccagcacggcagcatccagaccccctgtgtggtgaactgtgccggcgtgtgggccagcgctgtgggccgcatggccggcgtgaaggtgcccctggtggccatgcaccacgcctacgtggtgacagaaagaattgagggcatccagaacatgcccaacgtgcgggaccatgatgcctctgtgtacctgcggctgcagggagatgccctgtctgtgggcggctatgaggccaaccccatcttctgggaggaggtgtctgacaagtttgccttcggcctgtttgacctggactgggaggtgttcacccagcacattgaaggagccatcaacagagtgcctgtgctggagaagacaggcatcaagagcacagtgtgtggccctgagagcttcaccccagaccacaagcccctgatgggagaggcccctgagctgcggggcttcttcctgggctgcggcttcaacagcgctggcatgatgctgggcggcggctgcggccaggagctggcccactggatcatccacggccggcctgagaaggacatgcacggctatgacatccgccgcttccaccacagcctgacagaccacccccgctggatccgggagaggagccatgagagctaccaggagctgctgcggcggctgccccccaggtag

SEQ ID NO: 49669 - DNA, 1107 bp, Artificial Sequence
  derived and/or modified sequence
atgagctacttcggcaagttctacctggtgggcctggacgcccggaaagcggccgactggctgttcagcgctgatgtatctcgcccgccaggttccacagtgtacacttgcatgctgaatcaccggggcggtacggagtcagatctcactgtctcacgacttgctcccagtcaccaagcctcgcccctcgcccccgccttcgaaggggatggttattacctggccatgggcggcgccgttgctcagcataattggagccacattacaaccgtgctgcaagatcagaaaagtcagtgtcagctgatagatagttccgaggatctgggaatgatctccatacagggcccagcaagccgagcaatcctgcaggaagtcctggacgcggacctgagcaacgaggcctttcccttttcaacccacaaacttctgcgggccgctgggcatctggtccgggcaatgcggctgagttttgtcggagagttaggctgggagctgcacatcccaaaggcttcatgcgtgcccgtctatcgagcagtcatggctgcgggcgctaaacatgggcttatcaatgcaggctatcgcgccattgactctttaagcatcgagaagggctacaggcactggcatgctgacttgcggcctgacgactccccactggaggcgggactggcattcacctgtaagctaaaatcgcccgtgccatttttggggagggaggcactcgagcagcagcgagcggccggcttaaggaggcggttggtgtgttttacaatggaagagcctctgtggacccgcccacatccagctgtaagtggcgcccctgcattcagtaccgcgtcttctagtaaggttccgatgttcggcctcgaagctatatggaggaatgggcaggtggtgggacatgtacggcgcgctgatttcggatttgctattgacaaaaccattgcgtacggatatatccacgaccccagtggcgggccagtgtctttggattttgtcaagtcgggggattacgcccttgaacggatgggagttacctacggcgcacaggcccacctcaaaagcccattcgatcccaataataagagagtgaagggaatctattag

SEQ ID NO: 49670 - DNA, 2757 bp, Artificial Sequence
  derived and/or modified sequence
atggccagcctgagccgggccctgcgggtggccgccgcccacccccgtcagagtccgaccagaggaatgggcccgtgcaacctttcctcagctgctggccccaccgccgaaaagagtgtaccctatcagaggactctgaaggaagggcagggaacctccgtagtggcccaaggtccatcacggccattaccttctaccgccaacgtggttgtgattggtggcggatccctgggatgtcagactttataccatctcgccaaattggggatgtcaggagccgtcctgctagagcgagaaaggctgacctcgggaaccacctggcatacggccggcctattatggcagctgcgacccagtgatgtggaggtcgaactgttggcgcataccaggcgcgtggtgtcacgcgagctggaagaggagacggggctgcataccggatggatacagaacggggggctgttcatcgcttccaataggcaacgcctggacgaatataagaggctgatgtccctgggtaaggcctatggagtggaaagtcatgtactatcaccagccgaaacgaagactctgtatccactgatgaacgttgatgatctttatggtacactgtatgttcctcatgatggtacaatggaccccgctggcacctgtaccacgttagcgagagcagcctccgccagaggtgctcaggtcatcgagaattgtcccgttacaggcatccgcgtctggaccgatgacttcggcgtgcgccgagtggctggagtggaaacccagcacggctcaattcagacaccttgtgtggtgaattgcgccggcgtgtgggcgagtgcagttgggagaatggcaggtgtgaaagtgcctctggtggctatgcaccacgcctacgtcgtgacagaacgcatcgagggtatccagaatatgccaaacgtgcgagatcatgacgcttcggtgtatctacgcctccaaggagatgcactgtccgttggcggatacgaggcaaacccaatcttttgggaggaagtgtccgataaattcgcttttggcctattcgacctagattgggaggtcttcacgcaacacatcgagggtgctatcaaccgggtacccgtcctggaaaagacaggcataaagtcaaccgtgtgcggtcccgagtctttcacccccgaccacaagcccttaatgggtgaagcgccagagctgagaggattctttctcgggtgtggatttaatagcgccggcatgatgctcgggggcgggtgtgggcaggagttggctcactggatcatacatggtcgccctgaaaaggacatgcacggctatgatatcaggaggtttcaccattcactgaccgaccacccaaggtggatccgggagcgaagccacgagtcttatgctaagaactacagtgtggtgtttccacacgacgagccccttgctggaagaaatatgcggcgggacccactccacgaagagctcctggggcagggctgtgtgttccaagagcgccacggatgggaacgaccagggtggttccacccacgcggacctgcacctgtgctggagtatgattactacggcgcctacggtagcagagctcacgaggactatgcctatcggcgtctgctggcagatgaatacacatttgccttcccaccacaccatgataccattaagaaggagtgtttggcctgtaggggcgcggcggctgttttcgatatgtcttactttgggaagttttatctcgtcggactggacgcccggaaggccgcggattggctgttttcagcggatgtcagtcgcccccccggaagtaccgtatatacatgcatgctaaaccacaggggcgggaccgagagcgatttgacagtttctagactggctccgagccaccaggcttccccactcgccccagcctttgagggagatggctattaccttgccatgggcggcgcagtggcacagcataactggtcgcacatcaccactgtgctccaggaccagaaatctcaatgccaacttattgactcatccgaggacttggggatgatctcaatccagggtcccgcttccagagccattttgcaggaggttttagatgctgatctgagtaacgaggcctttcccttctcaactcacaagcttctgcgggctgccggccatctggtacgggcaatgcggttatcgttcgtcggggagttgggatgggaactacatattcccaaggcctcttgcgtgcccgtgtaccgagctgtcatggcagcaggcgccaagcacggccttatcaacgctgggtacagggccatcgacagtctttccatcgagaaaggctacaggcactggcatgcagacctgcggcccgatgattctcccttggaagctggcctcgcattcacttgcaagctcaaatctcctgtccccttcttgggtcgggaggctctcgaacagcagagggcagccggcctgcggagacggttggtgtgttttactatggaagacaaggtccccatgttcgggctggaggccatctggcgcaacggccaggtggtcggccacgtccgccgagccgattttgggttcgcaattgacaaaacaattgcttatggctacattcacgacccctccggaggtccagtcagcctcgattttgttaaatccggagactacgcccttgagcgaatgggggtgacctatggcgcacaggctcatctcaaaagccccttcgatcccaacaacaagagggttaagggcatatattag

SEQ ID NO: 49671 - DNA, 2253 bp, Artificial Sequence
  derived and/or modified sequence
atgagcctgggcaaggcctacggcgtggagagccacgtgctgagcccggcagaaaccaaaactttatatccactgatgaatgtggacgatctttatgggaccctgtatgtgcctcacgacggtactatggaccctgcgggcacatgcacaacccttgctcgggctgccagtgcacgcggggcccaagtaatagagaactgccctgttactggaattagggtgtggaccgatgatttcggagtgcgtagagtggctggtgtggagacccagcacggatcgatccagaccccttgtgtagtaaactgcgctggtgtgtgggcaagcgctgtcggtagaatggcgggagtgaaagtgcctctggtagcaatgcatcatgcctacgtagttacagaacgcatcgagggcattcagaacatgccgaacgtgcgagaccacgacgcttccgtttacctgcgtctccagggggatgccctgtccgtgggcggatatgaagccaacccaatcttttgggaagaggtgtcagacaaatttgcattcgggttgtttgatctagattgggaagtgtttactcagcatatcgagggcgctattaacagagtgccggtgctggagaaaactggaatcaagtctactgtgtgtggacctgagtcttttacgccagaccacaagcctctgatgggggaggcaccagaactgcgcggcttttttttagggtgcggctttaactcggccgggatgatgttaggtggaggctgtgggcaggagctggcacactggatcatccatggccggcccgagaaagacatgcacggatacgatattaggcgcttccatcactctctcaccgaccacccccgctggatccgagagcgaagtcacgagtcatatgctaagaattattcagtcgtgttcccccacgatgagcctctcgccgggcggaacatgaggcgcgaccctttgcacgaagaactgttgggccagggatgcgtgtttcaggaaagacacggctgggagagacccggttggttccatccaaggggtcctgcgcctgtgcttgaatacgactattacggcgcctacgggagcagggcccacgaggactatgcttacaggcggctcctggctgacgaatacactttcgcatttccgcctcaccatgataccataaagaaggagtgtctggcttgtcgcggagcagccgcagtattcgatatgtcttatttcgggaagttttatcttgtcggcttggatgctcggaaggccgcagattggctcttcagcgccgacgtctccagaccgcctggatccacggtgtatacttgcatgttgaaccacaggggtgggaccgaaagcgacctgactgtgagccggctggcaccaagccatcaggcctcccccttggctccagccttcgagggtgatggctattacctggctatgggcggggcggttgcacagcacaactggagccatataactaccgtccttcaggatcaaaaatcccagtgtcagttaattgacagcagcgaagacctgggcatgatttccatacagggtccagcaagcagggccattctccaggaagtgttagatgccgacctcagcaatgaagcgttccccttctccactcacaagttactcagggccgcgggccacctcgttcgggccatgcggctgtccttcgtcggagagctggggtgggagctgcacattccaaaggcatcatgtgttcccgtatatagagctgttatggccgcgggcgctaagcatggtctaatcaatgctgggtatcgtgccatcgactctctgtctattgaaaagggttaccgtcattggcatgcagaccttcggcccgatgatagccccctggaggcgggccttgcctttacgtgcaaactaaagtctcccgtaccctttctcggacgggaggctctagagcagcagagagccgcgggccttaggcgccgcctcgtgtgttttactatggaggataaggtacctatgttcggactggaagccatctggcgtaacggccaagttgttggccatgtccgacgtgccgacttcggcttcgctatcgacaaaacaattgcttacgggtatattcatgacccatccggaggtcccgtgagccttgatttcgtaaaatctggagattatgcactggagcgcatgggggtgacatatggcgcacaggctcacctgaagagtccattcgaccctaataacaagagggttaaaggcatatactag

SEQ ID NO: 49672 - DNA, 1830 bp, Artificial Sequence
  derived and/or modified sequence
atggccagcctgagccgggccctgcgggtggccgccgcccaccccaggcagagtccgacaagaggcatgggcccatgtaacctcagctcagccgctggcccaacagctgagaaaagtgttccctatcagcgcacactcaaagagggtcagggcacaagcgtagtagcccagggcccaagtaggcccctgccctcaaccgctaacgtcgttgtcataggagggggctctttgggctgccagacactgtaccaccttgctaaactgggcatgagcggcgcagttcttctggagcgcgagaggttaacatctggcacgacttggcacacagctggcttgttatggcagctgcgtccttctgacgtagaagtcgagcttctagcccacacgagaagggttgtgagcagagaactggaggaggaaaccggccttcatacaggctggatccagaacgggggcttgttcatagcaagcaataggcagagactcgatgagtataaacgcctcatgtcattaggcaaggcgtatggcgtcgagagccacgtgctgtctcctgctgaaacgaaaaccctgtaccccctgatgaatgtcgacgacctatatggcaccctgtatgtaccacacgacggaaccatggatcctgctggaacttgtactactcttgctagggccgcttccgcccgcggcgcgcaggttatcgagaactgccccgtaacagggatccgcgtatggacagatgattttggagtcaggagagtggccggcgtagaaacacagcacggctctatccagaccccttgcgtggtcaattgcgccggagtatgggccagcgctgtcggccgcatggctggggtgaaagttcccttagtggcgatgcaccatgcttatgtggtgacggagcgtatcgagggaatccagaatatgcctaatgtaagagaccacgacgcttcagtctatcttagactccagggcgatgccctgagtgtcgggggttacgaggccaatcctattttttgggaggaggtgagtgataaatttgccttcgggctgtttgatttggactgggaagtgtttacccagcatatcgaaggcgctatcaaccgcgttcctgtgcttgaaaaaactgggatcaagtctactgtatgtggccccgagtccttcactcccgaccacaagccacttatgggcgaagctcccgagctgcggggattctttttgggctgcggattcaacagcgccggaatgatgctgggcggcggatgcgggcaggaactggcacactggattatccacgggcgccccgagaaggatatgcatggctacgatatccggcgattccaccactcactgaccgatcacccccgatggatccgagaaagatcccacgagagttatgcaaaaaactacagtgtcgtcttccctcacgatgagccccttgcaggacggaacatgagacgtgacccattacatgaagagctcctgggccagggctgtgtgttccaggaaagacatggttgggagaggccaggttggtttcatccacgaggtcctgcccccgtgctggagtacgattactatggggcttatggttctcgagcgcacgaggactacgcatatagacgtttgctggctgatgagtacactttcgcctttcctccccaccacgacaccataaagaaggagtgtctggcctgtcgcggggctgcggcggtcttcgatatgtcatacttcggcaagttctatctcgtcgggctggacgctaggaaggcagccgattggctcttctcagctgatgtgtcccgaccccccggcctgcatcgggttcacgtttag

SEQ ID NO: 49673 - DNA, 2757 bp, Artificial Sequence
  derived and/or modified sequence
atggccagcctgagccgggccctgcgggtggccgccgcccaccccagacagtccccaaccagaggcatggggccatgcaatctatctagcgccgccggacctaccgctgagaaatcagttccctaccagagaacgttgaaggaagggcagggcacctcggttgtggcacagggaccatccagacccttgccttcaacagcgaatgttgtagtgatagggggcggtagtttaggctgccagactttataccacctggctaagctgggtatgtccggagcggttctgctggaaagggagcgcctgacttctggaacaacttggcacaccgccggcctcctctggcagctaagaccatcagatgttgaggtggagctgctggcccatacacggagagtagtgtcacgcgagttagaagaagagactggcctgcacaccggatggattcagaatggtggcctttttatcgcctctaatcggcaacgcctggatgaatacaagcggctgatgagtctaggtaaggcttatggcgtggaaagccacgtgctgtccccagcggaaactaagactctgtacccacttatgaacgtcgacgacctctacggtaccttgtacgtgcctcacgacggaacgatggatcccgcaggcacttgcacgacgctcgccagggctgcttctgcccggggcgcgcaggtcattgagaactgccccgtgactggcattcgcgtctggaccgatgatttcggtgttcggcgggtggcgggggtcgagactcagcacggctccattcaaaccccttgcgtggttaattgcgctggagtatgggcgtctgccgtgggacgtatggctggcgtgaaggtgcctttggttgctatgcatcacgcctatgtagtgacagagcggattgagggcatccagaatatgccgaacgtaagagatcacgatgcctcagtctatttgagactgcagggcgatgccctatctgtaggaggatacgaggccaatcccatcttttgggaggaggtttctgacaagtttgcctttggcctgtttgatcttgactgggaggtcttcacccagcacattgagggggcaatcaatagggtgcctgtcttggaaaagaccgggattaagtccactgtctgtggtccagagtctttcacacccgaccacaaacccctgatgggagaggcacctgaactacgggggttcttcctgggctgcggtttcaatagtgcagggatgatgctgggcggggggtgtggccaagagctagcccactggatcattcacggccgtccggaaaaagatatgcacggatatgacattcgacggtttcaccatagcctgactgaccaccctcgctggatcagagaaagatcacatgaatcatatgcaaaaaactactctgttgtattccctcatgatgaaccgctagctggtcggaatatgcggcgtgaccctctgcacgaggagttgttgggccaggggtgtgtgtttcaggagcggcatggctgggagcggcctggatggttccatccaaggggacctgccccggttttggaatacgactattacggtgcctatggttctagggcacacgaagattatgcttatcgacggttactggccgacgagtacacctttgcttttcctcctcatcacgatacgataaaaaaagaatgtctggcctgccggggtgcggccgcagtgtttgatatgtcctatttcggcaaattctatctggtggggctcgacgccagaaaagccgcggactggctcttcagtgcggatgtctccagaccgccgggtagtaccgtttacacctgcatgctgaaccacagaggcgggactgagagcgatttgaccgtgtccagactggcaccgtcccatcaggcttcacctctggctcctgcctttgaaggcgatggatattacctcgctatgggtggagcggttgcacagcataactggagccacatcacgaccgtgctacaggatcagaagtcacaatgccaacttatcgatagctctgaggatttgggcatgatctcaatccaggggccagccagccgggccattctccaggaagttctcgacgccgatctctccaacgaagctttccccttctctacacataagctactgagggctgccggccacttagttagggctatgcgcctcagctttgtgggtgagctggggtgggaactccatatccccaaggcgagctgtgtgccagtttaccgcgccgtgatggctgccggcgctaagcatggcctcatcaatgctgggtatcgtgctatcgattccctgagcatagaaaagggttaccgccattggcatgccgacctcaggcccgacgactcccctctggaggcgggactggccttcacctgcaagttgaagtcacctgtcccttttcttggccgggaggctctggaacagcagcgagccgccggacttaggaggagactagtttgcttcactatggaagataaggtgcccatgtttgggctcgaggccatctggcgaaatggccaggtcgtgggccacgttaggcgggccgattttggcttcgcaatcgacaagacgattgcctatgggtacatccatgacccgagtggtggaccggtgtcgcttgattttgtgaagagcggagactacgctctggagagaatgggcgtcacatatggagcacaggcacacttgaaaagccctttcgatccaaataacaagcgcgttaagggtatttattag

SEQ ID NO: 49674 - DNA, 1425 bp, Artificial Sequence
  derived and/or modified sequence
atggccagcctgagccgggccctgcgggtggccgccgcccaccccagacaaagccccacgagaggtatggggccatgcaatctaagctcagcagctggacctaccgccgaaaaaagcgtcccttatcagagaaccctcaaagaggggcagggaacatccgtcgtggcccagggacctagcaggccgctgccaagtacagccaacgtcgtggtgatcggcggagggagtctcggttgtcagaccctctatcatcttgcaaaattggggatgagtggagctgtactgctcgagcgggaaagactcacctctgggaccacctggcacacagccgggctgttgtggcagcttcgcccttccgacgtcgaggtggaactcctggcccacactcgccgggtcgtgagtagagagttggaagaagaaacgggtctgcatacaggttggatccagaacgggggactgtttattgccagcaacaggcagaggctggatgagtataagagactgatgtccctgggcaaggcctacggggtggagtcccacgtcctctcacccgccgaaaccaagaccctttaccctttgatgaatgtcgatgacctgtacggcactctgtatgtgcctcacgatggtacgatggatccggccggcacatgcaccaccctcgcacgggccgcctccgccagaggggcacaggtgatagaaaattgcccagtgacagggattcgggtctggacagatgacttcggggtgcggagggtggccggggtagaaacccagcatggtagtatccagacaccttgtgtggtgaactgtgctggcgtgtgggcatccgcggtgggcagaatggcaggcgtgaaagtgcctttagtcgctatgcaccacgcctacgtggtcaccgagcgcatagagggcatccagaacatgcccaacgttcgggaccatgacgcttcagtttacctgcgtctgcagggtgatgccctctcagttggtggctacgaagccaacccgatcttttgggaggaggtctccgacaaattcgcatttggcctgtttgacctggattgggaagtgttcacccagcacatcgagggcgccattaacagggtgcctgtgctcgaaaagacaggtattaaaagcaccgtgtgtggcccagaatctttcacaccggatcataagccactcatgggggaggcacccgagctgcgggggttctttttaggatgtggcttcaactctgcggggatgatgcttggcggcggttgcggtcaagagctggctcattggattatccatgggagacctgaaaaagatatgcatgggtatgatatacggaggtttcaccactcattaaccgatcacccgcggtggataagggaacggtctcatgaatcttaccaggagctgctgcggagactaccgccaaggtag

SEQ ID NO: 49675 - DNA, 1107 bp, Artificial Sequence
  derived and/or modified sequence
atgtcatatttcgggaaattttacctggtgggcttggacgccagaaaggccgctgattggcttttctctgcggacgtctctagaccaccaggcagcacagtatacacgtgtatgttgaatcataggggtggtactgaatccgacctaaccgtaagcaggctggctccctcccaccaggcgtctccactggcccctgccttcgagggagacggttactacttagcaatgggcggtgctgtggcccagcataactggtcccatattaccactgtgctgcaggaccagaaatcccagtgccagttgattgacagctcagaagatttggggatgatctcgattcaaggtccggcaagccgagccatcctccaggaagtgctggatgccgatttgagcaacgaagccttccccttcagcacccacaagctgttacgcgcagctggacacctggtcagagctatgcgcctgtcatttgtaggcgaactgggttgggaacttcatattcccaaggctagttgtgttcctgtgtatcgggcagttatggccgcaggcgcaaagcacggattaattaacgcaggataccgcgctatcgattcccttagcatcgagaagggctaccgtcattggcacgcagatttgagacctgatgacagccccctggaggctggattggcctttacatgcaagctcaaaagccctgtgccgtttctggggagagaggccctggaacagcagagggccgctgggttgcggagaaggcttgtctgctttacaatggaagagccactgtggacacggccacatccggcagtgtcaggcgctccggcttttagtactgcttcttctagcaaggtccctatgttcggtcttgaggccatttggcgtaacggacaggtggtggggcatgtgaggcgtgctgatttcggcttcgccatcgacaagactattgcttacggctacatccatgacccctccggtgggcctgtgagcctcgattttgtcaaaagcggagactacgctttagaaaggatgggggtgacttacggagcccaagctcatctgaagtccccttttgaccctaacaacaagcgggtcaagggcatctactag

SEQ ID NO: 49676 - DNA, 2757 bp, Artificial Sequence
  derived and/or modified sequence
atggccagtctatcccgcgctctaagagtggccgctgctcatcctagacagtccccaacacgcggtatggggccatgtaatctttcttctgctgctggccctactgctgagaagtcagttccgtaccagcgcacgctgaaggagggccagggaacaagcgtggtggcccaagggccttcccgccctctccctagcacagccaacgtggtcgtcattggaggaggaagtctgggctgtcagacattatatcacctggcaaaattagggatgagcggcgcagtcctgttggagagagagcggctgacatccgggaccacttggcatactgcaggcctgctatggcagctacggccttcggatgtcgaagtggagctgctggcccatacaaggagggtcgtttcacgggaactcgaggaagaaaccggtctccatactggttggatccagaatggtggcttgttcatagcgagtaacagacagaggctggacgagtacaaaagactgatgtctctgggaaaggcatacggagttgaatcacatgttcttagcccagctgaaaccaaaaccttgtaccccctgatgaacgtggacgatctgtacggcacgctgtacgttccacatgacggtactatggacccagccggaacttgcaccaccctcgcgagagccgcttctgccaggggagcacaagttattgaaaactgtccagtgacgggcataagagtttggacagatgattttggtgtccgacgagtcgcaggggtggagacacagcatgggtctattcagacaccttgcgttgtgaattgcgccggtgtgtgggcgtccgctgttggccgtatggccggagtcaaggtcccgcttgtggccatgcaccacgcctatgtggtcaccgaacgtatcgaaggcatccagaatatgccaaacgtgcgagaccacgacgcaagcgtgtacttacggttacagggcgatgcacttagcgtggggggatatgaggctaatcccattttttgggaagaggtgtccgataaatttgcattcggcctatttgatttagactgggaagtattcacccagcatattgaaggagccattaatcgcgtacctgtgcttgagaaaacaggcataaagtcaacagtgtgtggaccagaaagcttcaccccagatcacaagccactgatgggcgaggcacctgagcttagaggcttctttttgggatgtggatttaactctgccggtatgatgttgggcggaggctgtggacaggaactggcacattggattattcacggacgccctgaaaaagacatgcatgggtatgatatccgaagatttcatcactccctgaccgaccatccacgctggattcgtgaaagatcacacgagagctatgctaagaattattccgttgtgttccctcacgacgagcccttggcgggtaggaacatgcgtagggaccctcttcatgaggagcttctgggacagggttgcgttttccaggagcgccacggctgggaaaggccaggttggttccatccccgtggtccagctccggtgctcgagtacgattattacggcgcttacggttcacgggctcacgaggactatgcctaccggagactgctggctgatgaatacacattcgcctttcctcctcatcacgacactatcaaaaaggaatgtttagcatgccgcggagccgcagccgtgttcgatatgagctacttcggcaaattctacctggtcgggcttgacgcccgtaaagcagcagactggctgtttagcgccgatgtaagccgccctcctgggtcaaccgtgtacacctgcatgctaaatcatcggggagggacagagtctgatttgactgtgagtcggctcgcccctagtcaccaggcgtctccgctggcccctgcatttgaaggcgacggttattacctcgctatgggcggagctgttgctcagcacaattggagccacattaccacggtgctgcaggaccagaaatcacagtgccagctcattgacagtagtgaggatctgggcatgatctcaattcagggccctgcttcgcgagctattcttcaggaggttctcgatgcagatctgtccaacgaggcatttcccttcagcacccataaacttctgagggctgctgggcatctggttcgcgctatgcgcctgtctttcgttggggagctgggctgggagcttcatatccccaaggcttcatgcgtaccagtttaccgagcagtgatggcagctggggctaagcacggtctcattaacgccggataccgcgctatcgattcactgagtattgaaaagggatatcggcactggcacgccgatctgaggcccgacgactctcccttagaggccggactggccttcacctgcaaactgaagtcccccgtgccatttctaggacgggaagctctggagcagcagcgggctgctggcctcagacgtcggctcgtgtgtttcactatggaggataaagtgcccatgttcgggctagaggctatctggcgaaatggacaggtggtgggacacgtgaggcgcgctgatttcgggtttgctatcgataaaacaatcgcttacggctacatacacgatccttcaggcggtccagtctctttggatttcgtgaagtccggcgactatgcgttggagcggatgggcgtgacgtatggagcccaggcccacctcaaaagcccctttgaccccaacaacaagcgtgtcaagggcatatattag

SEQ ID NO: 49677 - DNA, 2696 bp, Artificial Sequence
  derived and/or modified sequence
agttgcaacttgtctttgagtgcagggacaggagaagtgtgggctacccggccactgccctggagctgtggtgactgctgcgtttttctcccatgcacttgcacgtccaggactcctgggagaacttgggccacactccttccttgccctcttgagctcattcgtcaccctgttgggtgagcacagccctagctcaggccactgggcaagccacaccatccaaagaggaggtcctctgccccaggacccccacaccaccccaggcctgctgtggcagctgcggcccagtgacgtggaggtggagcttctggcccacactcggcgggtggtgagccgggagctggaggaggagacgggactacacacgggctggatccagaatgggggcctcttcatcgcgtccaaccggcagcgcctggacgagtacaagaggctcatgtcgctgggcaaggcgtatggtgtggaatcccatgtgctgagcccggcagagaccaagactctgtacccgctgatgaatgtggacgacctctacgggaccctgtatgtgccgcacgacggtaccatggaccccgctggcacctgtaccaccctcgccagggcagcttctgcccgaggagcacaggtcattgagaactgcccagtgaccggcattcgtgtgtggacggatgattttggggtgcggcgggtcgcgggtgtggagactcagcatggttccatccagacaccctgcgtggtcaactgtgcaggagtgtgggcaagtgctgtgggccggatggctggagtcaaggtcccgctggtggccatgcaccatgcctatgtcgtcaccgagcgcatcgaggggattcagaacatgcccaatgtccgtgatcatgatgcctctgtctacctccgcctccaaggggatgccttgtctgtgggtggctatgaggccaaccccatcttttgggaggaggtgtcagacaagtttgccttcggcctctttgacctggactgggaggtgttcacccagcacattgaaggcgccatcaacagggtccccgtgctggagaagacaggaatcaagtccacggtctgcggccctgaatccttcacgcccgaccacaagcccctgatgggggaggcacctgagctccgagggttcttcctgggctgtggcttcaacagcgcaggaatgatgctgggtggtggctgtgggcaggagctggcccactggatcatccatgggcgcccggagaaggacatgcatggctatgacatcaggcgcttccatcactcgctcacggaccacccccgctggatccgagagcgaagccatgagtcctacgccaagaactactccgtcgtcttcccccacgatgagccgctggccgggcgcaacatgaggagagacccgctgcacgaggaactccttggacaaggctgcgtgttccaggagcggcatggctgggagcgaccgggatggtttcatccccgaggcccagctccggtcctcgagtacgactactacggggcttacgggagccgcgcgcacgaggactacgcctaccgcaggctgctggcagacgagtacaccttcgccttcccgccccaccacgacacgatcaagaaggagtgcctggcctgcagaggggccgccgctgtgtttgacatgtcctacttcgggaagttctacctggtggggctggatgcaaggaaggctgccgactggctcttctccgcagatgtcagccgacccccaggctccaccgtgtacacgtgcatgctcaaccaccgtgggggcaccgagagtgacctgactgtcagccgcctggcacccagccaccaggcctccccgctggcccccgcctttgaaggggacggttactacctggccatgggcggggccgtggcccagcacaactggtcccacatcaccaccgtgctgcaggaccagaagtcccagtgccagctcatcgacagctccgaggacctgggtatgatcagtatccagggcccagccagccgagccattttgcaggaggtgctggacgcagacctgagcaacgaggccttcccgttctccacccacaagctactgagagccgcagggcacctggtccgagccatgcggctgtcctttgtgggggagctgggctgggagctgcacattccaaaggcgtcctgcgtgcctgtgtaccgggctgtgatggccgcgggtgccaagcacggcctcatcaacgcagggtaccgcgccatcgactccctgagcattgagaaaggctaccggcactggcacgcggacctgcggccagacgacagccccctggaggcaggcctggccttcacctgcaagctcaagtcgccggtgcccttcctggggagggaggccctggagcagcagcgggccgcaggcctccgccggcgcctggtgtgcttcaccatggaggacaaagtacccatgtttggcctggaggccatctggaggaacggccaagtggtgggccatgtccggagggctgactttgggttcgccatcgacaagaccatcgcctacggttacatccatgaccccagcggtgggccggtctcgctggactttgtgaagagcggggactatgccctggagagaatgggggtgacctatggtgcccaggctcacctgaagtcgcccttcgaccccaacaacaagagggtgaagggaatctactgagggctca

SEQ ID NO: 49678 - DNA, 2253 bp, Artificial Sequence
  derived and/or modified sequence
atgtctttgggcaaagcatacggcgtcgagagccacgttttgtcccccgctgagaccaagaccttgtaccccttgatgaatgtcgacgacctgtacggcacactttatgttccgcacgacggaaccatggaccctgcaggcacttgtacaactctggccagggccgctagcgcaaggggcgcacaggtaattgaaaattgtccagtcacaggcatcagagtgtggacggacgatttcggagtgcgccgagtggctggcgttgagacacagcacggctcaatccagacaccatgtgtcgtgaattgcgctggagtatgggccagcgccgtgggacgcatggccggtgtgaaggtgccacttgtcgctatgcaccatgcctatgtggtcaccgaacgcatcgagggcatccagaacatgccgaacgtccgggaccacgacgccagcgtttacctgcgtttgcagggggatgctctctcagtgggcggttacgaagctaaccctattttttgggaagaggtgagcgacaaattcgccttcggcctgtttgatctggattgggaagtgttcactcagcacatcgaaggcgcaattaaccgtgtgcctgtcctcgagaagacgggcattaagagcacggtctgcggacccgagtcatttaccccggaccataaaccgctcatgggagaggctcctgagctccggggttttttcctcgggtgcggcttcaacagcgcaggcatgatgctgggcggtggctgcggtcaagaactggctcactggatcatacacgggagaccagagaaagacatgcatggctatgatattcgtagattccatcattccctgactgaccaccccaggtggattagagaaaggtcccacgagagttatgctaagaactattctgtggtattccctcatgatgagcccctcgcaggcagaaatatgaggcgggaccccctgcacgaggagctgcttggacagggttgcgtgttccaagagaggcatggttgggagagaccagggtggttccatcccaggggcccagccccagtcctcgaatatgactattacggagcctatggttccagagctcatgaggattatgcgtacaggcgacttcttgccgatgagtataccttcgcgtttccaccgcaccacgacacaataaaaaaagaatgtctggcttgccgaggcgcagctgccgtttttgacatgtcttatttcggcaaattctatctcgttggactagatgctagaaaggccgcagactggctgttcagcgccgacgtgagcagacctcccggatccacagtgtacacctgcatgctgaaccaccggggtggtactgagtccgatttaaccgttagtcgcttagccccttcccaccaagcatcccccctcgccccagcctttgagggggacggctattacctggccatggggggtgccgtggcacagcataattggagccacataacaacagtcttacaagaccagaaatcccaatgtcagttgattgactcgagtgaagacctaggaatgatttcaatccagggccctgcgtccagggcaatcctacaagaagtccttgatgcagacctgagcaatgaagcatttcccttttctactcataaactcctccgggctgctggccacctggtaagagcaatgcgtctgagtttcgtgggcgagctcggatgggagcttcatattcccaaggcaagctgcgtgcccgtataccgggctgttatggccgctggcgcaaagcacggcttaattaatgctggctatcgggcaatcgattctctttctatcgaaaaaggctataggcactggcatgcggacctgcgtcctgatgattcccctctcgaggccggactggcattcacgtgtaagcttaagagcccggttccctttctaggccgtgaggccttggagcagcagcgcgctgcgggtctccgaaggcggttagtttgtttcactatggaggataaagtgcccatgtttggccttgaggccatttggaggaacgggcaagtggttggccacgtgagacgcgcagatttcggatttgccatcgacaagaccatagcatatggttacattcatgatccttctggcggtcctgtgtctctcgactttgtgaagtccggcgattacgcccttgaacggatgggtgtgacttacggagctcaagctcatttgaagtcccccttcgaccctaataacaagcgggtgaaggggatctattag

SEQ ID NO: 49679 - DNA, 1830 bp, Artificial Sequence
  derived and/or modified sequence
atggctagccttagtcgagcacttagagttgctgctgcacaccctagacagtcccctacgcgtggtatggggccatgcaacctgtcctctgcagccggtcccactgctgaaaaatcggtcccgtaccaacgtacgctcaaagagggacagggcaccagcgtcgtggcacagggaccatcgcgccctctgccatccacagcaaacgtcgtggtaattggcggaggcagtctaggatgtcagacactgtaccatttagcaaagctgggcatgtcaggcgctgtacttctagagcgggagcgcctgacaagcgggaccacttggcacacagcagggttactctggcagcttcgacctagcgacgtcgaggttgagctgcttgcccatactcggagggtggtaagccgagagttggaggaggagacaggactccacacgggctggattcagaatggagggctgttcattgccagtaatcgccagcgtctggatgaatataagagactgatgtcactcgggaaggcgtacggagtggaaagccacgtcctgtccccggctgaaaccaaaaccctgtaccccctgatgaatgttgacgacttgtacggcaccctgtatgtcccccatgatggtaccatggatccagctggtacctgcaccactttggcacgcgcagcctcggcccgaggagcccaggtcatagagaattgtcctgtgaccggtatacgcgtgtggaccgacgactttggtgtccgaagggtcgcaggcgtagagactcaacacgggtcaattcagaccccttgtgttgtgaactgtgcaggggtctgggcctccgcagtgggaagaatggccggagtcaaagtgcctttggtcgctatgcaccatgcttacgtggtgacagaacgcattgaaggcatccagaatatgccaaatgtgagagaccatgatgcatctgtgtacttgcggttacagggcgacgcacttagtgtcggaggatacgaagccaatccaatcttttgggaggaggtatcggataaatttgccttcggcctgttcgatctggattgggaagttttcacacagcacatcgaaggggcaataaacagggtgcccgtgctggaaaagactggaattaagtctaccgtgtgcgggcctgaatctttcacaccagaccataagcctctgatgggtgaggctcctgagctgcgaggcttcttcctgggctgtgggttcaacagcgcaggcatgatgctgggcggaggttgcggacaggaactggcacactggatcatccacgggaggccagagaaggacatgcacggctatgacatccggaggtttcaccacagtctgaccgaccatccaaggtggataagggagcgatcccatgaatcttacgctaaaaattactctgttgttttccctcacgatgagccattagccggaaggaacatgagaagggaccccttgcacgaggagttactgggtcagggatgcgtctttcaagagcgtcacggctgggagcggcctggatggttccatcccagaggacctgcccctgtgctcgagtatgactactacggcgcatacggatctcgggcacatgaggattacgcttaccggagactcctagctgatgagtacacctttgctttccctccacaccatgatacaatcaagaaggagtgtcttgcttgccggggagcagccgctgttttcgatatgtcttactttggcaagttttacctggttggcctcgatgccagaaaggccgctgattggctgttttctgccgatgtgtcacggcctcccggattacaccgggtgcatgtatag

SEQ ID NO: 49680 - DNA, 1958 bp, Artificial Sequence
  derived and/or modified sequence
cctggagttccggccaggccactgcttgggaagcaagaaggtgaaggcacctctgctgggccaagcactcttagggccgaggggcactgcagctgacaagagctccctgtttcgctgaggcctggagcccccatggcctcactgagccgagccctacgtgtggctgctgcccaccctcgccagagccctacccggggcatggggccatgcaacctgtccagcgcagctggccccacagccgagaagagtgtgccatatcagcggaccctgaaggagggacagggcacctcggtggtggcccaaggcccaagccggcccctgcccagcacggccaacgtggtggtcattggtggaggcagcttgggctgccagaccctgtaccacctggccaagctgggcatgagtggggcggtgctgctggagcgggagcggctgacctccgggaccacctggcacacggcaggcctgctgtggcagctgcggcccagtgacgtggaggtggagcttctggcccacactcggcgggtggtgagccgggagctggaggaggagacgggactacacacgggctggatccagaatgggggcctcttcatcgcgtccaaccggcagcgcctggacgagtacaagaggctcatgtcgctgggcaaggcgtatggtgtggaatcccatgtgctgagcccggcagagaccaagactctgtacccgctgatgaatgtggacgacctctacgggaccctgtatgtgccgcacgacggtaccatggaccccgctggcacctgtaccaccctcgccagggcagcttctgcccgaggagcacaggtcattgagaactgcccagtgaccggcattcgtgtgtggacggatgattttggggtgcggcgggtcgcgggtgtggagactcagcatggttccatccagacaccctgcgtggtcaactgtgcaggagtgtgggcaagtgctgtgggccggatggctggagtcaaggtcccgctggtggccatgcaccatgcctatgtcgtcaccgagcgcatcgaggggattcagaacatgcccaatgtccgtgatcatgatgcctctgtctacctccgcctccaaggggatgccttgtctgtgggtggctatgaggccaaccccatcttttgggaggaggtgtcagacaagtttgccttcggcctctttgacctggactgggaggtgttcacccagcacattgaaggcgccatcaacagggtccccgtgctggagaagacaggaatcaagtccacggtctgcggccctgaatccttcacgcccgaccacaagcccctgatgggggaggcacctgagctccgagggttcttcctgggctgtggcttcaacagcgcaggaatgatgctgggtggtggctgtgggcaggagctggcccactggatcatccatgggcgcccggagaaggacatgcatggctatgacatcaggcgcttccatcactcgctcacggaccacccccgctggatccgagagcgaagccatgagtcctacgccaagaactactccgtcgtcttcccccacgatgagccgctggccgggcgcaacatgaggagagacccgctgcacgaggaactccttggacaaggctgcgtgttccaggagcggcatggctgggagcgaccgggatggtttcatccccgaggcccagctccggtcctcgagtacgactactacggggcttacgggagccgcgcgcacgaggactacgcctaccgcaggctgctggcagacgagtacaccttcgccttcccgccccaccacgacacgatcaagaaggagtgcctggcctgcagaggggccgccgctgtgtttgacatgtcctacttcgggaagttctacctggtggggctggatgcaaggaaggctgccgactggctcttctccgcagatgtcagccgacccccagggctccaccgtgtacacgt

SEQ ID NO: 49681 - DNA, 2757 bp, Artificial Sequence
  derived and/or modified sequence
atggcttctctgagtcgggctctgagggtggctgcagctcatcccagacagagtcctacacggggaatggggccatgcaacctgagtagtgctgccggtcccacagccgagaagtccgtgccctaccaacgaaccctgaaggaaggtcaaggcacgtctgtggttgcgcagggcccttcccgtcccctgcccagtaccgctaacgttgtcgtcattggcggtggcagcttgggatgtcagaccctgtaccatctggcaaagctgggtatgtctggggcagtcctcctagagagggaaaggctgacttctggcacaacatggcataccgccggactgctatggcagttaaggccatccgatgtggaagtagagctcctcgctcataccaggagagtagtgtcacgggaactcgaggaggaaaccgggctgcacacggggtggattcagaacgggggactgtttatcgcatctaataggcagcgcttagacgaatacaagagattgatgtcactcgggaaagcctacggggtggaaagccatgtgctgtcacctgccgaaacaaagaccctttaccccctgatgaatgtcgacgatctctatggcaccctgtacgtcccccatgacggcacgatggatccggctggcacgtgcacaaccctggctagggctgcctccgccagaggggctcaagtgattgagaattgccccgtaactggtatccgagtctggacagacgacttcggggtgaggcgtgtagcaggggtggagacacagcatgggtctatacaaaccccctgcgtcgtgaattgtgcaggtgtctgggcttccgccgtaggccgaatggcaggcgtcaaggtgccactggtagcaatgcaccatgcctacgtggtcacggaaagaatcgaaggcatccaaaatatgccgaatgtgcgcgatcacgacgcttccgtctatctccgcctccagggggacgccctgtccgttggcggatatgaagcaaaccccatcttttgggaggaagtgagtgataagttcgcattcggactcttcgaccttgactgggaagtatttactcaacatatagagggtgctatcaaccgagtgcccgtcctcgagaaaacagggattaagagcaccgtatgtggcccagaaagctttactccagaccacaagcccctcatgggtgaagcacccgagctcagaggcttttttctgggctgtggcttcaattcagccggaatgatgcttggtgggggatgtggccaagaactagcccactggataatacatggccgacctgaaaaagatatgcacggttacgacataagacggtttcatcattctctcaccgaccacccaagatggatccgagagcggtctcatgaatcttacgctaagaactactctgtagttttcccacatgacgagcccctggctgggagaaacatgcgacgcgatccacttcatgaggagctactcgggcaaggttgtgtttttcaggagcgccacggctgggagagacctgggtggtttcatccccgaggacctgcccctgtgttagaatatgattactacggagcctacggaagccgtgcccatgaagattatgcctatagaaggctgctggccgacgaatataccttcgcatttccaccccatcacgacactattaagaaagaatgtctggcatgcagaggggctgcagccgtgttcgatatgagctacttcggcaagttttaccttgtaggactcgatgcacggaaagccgctgattggttgttttccgctgacgtgtctcgccctcccggatcaacagtgtatacatgcatgctaaatcacagaggtggtaccgaaagcgatcttacagtttctaggctggctccatcacaccaggcgtctccactggcccctgcgtttgagggcgacggatattacctggcaatgggcggtgccgtcgcgcagcataactggagccacattaccacagttctccaggatcagaaaagccagtgtcagctgatcgattcatccgaggatttagggatgatcagtattcagggacctgcctctagggcaatcctgcaggaggttctcgacgcagatttaagcaatgaggctttccccttctctacacacaagctgctgagagcagccggacacctagtgcgtgctatgcgcctgtctttcgtcggagaactcggctgggaactgcatataccaaaagcctcctgtgtgcccgtatatagggccgtgatggcagctggggctaaacatggtctcatcaatgccggttatagagctatagatagcttaagcattgaaaagggctataggcattggcatgccgatctgagaccagatgacagccccctggaagctggactagccttcacctgcaagttaaagagccctgtgcctttcctcggacgggaagcacttgagcagcagcgagcggcaggactgcggagaaggctggtctgctttacgatggaggacaaagtgcccatgtttggactcgaggcgatctggagaaatggacaggttgtgggacatgtgcgacgcgctgactttgggttcgcaattgacaaaacgatcgcatacggttacattcacgacccgtccggcggaccagtatctttggacttcgtcaagagcggcgactatgccctggaacgtatgggcgtcacgtacggagctcaagcccatctgaaaagtccctttgatccaaacaataagcgagtaaagggcatttattag

SEQ ID NO: 49682 - DNA, 1425 bp, Artificial Sequence
  derived and/or modified sequence
atggcttctctgagtcgcgcactccgagttgcagccgcacaccccagacagtcccctaccagggggatggggccatgcaatttgtctagcgccgctgggccaactgcggagaagtccgtcccttaccagcgtactttaaaggaaggacagggaaccagtgtggtggcccagggaccctcccggcctttgccttcaactgcaaacgtagtggtgatcgggggtgggtcgctgggctgtcagactctctaccacctcgccaagttaggaatgtctggtgccgtcctgctcgaaagggagcgtttgacctctggcacaacatggcacaccgctgggctgctgtggcagctcaggccaagcgatgtagaggtcgagttattagcacacacaaggcgagtagtgagcagagaactggaagaggagaccggcctgcacacagggtggatacagaatggtgggctgtttatcgcttctaatcgccagcgcctggacgagtataagcggctcatgagtctcggaaaggcctatggcgtggagagccatgttttatcacccgcagaaaccaagactctatacccactcatgaacgtggacgacctttatgggactctgtatgttcctcacgatggcaccatggatcccgctgggacctgcactactctcgcaagagctgcctctgctagaggagcccaggtaatcgagaattgccctgtcacaggcatacgggtgtggacagatgactttggcgttcgcagagtggccggagtggagacacagcatggctctatacagaccccttgtgtcgtcaactgtgcgggagtatgggcttcggctgttggaagaatggcgggagtcaaagtgccgctggtcgctatgcaccatgcctatgtggtcaccgaacgcattgaaggcatccagaatatgccaaacgtgagagatcatgatgcctctgtgtacctaaggctccagggcgacgccctgagtgtgggagggtatgaagcaaatcccatcttctgggaagaagtgtccgataaattcgcatttgggctgtttgatcttgactgggaagtatttactcagcacatcgaaggggcaataaaccgtgtccctgtgttagagaagaccggcattaaaagcacggtgtgcggcccagaatcattcactccagatcataaaccacttatgggggaggctcccgaactgagaggcttctttcttgggtgcggcttcaatagcgcgggaatgatgcttggcggaggttgtggacaggagttagcccactggatcattcacggcagaccggaaaaagatatgcacggatatgatatccgcaggttccatcattccctcacagaccaccctaggtggattagggagagaagccacgaatcctaccaggagctcctgcgacgtcttccgccacgctag

SEQ ID NO: 49683 - DNA, 3216 bp, Artificial Sequence
  derived and/or modified sequence
ggcctggagttccggccaggccactgcttgggaagcaagaaggtgaaggcacctctgctgggccaagcactcttagggccgaggggcactgcagctgacaagagctccctgtttcgctgaggcctggagcccccatggcctcactgagccgagccctacgtgtggctgctgcccaccctcgccagagccctacccggggcatggggccatgcaacctgtccagcgcagctggccccacagccgagaagagtgtgccatatcagcggaccctgaaggagggacagggcacctcggtggtggcccaaggcccaagccggcccctgcccagcacggccaacgtggtggtcattggtggaggcagcttgggctgccagaccctgtaccacctggccaagctgggcatgagtggggcggtgctgctggagcgggagcggctgacctccgggaccacctggcacacggcaggcctgctgtggcagctgcggcccagtgacgtggaggtggagcttctggcccacactcggcgggtggtgagccgggagctggaggaggagacgggactacacacgggctggatccagaatgggggcctcttcatcgcgtccaaccggcagcgcctggacgagtacaagaggctcatgtcgctgggcaaggcgtatggtgtggaatcccatgtgctgagcccggcagagaccaagactctgtacccgctgatgaatgtggacgacctctacgggaccctgtatgtgccgcacgacggtaccatggaccccgctggcacctgtaccaccctcgccagggcagcttctgcccgaggagcacaggtcattgagaactgcccagtgaccggcattcgtgtgtggacggatgattttggggtgcggcgggtcgcgggtgtggagactcagcatggttccatccagacaccctgcgtggtcaactgtgcaggagtgtgggcaagtgctgtgggccggatggctggagtcaaggtcccgctggtggccatgcaccatgcctatgtcgtcaccgagcgcatcgaggggattcagaacatgcccaatgtccgtgatcatgatgcctctgtctacctccgcctccaaggggatgccttgtctgtgggtggctatgaggccaaccccatcttttgggaggaggtgtcagacaagtttgccttcggcctctttgacctggactgggaggtgttcacccagcacattgaaggcgccatcaacagggtccccgtgctggagaagacaggaatcaagtccacggtctgcggccctgaatccttcacgcccgaccacaagcccctgatgggggaggcacctgagctccgagggttcttcctgggctgtggcttcaacagcgcaggaatgatgctgggtggtggctgtgggcaggagctggcccactggatcatccatgggcgcccggagaaggacatgcatggctatgacatcaggcgcttccatcactcgctcacggaccacccccgctggatccgagagcgaagccatgagtcctacgccaagaactactccgtcgtcttcccccacgatgagccgctggccgggcgcaacatgaggagagacccgctgcacgaggaactccttggacaaggctgcgtgttccaggagcggcatggctgggagcgaccgggatggtttcatccccgaggcccagctccggtcctcgagtacgactactacggggcttacgggagccgcgcgcacgaggactacgcctaccgcaggctgctggcagacgagtacaccttcgccttcccgccccaccacgacacgatcaagaaggagtgcctggcctgcagaggggccgccgctgtgtttgacatgtcctacttcgggaagttctacctggtggggctggatgcaaggaaggctgccgactggctcttctccgcagatgtcagccgacccccaggctccaccgtgtacacgtgcatgctcaaccaccgtgggggcaccgagagtgacctgactgtcagccgcctggcacccagccaccaggcctccccgctggcccccgcctttgaaggggacggttactacctggccatgggcggggccgtggcccagcacaactggtcccacatcaccaccgtgctgcaggaccagaagtcccagtgccagctcatcgacagctccgaggacctgggtatgatcagtatccagggcccagccagccgagccattttgcaggaggtgctggacgcagacctgagcaacgaggccttcccgttctccacccacaagctactgagagccgcagggcacctggtccgagccatgcggctgtcctttgtgggggagctgggctgggagctgcacattccaaaggcgtcctgcgtgcctgtgtaccgggctgtgatggccgcgggtgccaagcacggcctcatcaacgcagggtaccgcgccatcgactccctgagcattgagaaaggctaccggcactggcacgcggacctgcggccagacgacagccccctggaggcaggcctggccttcacctgcaagctcaagtcgccggtgcccttcctggggagggaggccctggagcagcagcgggccgcaggcctccgccggcgcctggtgtgcttcaccatggaggacaaagtacccatgtttggcctggaggccatctggaggaacggccaagtggtgggccatgtccggagggctgactttgggttcgccatcgacaagaccatcgcctacggttacatccatgaccccagcggtgggccggtctcgctggactttgtgaagagcggggactatgccctggagagaatgggggtgacctatggtgcccaggctcacctgaagtcgcccttcgaccccaacaacaagagggtgaagggaatctactgagggctcagaccacatgccccatcccatgctgtccatccattctcacaggtcccaaatggccctgggtcccaggaccctggacccagccagaacttgtgccctccctgtccttagcctaggcctagtcctgcgaaaacccccaaaccagatacggacagagaccaagatggcccatcctgtggtcactgactggaaggcagtctctaatccaccccaatcctcccagaaagcaaacctgtaagtgtcttgggctcagggaccatggcttgtagccctttccaagcttctagaaggtgcttagtaaatacttgataagccccacgtg

SEQ ID NO: 49684 - DNA, 1718 bp, Artificial Sequence
  derived and/or modified sequence
agttgcaacttgtctttgagtgcagggacaggagaagtgtgggctacccggccactgccctggagctgtggtgactgctgcgtttttctcccatgcacttgcacgtccaggactcctgggagaacttgggccacactccttccttgccctcttgagctcattcgtcaccctgttgggtgagcacagccctagctcaggccactgggcaagccacaccatccaaagaggaggtcctctgccccaggacccccacaccaccccagctccctgtttcgctgaggcctggagcccccatggcctcactgagccgagccctacgtgtggctgctgcccaccctcgccagagccctacccggggcatggggccatgcaacctgtccagcgcagctggccccacagccgagaagagtgtgccatatcagcggaccctgaaggagggacagggcacctcggtggtggcccaaggcccaagccggcccctgcccagcacggccaacgtggtggtcattggtggaggcagcttgggctgccagaccctgtaccacctggccaagctgggcatgagtggggcggtgctgctggagcgggagcggctgacctccgggaccacctggcacacggcaggcctgctgtggcagctgcggcccagtgacgtggaggtggagcttctggcccacactcggcgggtggtgagccgggagctggaggaggagacgggactacacacgggctggatccagaatgggggcctcttcatcgcgtccaaccggcagcgcctggacgagtacaagaggctcatgtcgctgggcaaggcgtatggtgtggaatcccatgtgctgagcccggcagagaccaagactctgtacccgctgatgaatgtggacgacctctacgggaccctgtatgtgccgcacgacggtaccatggaccccgctggcacctgtaccaccctcgccagggcagcttctgcccgaggagcacaggtcattgagaactgcccagtgaccggcattcgtgtgtggacggatgattttggggtgcggcgggtcgcgggtgtggagactcagcatggttccatccagacaccctgcgtggtcaactgtgcaggagtgtgggcaagtgctgtgggccggatggctggagtcaaggtcccgctggtggccatgcaccatgcctatgtcgtcaccgagcgcatcgaggggattcagaacatgcccaatgtccgtgatcatgatgcctctgtctacctccgcctccaaggggatgccttgtctgtgggtggctatgaggccaaccccatcttttgggaggaggtgtcagacaagtttgccttcggcctctttgacctggactgggaggtgttcacccagcacattgaaggcgccatcaacagggtccccgtgctggagaagacaggaatcaagtccacggtctgcggccctgaatccttcacgcccgaccacaagcccctgatgggggaggcacctgagctccgagggttcttcctgggctgtggcttcaacagcgcaggaatgatgctgggtggtggctgtgggcaggagctggcccactggatcatccatgggcgcccggagaaggacatgcatggctatgacatcaggcgcttccatcactcgctcacggaccacccccgctggatccgagagcgaagccatgagtcctaccaagaactactccgtcgtcttcccccacgatga

SEQ ID NO: 49685 - protein, 341 aa, Artificial Sequence
  derived and/or modified sequence
MSASAPAAEGEGTPTQPASEKEPEMPGPREESEEEEDEDDEEEEEEEKGKGQKLCEIERIHFFLSKKKTDELRNLHKLLYNRPGTVSSLKKNVGQFSGFPFEKGSVQYKKKEEMLKKFRNAMLKSICEVLDLERSGVNSELVKRILNFLMHPKPSGKPLPKSKKTCSKGSKKERNSSGMARKAKRTKCPEILSDESSSDEDEKKNKEESSDDEDKESEEEPPKKTAKREKPKQKATSKSKKSVKSANVKKADSSTTKKNQNSSKKESESEDSSDDEPLIKKLKKPPTDEELKETIKKLLASANLEEVTMKQICKKVYENYPTYDLTERKDFIKTTVKELIS

SEQ ID NO: 49686 - DNA, 1026 bp, Artificial Sequence
  derived and/or modified sequence
atgtccgcctctgctccggcagccgaaggggaggggactcctacacaaccggcttccgagaaggaaccagagatgccaggtccacgggaagaatctgaggaggaggaggacgaggatgacgaggaggaggaggaagaagagaagggtaaaggtcaaaaactttgcgagattgagcggattcatttcttcctgtcaaaaaagaagactgatgagttgcggaacctgcataaactactgtataataggcctggcacagtgtcatcactgaagaaaaatgtgggtcagttcagcggattccccttcgagaaggggtctgtgcagtacaagaaaaaagaggaaatgctgaagaagttcagaaacgcaatgctgaagagcatctgcgaagtcctggacctggagcgctcaggtgtcaattcagagctcgttaagcgtatactgaactttctgatgcatcctaagccgtctgggaaacctctgcccaaaagcaaaaaaacatgcagtaagggatctaaaaaggagaggaactctagcgggatggctaggaaggctaagaggacgaaatgtccagagattctttcagacgagtcgtcctcagatgaggatgaaaagaaaaacaaagaggagagttcggatgatgaagataaagaatccgaagaggagccgcccaaaaagactgctaaaagagagaagcctaagcagaaggcgacatctaagtcaaagaagtcggtgaagtctgccaatgtcaaaaaagctgactccagcactacgaagaagaaccagaattcaagcaaaaaggaatctgaaagcgaagacagtagtgacgatgagccactgataaagaaactgaaaaaaccacccacagatgaggaattaaaggagaccatcaagaaactgctggcatcggccaacctggaggaagttacaatgaagcagatttgtaaaaaagtttacgaaaattaccctacctacgacctaaccgagcgcaaggactttatcaaaaccaccgtcaaagagctgatttcttag

SEQ ID NO: 49687 - DNA, 1026 bp, Artificial Sequence
  derived and/or modified sequence
atgtctgccagcgccccagctgctgagggggagggcacccccacccagcctgccagcgagaaggagcctgagatgcctggcccccgggaggagagcgaggaggaggaggatgaagatgatgaggaggaggaggaggaggagaagggcaagggccagaagctgtgtgaaattgagcgcatccacttcttcctgagcaagaagaagacagatgagctgaggaacctgcacaagctgctgtacaacagacctggcaccgtgagcagcctgaagaagaatgtgggccagttcagcggcttcccctttgagaagggctctgtgcagtacaagaagaaggaggagatgctgaagaagttcagaaatgccatgctgaagagcatctgtgaggtgctggacctggagaggtctggagtgaacagcgagctggtgaagaggatcctgaacttcctgatgcaccccaagcccagcggcaagcccctgcccaagagcaagaagacctgcagcaagggcagcaagaaggagaggaacagcagcggcatggccaggaaggccaagaggaccaagtgcccagagatcctgagtgatgagagcagcagtgatgaagatgagaagaagaacaaggaggagagcagtgatgatgaggacaaggagagcgaggaggagccccccaagaagacagccaagcgggagaagcccaagcagaaggccaccagcaagagcaagaagtctgtgaagagcgccaacgtgaagaaggctgacagcagcaccaccaagaagaaccagaacagcagcaagaaggagagcgagagcgaggacagcagtgatgatgagcccctcatcaagaagctgaagaagcccccaacagatgaggagctgaaggagaccatcaagaagctgctggccagcgccaacctggaggaggtgaccatgaagcagatctgcaagaaggtgtatgagaactaccccacctatgacctgacagagaggaaggacttcatcaagaccaccgtgaaggagctgatctcctag

SEQ ID NO: 49688 - DNA, 1026 bp, Artificial Sequence
  derived and/or modified sequence
atgagcgccagcgcccccgccgccgagggcgagggcacccccacccagccggcttccgaaaaggagcccgagatgccggggccccgcgaggagagtgaggaagaggaggacgaggacgatgaagaagaagaggaagaagagaaggggaaaggacagaagctttgcgagatagagagaatccatttttttttgtcaaaaaagaagaccgacgagctgcggaacctgcataagcttctgtataaccgccctggaaccgtctcttccctgaagaagaacgtgggacagttttccggctttccattcgaaaaaggcagcgtccaatacaagaaaaaagaagaaatgctcaaaaagttccggaacgctatgttgaaatctatttgcgaggtgttggacttggaaagaagtggcgtcaacagtgagctggtcaagagaatcctaaatttcttaatgcaccccaaaccttccggaaagccactgcccaaaagcaagaaaacatgtagcaaggggtctaaaaaagagagaaactcaagcgggatggctagaaaggcaaaacgtacgaagtgtcccgaaattctgagtgacgagtcatcttcagacgaggatgagaaaaaaaacaaagaggaatcttcagacgatgaggacaaagaaagtgaagaagaacccccaaaaaagaccgctaagcgcgagaaacctaaacagaaagctacatctaaaagcaagaagtcagtgaagagtgcaaacgtaaaaaaggctgattccagtaccaccaaaaagaaccagaactcttctaaaaaagagtctgagtccgaggactcctcagatgacgagcccttgattaagaagctgaaaaagccgcccactgacgaggaactaaaggagactattaagaagctattagcctctgcgaatctggaggaagtaacgatgaaacagatctgtaagaaggtctacgagaattatcctacatacgacctgactgagcgtaaagatttcatcaaaactacagtcaaagaattaatttcatag

SEQ ID NO: 49689 - DNA, 1026 bp, Artificial Sequence
  derived and/or modified sequence
atgagtgctagtgcacctgccgcagaaggagaaggcacccctacacaaccagcgagcgagaaagagcccgagatgcccggtcctcgtgaggaatcggaagaggaagaagatgaggacgacgaggaagaggaagaggaggagaaggggaagggacaaaagttgtgtgagatcgagaggatccacttctttctgagtaaaaagaaaacagatgaactccgaaacctacacaagttgctttataatagacctgggacagtctcgtctttgaagaaaaacgtcggacagttttctgggttccctttcgagaaggggtctgtgcaatacaagaaaaaggaggagatgctcaagaagttcaggaacgcaatgttaaagagcatctgtgaggttctggacctggagagatccggggtcaatagcgaactggtcaaacgtattctcaacttcctgatgcatccgaaaccaagcggcaaacccttgccgaaatccaagaagacatgctcaaagggaagcaaaaaggagaggaacagctcggggatggcaagaaaagccaaacgcacgaaatgtcctgagatcctgagcgatgagagctctagcgatgaagatgagaagaagaataaggaggagagcagcgatgacgaagacaaggagtccgaagaagaaccacccaagaagactgccaaacgggaaaagccaaagcagaaagcaacttcaaagtcaaagaagtcagttaaatccgctaacgttaaaaaggctgattccagtacaaccaagaaaaatcagaattcaagtaagaaggagagcgagagtgaagatagctccgacgacgaaccactgatcaagaaacttaaaaagcctccaactgacgaggagctgaaagagactataaagaaactgcttgcaagcgctaatttggaggaagtgacaatgaagcaaatctgcaagaaggtttatgaaaattatccaacctacgatctgacggagcgcaaggacttcatcaagaccacggtcaaggagttgatttcttag

SEQ ID NO: 49690 - DNA, 1026 bp, Artificial Sequence
  derived and/or modified sequence
atgagcgccagcgcccccgccgccgagggcgagggcacccccacccagcccgccagcgagaaggagcccgagatgcccggccccagagaggagagcgaggaggaggaggacgaggacgacgaggaggaggaggaggaggagaagggcaagggccagaagctgtgcgagatcgagagaatccacttcttcctgagcaagaagaagaccgacgagctgagaaacctgcacaagctgctgtacaacagacccggcaccgtgagcagcctgaagaagaacgtgggccagttcagcggcttccccttcgagaagggcagcgtgcagtacaagaagaaggaggagatgctgaagaagttcagaaacgccatgctgaagagcatctgcgaggtgctggacctggagagaagcggcgtgaacagcgagctggtgaagagaatcctgaacttcctgatgcaccccaagcccagcggcaagcccctgcccaagagcaagaagacctgcagcaagggcagcaagaaggagagaaacagcagcggcatggccagaaaggccaagagaaccaagtgccccgagatcctgagcgacgagagcagcagcgacgaggacgagaagaagaacaaggaggagagcagcgacgacgaggacaaggagagcgaggaggagccccccaagaagaccgccaagagagagaagcccaagcagaaggccaccagcaagagcaagaagagcgtgaagagcgccaacgtgaagaaggccgacagcagcaccaccaagaagaaccagaacagcagcaagaaggagagcgagagcgaggacagcagcgacgacgagcccctgatcaagaagctgaagaagccccccaccgacgaggagctgaaggagaccatcaagaagctgctggccagcgccaacctggaggaggtgaccatgaagcagatctgcaagaaggtgtacgagaactaccccacctacgacctgaccgagagaaaggacttcatcaagaccaccgtgaaggagctgatcagctag

SEQ ID NO: 49691 - DNA, 1441 bp, Artificial Sequence
  derived and/or modified sequence
attttgaaaatcttgttgattctggggagccgagcgcgcggcgcgagcgtcacgccagacagcggcccgcgcgccttctcctcggcgtcggccgccgccgcctcccagaacctcctcgtgccctcgcgtgccaggcccgcggcggccgaaatccgcggttcacagcatgtccgcctcggcccctgctgcggagggggagggaacccccacccagcccgcgtccgagaaagaacccgaaatgcccggtcccagagaggagagcgaggaggaagaggacgaggacgacgaggaggaggaggaggaggaaaaaggaaaggggcagaaactttgtgaaattgagaggatacatttttttctaagtaagaagaaaaccgatgaacttagaaatctacacaaactgctttacaacaggccaggcactgtgtcctcattaaagaagaatgtgggtcagttcagtggctttccatttgaaaaaggaagtgtccaatataaaaagaaggaagaaatgttgaaaaaatttagaaatgccatgttaaagagcatctgtgaggttcttgatttggagagatcaggtgtaaatagtgaactagtgaagaggatcttgaatttcttaatgcatccaaagccttctggcaaaccattgccgaaatctaaaaaaacttgtagcaaaggcagtaaaaaggaacggaacagttctggaatggcaaggaaggctaagcgaaccaaatgtcctgaaattctgtcagatgaatctagtagtgatgaagatgaaaagaaaaacaaggaagagtcttcagatgatgaagataaagaaagtgaagaggagccaccaaaaaagacagccaaaagagaaaaacctaaacagaaagctacttctaaaagtaaaaaatctgtgaaaagtgccaatgttaagaaagcagatagcagcaccaccaagaagaatcaaaacagttccaaaaaagaaagtgagtctgaggatagttcagatgatgaacctttaattaaaaagttgaagaaaccccctacagatgaagagttaaaggaaacaataaagaaattactggccagtgctaacttggaagaagtcacaatgaaacagatttgcaaaaaggtctatgaaaattatcctacttatgatttaactgaaagaaaagatttcataaaaacaactgtaaaagagctaatttcttgagatagaggacagagaagatgactcgttcccatagatttgaagatctgatttataccattataccagcaaagagaatgtatttccttttctaaatccttgttaagcaacgttagtagaacttactgctgacctttttatcttgagtgttatgtgaatttgagtttgctgttttaaattgcatttctatgccatttttagtttaaaatcttgcatggcattaattgttccttgcttttatagttgtatttt

SEQ ID NO: 49692 - protein, 122 aa, Artificial Sequence
  derived and/or modified sequence
MASPADSCIQFTRHASDVLLNLNRLRSRDILTDVVIVVSREQFRAHKTVLMACSGLFYSIFTDQLKCNLSVINLDPEINPEGFCILLDFMYTSRLNLREGNIMAVMATAMYLQMEHVVDTCR

SEQ ID NO: 49693 - protein, 104 aa, Artificial Sequence
  derived and/or modified sequence
MASPADSCIQFTRHASDVLLNLNRLRSRDILTDVVIVVSREQFRAHKTVLMACSGLFYSIFTDQLKCNLSVINLDPEINPEGFCILLDFMYTSRLNLREGNIMA

SEQ ID NO: 49694 - protein, 650 aa, Artificial Sequence
  derived and/or modified sequence
MASPADSCIQFTRHASDVLLNLNRLRSRDILTDVVIVVSREQFRAHKTVLMACSGLFYSIFTDQLKCNLSVINLDPEINPEGFCILLDFMYTSRLNLREGNIMAVMATAMYLQMEHVVDTCRKFIKASEAEMVSAIKPPREEFLNSRMLMPQDIMAYRGREVVENNLPLRSAPGCESRAFAPSLYSGLSTPPASYSMYSHLPVSSLLFSDEEFRDVRMPVANPFPKERALPCDSARPVPGEYSRPTLEVSPNVCHSNIYSPKETIPEEARSDMHYSVAEGLKPAAPSARNAPYFPCDKASKEEERPSSEDEIALHFEPPNAPLNRKGLVSPQSPQKSDCQPNSPTESCSSKNACILQASGSPPAKSPTDPKACNWKKYKFIVLNSLNQNAKPEGPEQAELGRLSPRAYTAPPACQPPMEPENLDLQSPTKLSASGEDSTIPQASRLNNIVNRSMTGSPRSSSESHSPLYMHPPKCTSCGSQSPQHAEMCLHTAGPTFPEEMGETQSEYSDSSCGEKPYRCNICGAQFNRPANLKTHTRIHSGEKPYKCETCGARFVQVAHLRAHVLIHTGEKPYPCEICGTRFRHLQTLKSHLRIHTGEKPYHCEKCNLHFRHKSQLRLHLRQKHGAITNTKVQYRVSATDLPPELPKAC

SEQ ID NO: 49695 - DNA, 369 bp, Artificial Sequence
  derived and/or modified sequence
atggctagccccgcagactcttgcatccagttcacccgtcacgcatcggatgtgttgctcaatcttaatagactgagatcgagagacatcttaaccgatgtcgttattgtggtatcccgtgaacaattccgggcacacaagaccgtgctgatggcctgttctggactgttttacagtatttttactgatcagttgaagtgcaatctttcagtcattaacctggatccagaaatcaatcccgagggattttgcatactcctggatttcatgtatacctctcgcttgaacttacgggagggtaacattatggcagttatggccaccgctatgtacctgcaaatggagcacgtggtggacacttgtcggtag

SEQ ID NO: 49696 - DNA, 315 bp, Artificial Sequence
  derived and/or modified sequence
atggcttcgcctgcggacagctgcatccaatttactcgccacgcaagcgacgttttgcttaacctaaatcggctccgttccagagacatcctgacggatgttgtgattgtcgtgtcgagagagcagtttagggctcacaagactgtactgatggcgtgtagtggccttttttattccatcttcactgatcagctcaaatgtaatctttccgtgatcaatctcgacccagagataaatccggaaggtttctgcatcttgctggactttatgtatacatcgaggctgaatctaagagaaggaaatattatggcttag

SEQ ID NO: 49697 - DNA, 1953 bp, Artificial Sequence
  derived and/or modified sequence
atggcttctcccgcagattcctgcattcagttcaccagacatgcctcagacgtattgctgaatttgaatcgtctgcgttcaagagatattttgaccgatgtggtgatagttgtgagtcgggaacaattcagagcgcacaaaactgtgctcatggcgtgcagtggcttgttctatagcatcttcacggatcaactgaagtgcaacctgagtgtcatcaaccttgacccagaaattaacccggagggcttctgcattctcttggattttatgtatacgtcacggctcaatctgagggaagggaatatcatggccgtcatggcgactgctatgtacttgcagatggagcacgtggttgacacgtgcagaaagtttattaaagcatcagaggcagaaatggttagtgcaattaagccacctagggaagagttcctaaactctcggatgttaatgcctcaagacattatggcataccgaggtagggaagtcgtggagaataatcttccattaaggagtgcccctgggtgcgagtctcgcgcattcgcgccttcactgtacagcggcttaagcactcctcccgcctcatacagcatgtatagtcatctgccggtgagctccctgctgtttagcgacgaggaatttcgggacgtccggatgccagtggctaacccattccccaaagagcgcgcacttccctgtgattcagccagacccgtgccgggggaatatagccgtcctacgcttgaggtcagtcctaacgtttgtcattccaacatatacagtcctaaggaaactattcccgaggaggctagatccgacatgcattattcagtcgctgaaggcctcaagcccgccgccccttccgccagaaatgccccttattttccgtgtgacaaagcgtccaaggaagaagaacggccgtcttctgaggatgagattgctcttcacttcgaaccccccaacgcccctttaaatcgaaagggattggtgagtccacaatcaccccaaaagagtgactgccagccaaatagccccactgaatcctgcagttccaaaaatgcttgcatcctccaggcgtctggatcaccaccagccaagtcacccacagatccaaaggcatgtaattggaagaaatataaattcatcgtgttaaacagcctgaaccagaacgcgaagcctgaggggccagagcaggctgaactgggcaggctaagtccccgcgcttacaccgcgccccctgcttgtcagccccccatggaaccggaaaatctggatttgcagtcacctacaaaactgtctgcttctggagaagatagtaccatccctcaggctagtcgcctcaataatatcgtgaatagaagcatgactggatcccccaggagtagtagcgagtcccatagccctttatatatgcacccacctaagtgtactagctgtggcagtcagtcaccacaacacgctgaaatgtgtctccataccgccggcccaacttttcctgaagagatgggagaaacacagtcagaatattcggattcatcctgcggagaaaaaccttataggtgcaacatctgcggggcgcagtttaatcggccagcaaatctgaaaacccatacccggatccactcaggagaaaaaccttacaaatgtgagacttgcggggccagattcgtgcaggtggctcaccttcgtgcccatgtgctgatacacaccggagaaaaaccttatccttgtgagatctgtggcacccgcttccggcaccttcagacattaaaaagtcaccttaggatccacaccggcgagaagccgtatcattgcgaaaaatgtaaccttcatttcaggcacaaatctcagctgcggttgcatctgcgccaaaagcacggcgctataaccaacaccaaagtgcagtacagagtttctgcaaccgacctgcctccagaattgcctaaagcctgttag

SEQ ID NO: 49698 - DNA, 369 bp, Artificial Sequence
  derived and/or modified sequence
atggccagccctgctgacagctgcatccagttcaccaggcatgccagtgatgtgctgctgaacctgaaccggctgcggagccgggacatcctgacagatgtggtgattgtggtgtcccgggagcagttccgggcccacaagacagtgctgatggcctgcagcggcctcttctacagcatcttcacagaccagctgaagtgcaacctgagcgtcatcaacctggaccctgagatcaaccctgagggcttctgcatcctgctggacttcatgtacaccagccggctgaacctgcgggagggcaacatcatggctgtgatggccacagccatgtacctgcagatggagcacgtggtggacacctgcaggtag

SEQ ID NO: 49699 - DNA, 315 bp, Artificial Sequence
  derived and/or modified sequence
atggccagccctgctgacagctgcatccagttcaccaggcatgccagtgatgtgctgctgaacctgaaccggctgcggagccgggacatcctgacagatgtggtgattgtggtgtcccgggagcagttccgggcccacaagacagtgctgatggcctgcagcggcctcttctacagcatcttcacagaccagctgaagtgcaacctgagcgtcatcaacctggaccctgagatcaaccctgagggcttctgcatcctgctggacttcatgtacaccagccggctgaacctgcgggagggcaacatcatggcctag

SEQ ID NO: 49700 - DNA, 1953 bp, Artificial Sequence
  derived and/or modified sequence
atggccagccctgctgacagctgcatccagttcaccaggcatgccagtgatgtgctgctgaacctgaaccggctgcggagccgggacatcctgacagatgtggtgattgtggtgtcccgggagcagttccgggcccacaagacagtgctgatggcctgcagcggcctcttctacagcatcttcacagaccagctgaagtgcaacctgagcgtcatcaacctggaccctgagatcaaccctgagggcttctgcatcctgctggacttcatgtacaccagccggctgaacctgcgggagggcaacatcatggctgtgatggccacagccatgtacctgcagatggagcacgtggtggacacctgcaggaagttcatcaaggccagcgaggccgagatggtgtctgccatcaagccaccccgggaggagttcctgaacagcaggatgctgatgccccaggacatcatggcctaccggggccgggaggtggtggagaacaacctgcccctgcggagcgcccctggctgtgagagccgggcctttgcccccagcctgtacagcggcctgagcaccccaccagccagctacagcatgtacagccacctgcctgtgagcagcctgctcttcagtgatgaggagttcagagatgtgaggatgcctgtggccaaccccttccccaaggagcgggccctgccctgtgacagcgcccggcctgtgcctggagagtacagccggcccaccctggaggtgagccccaacgtgtgccacagcaacatctacagccccaaggagaccatccctgaggaggcccggagtgacatgcactacagcgtggccgagggcctgaagccagctgcccccagcgccagaaatgccccctacttcccctgtgacaaggccagcaaggaggaggagcggcccagcagtgaagatgagatcgccctgcactttgagcccccaaatgcccccctgaacaggaagggcctggtgagcccccagagcccccagaagagtgactgccagcccaacagccccacagagagctgcagcagcaagaatgcctgcatcctgcaggccagcggcagccccccagccaagagccccacagaccccaaggcctgcaactggaagaagtacaagttcatcgtgctgaacagcctgaaccagaatgccaagccagagggccctgagcaggccgagctgggccgcctgagcccccgggcctacacagcccccccagcctgccagccccccatggagcctgagaacctggacctgcagagccccaccaagctgagcgccagcggggaggacagcaccatcccccaggccagccggctgaacaacatcgtgaacagatccatgacaggcagccccaggagcagcagcgagagccacagccccctgtacatgcacccccccaagtgcaccagctgtggcagccagagcccccagcacgccgagatgtgcctgcacacagctggccccaccttccctgaggagatgggagagacccagagcgagtacagcgacagcagctgtggggagaagccctaccgctgcaacatctgtggggcccagttcaacagacctgccaacctgaagacccacacccgcatccacagcggggagaagccctacaagtgtgagacctgtggggccaggtttgtgcaggtggcccacctgcgggcccacgtgctgatccacactggagagaagccctacccctgtgagatctgtggcacccgcttccgccacctgcagaccctgaagagccacctgcgcatccacactggagagaagccctaccactgtgagaagtgcaacctgcacttccgccacaagagccagctgcggctgcacctgcggcagaagcatggagccatcaccaacaccaaggtgcagtacagagtgtctgccacagacctgcccccagagctgcccaaggcctgctag

SEQ ID NO: 49701 - DNA, 369 bp, Artificial Sequence
  derived and/or modified sequence
atggccagccccgccgacagctgcatccagttcacccggcacgcctcggatgtgctgctgaatctgaatcgtctgcgcagtcgagatatcctcactgatgtagtgattgtggtatcgagagaacagttcagagcccataaaacagtattaatggcctgttcaggtctgttttattctatcttcaccgaccagcttaaatgcaatctgtcagttatcaatctggacccggaaatcaaccccgagggcttctgtatactacttgatttcatgtacaccagccggctcaacctgagagaaggcaatatcatggccgtgatggcgacagctatgtatctgcaaatggaacacgtggtggatacctgccggtag

SEQ ID NO: 49702 - DNA, 315 bp, Artificial Sequence
  derived and/or modified sequence
atggccagccccgccgacagctgcatccagttcacccggcacgccagcgacgtgcttctgaaccttaatagattaaggagtagggacatacttacagacgtcgtgattgtggtcagccgcgagcagttccgagctcacaaaactgtgctcatggcatgctctggccttttctacagtatctttaccgaccagttgaagtgcaacctttctgtcattaatcttgatccagagataaaccctgagggtttctgtatccttcttgacttcatgtacacatccagactgaatctgagggagggcaacatcatggcttag

SEQ ID NO: 49703 - DNA, 1953 bp, Artificial Sequence
  derived and/or modified sequence
atggccagccccgccgacagctgcatccagttcacccggcacgcctctgacgtcttactgaacctgaatcgcctgagaagtcgagacattctgacagacgtggtaatagttgtatcgcgcgaacagttcagggcccacaaaaccgtgctcatggcctgcagtggtttgttctacagtatattcacagatcagcttaagtgtaacttatcggtaataaacctcgaccctgagatcaacccagaggggttctgcatccttctggactttatgtacacaagccgtttgaacctgcgcgaggggaacattatggccgttatggccactgcaatgtacctccaaatggaacacgtggtggacacgtgtaggaagttcatcaaagcttcggaagctgaaatggtgagcgccataaagccaccaagggaggaatttctcaattcccgcatgctgatgcctcaggatattatggcatacagaggcagggaagtggtggaaaacaacctcccactgaggtctgccccgggttgtgagtccagagccttcgcaccttccttgtacagtggactgagcacaccccccgcctcctattctatgtattctcacctccccgtgtcatccctgcttttctccgatgaggaattccgggacgttcgaatgccagtcgctaatccattcccaaaggagagggccctgccctgtgactccgcgaggcccgtaccgggcgaatatagccgacctaccctggaggtgtcccccaatgtatgtcattccaacatctactcccctaaagagacaatccctgaggaagctcgttcggatatgcactactccgtggcagagggccttaagccagccgcccctagcgcgcgaaacgcgccctactttccatgcgacaaagcttccaaagaagaagagcggcctagtagcgaggatgaaattgccctgcattttgagccccctaacgcgcccttaaaccggaaaggtctggtgagcccacagtccccacagaagagtgactgtcagcccaattccccaactgaaagctgttcttctaagaacgcctgtatactgcaggcctcaggaagtccccccgccaaatcccctactgacccaaaggcatgcaactggaagaaatacaagttcatagtgctaaactcactaaaccagaacgcaaaacccgagggtccggagcaggccgaactgggcagattgtcccccagggcctataccgccccacctgcgtgccaacctccgatggagcccgagaatctcgacttacagtcccctaccaagttgagcgcatccggcgaggattcaactatcccgcaggccagccgtctcaataacattgtgaacagatccatgactgggtctccaagatcaagcagcgagtcacactcacccctttatatgcatcctccaaagtgtacttcatgtggcagtcagtctccccagcacgctgagatgtgtctgcatacagccggtcctacgtttcctgaggaaatgggagaaacacaatcggagtatagcgactcctcatgcggagagaaaccctaccgttgcaacatttgcggtgcccaattcaacagacccgctaatcttaagactcacacacggatccacagcggagaaaagccctataaatgtgagacatgcggcgcccgatttgtacaggttgcacaccttcgggcccacgtcctgattcacaccggagaaaaaccgtacccttgcgagatctgcgggactcggtttcggcacctgcagacactgaagagccatctccgcattcacactggagaaaagccttaccactgcgagaagtgtaaccttcattttaggcataagagtcagctgcgtttgcacctgcgccagaaacacggggctattacaaatactaaggtacagtacagagtgagtgccactgatctaccccccgagctccccaaggcctgctag

SEQ ID NO: 49704 - DNA, 369 bp, Artificial Sequence
  derived and/or modified sequence
atggctagtcctgcggacagttgcatccagtttacacggcatgctagtgacgtgctcctgaaccttaatcgcctgagatcaagagatattcttactgatgttgtgattgtggttagcagggagcagttcagggcccataagaccgtgcttatggcttgttctgggctgttttatagcatcttcactgaccagttgaagtgcaatctgtctgtgatcaatttggatcccgaaatcaatccagaaggcttctgcatcttgctggactttatgtatacaagccggcttaacctgagagaaggcaacatcatggcggtaatggctacagcaatgtacctgcagatggaacatgtggtcgacacctgccggtag

SEQ ID NO: 49705 - DNA, 315 bp, Artificial Sequence
  derived and/or modified sequence
atggccagccctgcagactcttgtatccagtttaccagacacgcgtccgatgttctccttaatctcaaccgcttacgcagccgcgatatattgacagatgtggtgatcgtggtctctcgagagcagttccgggcacacaagacagtgctgatggcatgtagtggactcttctacagtatattcaccgaccagctcaaatgcaatttatccgtcatcaacctcgaccccgagatcaacccggagggattttgcattttgctggactttatgtacaccagtcgactgaatctgcgcgaggggaatataatggcgtag

SEQ ID NO: 49706 - DNA, 1953 bp, Artificial Sequence
  derived and/or modified sequence
atggctagccctgccgattcctgcatccaattcacgcgtcacgcgagtgatgtcctacttaaccttaaccgcctgcgtagcagagacatcctgactgatgtcgttatcgtggtgtcccgcgaacagttccgggctcataagacggtcctcatggcctgttctgggctcttttactcgatattcacggatcagctgaaatgtaacctatctgtaataaacctcgatccagaaataaatcccgagggcttttgcatccttttggacttcatgtataccagcaggctgaatctaagagaaggtaatattatggcagtaatggctactgctatgtaccttcagatggagcatgtagtggacacgtgcagaaaattcataaaagcaagtgaagctgagatggtgagcgccataaagcctcctcgcgaggagtttctgaatagcagaatgctgatgcctcaggatatcatggcttatcgagggagagaagtggtggagaacaacctcccgctgcggtcggcccctggatgcgaatctagggcctttgcccctagtctctacagcggcttgtcaactccgcctgcatcttactccatgtactctcatttgcccgtcagctctctcctgttcagtgatgaggagtttagagatgtccgcatgcccgtggctaatccctttcccaaggaaagggccctgccatgcgattccgccaggcctgtgcccggagagtatagccgtccaactttagaagtaagcccaaatgtgtgccacagcaatatctactctcctaaggagactatccctgaggaggcccgatccgacatgcattatagcgtggcggaaggcctgaaaccggctgccccttcagccaggaatgctccctacttcccttgtgacaaagcttctaaggaggaggagcgcccatcgagcgaggacgaaatagcgctccactttgaaccgcctaatgcccctctcaatcgtaagggcctagtgtcacctcagtcaccgcagaaatcggactgccagccaaactcccctaccgagtcttgctcttctaagaatgcatgtattcttcaagctagtggatctccccctgctaagagtcctacggaccctaaggcctgtaactggaagaaatacaaatttatcgtgctcaattcccttaatcagaacgctaaacccgaaggacccgagcaagccgagctaggacgcctgagtcctcgggcatacaccgctcccccagcgtgccagccccctatggagcctgagaatctggacctgcagtctccaaccaagctttccgctagcggcgaagactccacgatcccccaggcctctcggttgaacaatatcgtgaataggtctatgactgggtcgccccgatctagtagcgagtctcacagccctctgtacatgcaccctcccaaatgtacctcatgtggcagccaaagtccccagcacgcagagatgtgtctgcatacagccggtccaacctttccagaggaaatgggcgagacacagtccgagtattccgatagttcttgcggtgaaaagccctatagatgcaacatttgtggcgctcagtttaatcgcccagccaacctcaaaacacatactaggatccattcaggtgagaagccatacaaatgtgaaacctgtggagccagattcgtgcaggtggcacatttgagggcacatgtgttgatacatacaggggagaaaccgtatccatgcgaaatctgcgggaccagattccggcatctccagacactcaagtcccacctgcgaatacacaccggtgaaaaaccataccattgtgaaaagtgtaacctccactttcgccataagtcgcagctgcgactgcacttgcgtcagaagcacggagccataacgaacactaaggtccagtaccgggtttccgctaccgatctgccccctgagctgcccaaggcatgttag

SEQ ID NO: 49707 - DNA, 454 bp, Artificial Sequence
  derived and/or modified sequence
gttaaatcaatttctgtttgctttcttctcttctctgtaggttttgagcaaaattttggactgtgaagcaaggcattggtgaagacaaaatggcctcgccggctgacagctgtatccagttcacccgccatgccagtgatgttcttctcaaccttaatcgtctccggagtcgagacatcttgactgatgttgtcattgttgtgagccgtgagcagtttagagcccataaaacggtcctcatggcctgcagtggcctgttctatagcatctttacagaccagttgaaatgcaaccttagtgtgatcaatctagatcctgagatcaaccctgagggattctgcatcctcctggacttcatgtacacatctcggctcaatttgcgggagggcaacatcatggctgtgatggccacggctatgtacctgcagatggagcatgttgtggacacttgccg

SEQ ID NO: 49708 - DNA, 709 bp, Artificial Sequence
  derived and/or modified sequence
tcctggcggctgccggggccggcagcttcctggaaagttacttcttgttggagccggcaataggcaaagtgtgttctgtgaaatccgcagagccgagattgactacgttccgggaatgagagggctgtgtcattcccctcattgcctgctgcattgacggcgtaacaggaaaaaaaaaaaaaaaaaaaaaaaggcatacacacaatgttagctaccgaggtgcaccaaaagttttatttgaatgtaactaaattaagggccgccacggtcataccacaaagcctccgtcgcgccttgcggggggcttcgaggtggatcgcccaggggcgggcagtccctggaagacaggttttgagcaaaattttggactgtgaagcaaggcattggtgaagacaaaatggcctcgccggctgacagctgtatccagttcacccgccatgccagtgatgttcttctcaaccttaatcgtctccggagtcgagacatcttgactgatgttgtcattgttgtgagccgtgagcagtttagagcccataaaacggtcctcatggcctgcagtggcctgttctatagcatctttacagaccagttgaaatgcaaccttagtgtgatcaatctagatcctgagatcaaccctgagggattctgcatcctcctggacttcatgtacacatctcggctcaatttgcgggagggcaacatcatggct

SEQ ID NO: 49709 - DNA, 2003 bp, Artificial Sequence
  derived and/or modified sequence
aagcaaggcattggtgaagacaaaatggcctcgccggctgacagctgtatccagttcacccgccatgccagtgatgttcttctcaaccttaatcgtctccggagtcgagacatcttgactgatgttgtcattgttgtgagccgtgagcagtttagagcccataaaacggtcctcatggcctgcagtggcctgttctatagcatctttacagaccagttgaaatgcaaccttagtgtgatcaatctagatcctgagatcaaccctgagggattctgcatcctcctggacttcatgtacacatctcggctcaatttgcgggagggcaacatcatggctgtgatggccacggctatgtacctgcagatggagcatgttgtggacacttgccggaagtttattaaggccagtgaagcagagatggtttctgccatcaagcctcctcgtgaagagttcctcaacagccggatgctgatgccccaagacatcatggcctatcggggtcgtgaggtggtggagaacaacctgccactgaggagcgcccctgggtgtgagagcagagcctttgcccccagcctgtacagtggcctgtccacaccgccagcctcttattccatgtacagccacctccctgtcagcagcctcctcttctccgatgaggagtttcgggatgtccggatgcctgtggccaaccccttccccaaggagcgggcactcccatgtgatagtgccaggccagtccctggtgagtacagccggccgactttggaggtgtcccccaatgtgtgccacagcaatatctattcacccaaggaaacaatcccagaagaggcacgaagtgatatgcactacagtgtggctgagggcctcaaacctgctgccccctcagcccgaaatgccccctacttcccttgtgacaaggccagcaaagaagaagagagaccctcctcggaagatgagattgccctgcatttcgagccccccaatgcacccctgaaccggaagggtctggttagtccacagagcccccagaaatctgactgccagcccaactcgcccacagagtcctgcagcagtaagaatgcctgcatcctccaggcttctggctcccctccagccaagagccccactgaccccaaagcctgcaactggaagaaatacaagttcatcgtgctcaacagcctcaaccagaatgccaaaccagaggggcctgagcaggctgagctgggccgcctttccccacgagcctacacggccccacctgcctgccagccacccatggagcctgagaaccttgacctccagtccccaaccaagctgagtgccagcggggaggactccaccatcccacaagccagccggctcaataacatcgttaacaggtccatgacgggctctccccgcagcagcagcgagagccactcaccactctacatgcaccccccgaagtgcacgtcctgcggctctcagtccccacagcatgcagagatgtgcctccacaccgctggccccacgttccctgaggagatgggagagacccagtctgagtactcagattctagctgtggtgagaaaccctatcgttgcaacatctgtggggcccagttcaaccggccagccaacctgaaaacccacactcgaattcactctggagagaagccctacaaatgcgaaacctgcggagccagatttgtacaggtggcccacctccgtgcccatgtgcttatccacactggtgagaagccctatccctgtgaaatctgtggcacccgtttccggcaccttcagactctgaagagccacctgcgaatccacacaggagagaaaccttaccattgtgagaagtgtaacctgcatttccgtcacaaaagccagctgcgacttcacttgcgccagaagcatggcgccatcaccaacaccaaggtgcaataccgcgtgtcagccactgacctgcctccggagctccccaaagcctgctgaagcatggagtgttgatgctttcgtct

SEQ ID NO: 49710 - DNA, 369 bp, Artificial Sequence
  derived and/or modified sequence
atggccagccccgccgacagctgcatccagttcaccagacacgccagcgacgtgctgctgaacctgaacagactgagaagcagagacatcctgaccgacgtggtgatcgtggtgagcagagagcagttcagagcccacaagaccgtgctgatggcctgcagcggcctgttctacagcatcttcaccgaccagctgaagtgcaacctgagcgtgatcaacctggaccccgagatcaaccccgagggcttctgcatcctgctggacttcatgtacaccagcagactgaacctgagagagggcaacatcatggccgtgatggccaccgccatgtacctgcagatggagcacgtggtggacacctgcagatag

SEQ ID NO: 49711 - DNA, 315 bp, Artificial Sequence
  derived and/or modified sequence
atggccagccccgccgacagctgcatccagttcaccagacacgccagcgacgtgctgctgaacctgaacagactgagaagcagagacatcctgaccgacgtggtgatcgtggtgagcagagagcagttcagagcccacaagaccgtgctgatggcctgcagcggcctgttctacagcatcttcaccgaccagctgaagtgcaacctgagcgtgatcaacctggaccccgagatcaaccccgagggcttctgcatcctgctggacttcatgtacaccagcagactgaacctgagagagggcaacatcatggcctag

SEQ ID NO: 49712 - DNA, 1953 bp, Artificial Sequence
  derived and/or modified sequence
atggccagccccgccgacagctgcatccagttcaccagacacgccagcgacgtgctgctgaacctgaacagactgagaagcagagacatcctgaccgacgtggtgatcgtggtgagcagagagcagttcagagcccacaagaccgtgctgatggcctgcagcggcctgttctacagcatcttcaccgaccagctgaagtgcaacctgagcgtgatcaacctggaccccgagatcaaccccgagggcttctgcatcctgctggacttcatgtacaccagcagactgaacctgagagagggcaacatcatggccgtgatggccaccgccatgtacctgcagatggagcacgtggtggacacctgcagaaagttcatcaaggccagcgaggccgagatggtgagcgccatcaagccccccagagaggagttcctgaacagcagaatgctgatgccccaggacatcatggcctacagaggcagagaggtggtggagaacaacctgcccctgagaagcgcccccggctgcgagagcagagccttcgcccccagcctgtacagcggcctgagcaccccccccgccagctacagcatgtacagccacctgcccgtgagcagcctgctgttcagcgacgaggagttcagagacgtgagaatgcccgtggccaaccccttccccaaggagagagccctgccctgcgacagcgccagacccgtgcccggcgagtacagcagacccaccctggaggtgagccccaacgtgtgccacagcaacatctacagccccaaggagaccatccccgaggaggccagaagcgacatgcactacagcgtggccgagggcctgaagcccgccgcccccagcgccagaaacgccccctacttcccctgcgacaaggccagcaaggaggaggagagacccagcagcgaggacgagatcgccctgcacttcgagccccccaacgcccccctgaacagaaagggcctggtgagcccccagagcccccagaagagcgactgccagcccaacagccccaccgagagctgcagcagcaagaacgcctgcatcctgcaggccagcggcagcccccccgccaagagccccaccgaccccaaggcctgcaactggaagaagtacaagttcatcgtgctgaacagcctgaaccagaacgccaagcccgagggccccgagcaggccgagctgggcagactgagccccagagcctacaccgccccccccgcctgccagccccccatggagcccgagaacctggacctgcagagccccaccaagctgagcgccagcggcgaggacagcaccatcccccaggccagcagactgaacaacatcgtgaacagaagcatgaccggcagccccagaagcagcagcgagagccacagccccctgtacatgcacccccccaagtgcaccagctgcggcagccagagcccccagcacgccgagatgtgcctgcacaccgccggccccaccttccccgaggagatgggcgagacccagagcgagtacagcgacagcagctgcggcgagaagccctacagatgcaacatctgcggcgcccagttcaacagacccgccaacctgaagacccacaccagaatccacagcggcgagaagccctacaagtgcgagacctgcggcgccagattcgtgcaggtggcccacctgagagcccacgtgctgatccacaccggcgagaagccctacccctgcgagatctgcggcaccagattcagacacctgcagaccctgaagagccacctgagaatccacaccggcgagaagccctaccactgcgagaagtgcaacctgcacttcagacacaagagccagctgagactgcacctgagacagaagcacggcgccatcaccaacaccaaggtgcagtacagagtgagcgccaccgacctgccccccgagctgcccaaggcctgctag

SEQ ID NO: 49713 - protein, 1094 aa, Artificial Sequence
  derived and/or modified sequence
MEDEAVLDRGASFLKHVCDEEEVEGHHTIYIGVHVPKSYRRRRRHKRKTGHKEKKEKERISENYSDKSDIENADESSSSILKPLISPAAERIRFILGEEDDSPAPPQLFTELDELLAVDGQEMEWKETARWIKFEEKVEQGGERWSKPHVATLSLHSLFELRTCMEKGSIMLDREASSLPQLVEMIVDHQIETGLLKPELKDKVTYTLLRKHRHQTKKSNLRSLADIGKTVSSASRMFTNPDNGSPAMTHRNLTSSSLNDISDKPEKDQLKNKFMKKLPRDAEASNVLVGEVDFLDTPFIAFVRLQQAVMLGALTEVPVPTRFLFILLGPKGKAKSYHEIGRAIATLMSDEVFHDIAYKAKDRHDLIAGIDEFLDEVIVLPPGEWDPAIRIEPPKSLPSSDKRKNMYSGGENVQMNGDTPHDGGHGGGGHGDCEELQRTGRFCGGLIKDIKRKAPFFASDFYDALNIQALSAILFIYLATVTNAITFGGLLGDATDNMQGVLESFLGTAVSGAIFCLFAGQPLTILSSTGPVLVFERLLFNFSKDNNFDYLEFRLWIGLWSAFLCLILVATDASFLVQYFTRFTEEGFSSLISFIFIYDAFKKMIKLADYYPINSNFKVGYNTLFSCTCVPPDPANISISNDTTLAPEYLPTMSSTDMYHNTTFDWAFLSKKECSKYGGNLVGNNCNFVPDITLMSFILFLGTYTSSMALKKFKTSPYFPTTARKLISDFAIILSILIFCVIDALVGVDTPKLIVPSEFKPTSPNRGWFVPPFGENPWWVCLAAAIPALLVTILIFMDQQITAVIVNRKEHKLKKGAGYHLDLFWVAILMVICSLMALPWYVAATVISIAHIDSLKMETETSAPGEQPKFLGVREQRVTGTLVFILTGLSVFMAPILKFIPMPVLYGVFLYMGVASLNGVQFMDRLKLLLMPLKHQPDFIYLRHVPLRRVHLFTFLQVLCLALLWILKSTVAAIIFPVMILALVAVRKGMDYLFSQHDLSFLDDVIPEKDKKKKEDEKKKKKKKGSLDSDNDDEKDHQHSLNATHHADKIPFLQSLGMPSPPRTPVKVVPQIRIELEPEDNDYFWRSKGTETTL

SEQ ID NO: 49714 - DNA, 2988 bp, Artificial Sequence
  derived and/or modified sequence
atggaggacgaggccgtgctggacagaggcgccagcttcctgaagcacgtgtgcgacgaggaggaggtggagggccaccacaccatctacatcggcgtgcacgtgcccaagagctacagaagaagaagaagacacaagagaaagaccggccacaaggagaagaaggagaaggagagaatcagcgagaactacagcgacaagagcgacatcgagaacgccgacgagagcagcagcagcatcctgaagcccctgatcagccccgccgccgagagaatcagattcatcctgggcgaggaggacgacagccccgcccccccccagctgttcaccgagctggacgagctgctggccgtggacggccaggagatggagtggaaggagaccgccagatggatcaagttcgaggagaaggtggagcagggcggcgagagatggagcaagccccacgtggccaccctgagcctgcacagcctgttcgagctgagaacctgcatggagaagggcagcatcatgctggacagagaggccagcagcctgccccagctggtggagatgatcgtggaccaccagatcgagaccggcctgctgaagcccgagctgaaggacaaggtgacctacaccctgctgagaaagcacagacaccagaccaagaagagcaacctgagaagcctggccgacatcggcaagaccgtgagcagcgccagcagaatgttcaccaaccccgacaacggcagccccgccatgacccacagaaacctgaccagcagcagcctgaacgacatcagcgacaagcccgagaaggaccagctgaagaacaagttcatgaagaagctgcccagagacgccgaggccagcaacgtgctggtgggcgaggtggacttcctggacacccccttcatcgccttcgtgagactgcagcaggccgtgatgctgggcgccctgaccgaggtgcccgtgcccaccagattcctgttcatcctgctgggccccaagggcaaggccaagagctaccacgagatcggcagagccatcgccaccctgatgagcgacgaggtgttccacgacatcgcctacaaggccaaggacagacacgacctgatcgccggcatcgacgagttcctggacgaggtgatcgtgctgccccccggcgagtgggaccccgccatcagaatcgagccccccaagagcctgcccagcagcgacaagagaaagaacatgtacagcggcggcgagaacgtgcagatgaacggcgacaccccccacgacggcggccacggcggcggcggccacggcgactgcgaggagctgcagagaaccggcagattctgcggcggcctgatcaaggacatcaagagaaaggcccccttcttcgccagcgacttctacgacgccctgaacatccaggccctgagcgccatcctgttcatctacctggccaccgtgaccaacgccatcaccttcggcggcctgctgggcgacgccaccgacaacatgcagggcgtgctggagagcttcctgggcaccgccgtgagcggcgccatcttctgcctgttcgccggccagcccctgaccatcctgagcagcaccggccccgtgctggtgttcgagagactgctgttcaacttcagcaaggacaacaacttcgactacctggagttcagactgtggatcggcctgtggagcgccttcctgtgcctgatcctggtggccaccgacgccagcttcctggtgcagtacttcaccagattcaccgaggagggcttcagcagcctgatcagcttcatcttcatctacgacgccttcaagaagatgatcaagctggccgactactaccccatcaacagcaacttcaaggtgggctacaacaccctgttcagctgcacctgcgtgccccccgaccccgccaacatcagcatcagcaacgacaccaccctggcccccgagtacctgcccaccatgagcagcaccgacatgtaccacaacaccaccttcgactgggccttcctgagcaagaaggagtgcagcaagtacggcggcaacctggtgggcaacaactgcaacttcgtgcccgacatcaccctgatgagcttcatcctgttcctgggcacctacaccagcagcatggccctgaagaagttcaagaccagcccctacttccccaccaccgccagaaagctgatcagcgacttcgccatcatcctgagcatcctgatcttctgcgtgatcgacgccctggtgggcgtggacacccccaagctgatcgtgcccagcgagttcaagcccaccagccccaacagaggctggttcgtgccccccttcggcgagaacccctggtgggtgtgcctggccgccgccatccccgccctgctggtgaccatcctgatcttcatggaccagcagatcaccgccgtgatcgtgaacagaaaggagcacaagctgaagttcatccccatgcccgtgctgtacggcgtgttcctgtacatgggcgtggccagcctgaacggcgtgcagttcatggacagactgaagctgctgctgatgcccctgaagcaccagcccgacttcatctacctgagacacgtgcccctgagaagagtgcacctgttcaccttcctgcaggtgctgtgcctggccctgctgtggatcctgaagagcaccgtggccgccatcatcttccccgtgatgatcctggccctggtggccgtgagaaagggcatggactacctgttcagccagcacgacctgagcttcctggacgacgtgatccccgagaaggacaagaagaagaaggaggacgagaagaagaagaagaagaagaagggcagcctggacagcgacaacgacgacagcgactgcccctacagcgagaaggtgcccagcatcaagatccccatggacatcatggagcagcagcccttcctgagcgacagcaagcccagcgacagagagagaagccccaccttcctggagagacacaccagctgctag

SEQ ID NO: 49715 - DNA, 3285 bp, Artificial Sequence
  derived and/or modified sequence
atggaggacgaggccgtgctggacagaggcgccagcttcctgaagcacgtgtgcgacgaggaggaggtggagggccaccacaccatctacatcggcgtgcacgtgcccaagagctacagaagaagaagaagacacaagagaaagaccggccacaaggagaagaaggagaaggagagaatcagcgagaactacagcgacaagagcgacatcgagaacgccgacgagagcagcagcagcatcctgaagcccctgatcagccccgccgccgagagaatcagattcatcctgggcgaggaggacgacagccccgcccccccccagctgttcaccgagctggacgagctgctggccgtggacggccaggagatggagtggaaggagaccgccagatggatcaagttcgaggagaaggtggagcagggcggcgagagatggagcaagccccacgtggccaccctgagcctgcacagcctgttcgagctgagaacctgcatggagaagggcagcatcatgctggacagagaggccagcagcctgccccagctggtggagatgatcgtggaccaccagatcgagaccggcctgctgaagcccgagctgaaggacaaggtgacctacaccctgctgagaaagcacagacaccagaccaagaagagcaacctgagaagcctggccgacatcggcaagaccgtgagcagcgccagcagaatgttcaccaaccccgacaacggcagccccgccatgacccacagaaacctgaccagcagcagcctgaacgacatcagcgacaagcccgagaaggaccagctgaagaacaagttcatgaagaagctgcccagagacgccgaggccagcaacgtgctggtgggcgaggtggacttcctggacacccccttcatcgccttcgtgagactgcagcaggccgtgatgctgggcgccctgaccgaggtgcccgtgcccaccagattcctgttcatcctgctgggccccaagggcaaggccaagagctaccacgagatcggcagagccatcgccaccctgatgagcgacgaggtgttccacgacatcgcctacaaggccaaggacagacacgacctgatcgccggcatcgacgagttcctggacgaggtgatcgtgctgccccccggcgagtgggaccccgccatcagaatcgagccccccaagagcctgcccagcagcgacaagagaaagaacatgtacagcggcggcgagaacgtgcagatgaacggcgacaccccccacgacggcggccacggcggcggcggccacggcgactgcgaggagctgcagagaaccggcagattctgcggcggcctgatcaaggacatcaagagaaaggcccccttcttcgccagcgacttctacgacgccctgaacatccaggccctgagcgccatcctgttcatctacctggccaccgtgaccaacgccatcaccttcggcggcctgctgggcgacgccaccgacaacatgcagggcgtgctggagagcttcctgggcaccgccgtgagcggcgccatcttctgcctgttcgccggccagcccctgaccatcctgagcagcaccggccccgtgctggtgttcgagagactgctgttcaacttcagcaaggacaacaacttcgactacctggagttcagactgtggatcggcctgtggagcgccttcctgtgcctgatcctggtggccaccgacgccagcttcctggtgcagtacttcaccagattcaccgaggagggcttcagcagcctgatcagcttcatcttcatctacgacgccttcaagaagatgatcaagctggccgactactaccccatcaacagcaacttcaaggtgggctacaacaccctgttcagctgcacctgcgtgccccccgaccccgccaacatcagcatcagcaacgacaccaccctggcccccgagtacctgcccaccatgagcagcaccgacatgtaccacaacaccaccttcgactgggccttcctgagcaagaaggagtgcagcaagtacggcggcaacctggtgggcaacaactgcaacttcgtgcccgacatcaccctgatgagcttcatcctgttcctgggcacctacaccagcagcatggccctgaagaagttcaagaccagcccctacttccccaccaccgccagaaagctgatcagcgacttcgccatcatcctgagcatcctgatcttctgcgtgatcgacgccctggtgggcgtggacacccccaagctgatcgtgcccagcgagttcaagcccaccagccccaacagaggctggttcgtgccccccttcggcgagaacccctggtgggtgtgcctggccgccgccatccccgccctgctggtgaccatcctgatcttcatggaccagcagatcaccgccgtgatcgtgaacagaaaggagcacaagctgaagaagggcgccggctaccacctggacctgttctgggtggccatcctgatggtgatctgcagcctgatggccctgccctggtacgtggccgccaccgtgatcagcatcgcccacatcgacagcctgaagatggagaccgagaccagcgcccccggcgagcagcccaagttcctgggcgtgagagagcagagagtgaccggcaccctggtgttcatcctgaccggcctgagcgtgttcatggcccccatcctgaagttcatccccatgcccgtgctgtacggcgtgttcctgtacatgggcgtggccagcctgaacggcgtgcagttcatggacagactgaagctgctgctgatgcccctgaagcaccagcccgacttcatctacctgagacacgtgcccctgagaagagtgcacctgttcaccttcctgcaggtgctgtgcctggccctgctgtggatcctgaagagcaccgtggccgccatcatcttccccgtgatgatcctggccctggtggccgtgagaaagggcatggactacctgttcagccagcacgacctgagcttcctggacgacgtgatccccgagaaggacaagaagaagaaggaggacgagaagaagaagaagaagaagaagggcagcctggacagcgacaacgacgacgagaaggaccaccagcacagcctgaacgccacccaccacgccgacaagatccccttcctgcagagcctgggcatgcccagcccccccagaacccccgtgaaggtggtgccccagatcagaatcgagctggagcccgaggacaacgactacttctggagaagcaagggcaccgagaccaccctgtag

SEQ ID NO: 49716 - DNA, 2988 bp, Artificial Sequence
  derived and/or modified sequence
atggaggacgaggctgtcttggatcgcggggcctcatttctcaagcatgtttgcgacgaagaggaagttgaggggcatcacactatctacatcggagtgcacgtgcccaaatcctacaggaggcggaggagacacaaaagaaagaccgggcacaaggagaagaaagaaaaggagcggatcagtgaaaattacagcgataaatccgatatcgagaatgccgacgagagctcttcatcaatccttaaaccactgattagtcccgccgccgagcgtatacggtttatactgggcgaagaagatgactcacccgcaccaccgcagctgtttactgagttagacgaacttctcgcagtggatggtcaggagatggagtggaaagagactgcgcggtggatcaaatttgaggaaaaggtcgaacagggtggcgaacgttggtctaagccccacgttgcgacactgagcctgcattctctgttcgagttgcggacctgcatggaaaaaggctccatcatgctggacagagaagcatcctcattgccccagctagttgagatgatcgtagatcatcagatcgagaccggcctgttaaagcctgagctcaaggacaaagtgacatatacactgcttcgcaaacaccggcatcagacaaagaaatcgaacttgcgtagcttagccgatattggtaaaacggtgtcgagcgccagtagaatgttcaccaaccctgataacggctctcccgccatgactcaccggaacctgacgagcagctctctgaatgacatctccgataagccagagaaagaccagttgaagaacaaattcatgaagaaactgcccagggacgcagaggcctccaatgtgcttgtgggggaagttgactttctggatacccccttcattgccttcgtcagattgcaacaggccgtgatgctcggggccttaaccgaagtgcccgttccaacgcggtttctgtttatccttctcgggcccaaagggaaagctaagtcctatcatgaaataggccgggcaattgccactcttatgagcgatgaggtgttccatgacatcgcgtacaaggccaaagacagacacgatttaatcgccggaatagacgagttcctagacgaggtgatcgtcctgcctcctggcgagtgggacccagccatccgcatcgaacctcctaagtccttgccaagcagcgataaaagaaagaatatgtactccgggggcgagaatgtgcagatgaatggtgataccccccatgatggtggtcacggcgggggcggtcacggggactgtgaggagctgcagcgcaccgggcggttctgtggaggcctcataaaggacattaagaggaaggccccattcttcgctagcgacttctacgacgcccttaacatccaagccctgtctgcaatccttttcatttacctggctacagttaccaacgccattaccttcggaggacttttgggtgatgccactgataatatgcaaggagtccttgaatcatttctgggcacagctgtttcgggggcgatattttgcctcttcgccggtcagccgctcacaatattgagctctacagggccggtcttggtgtttgagagattacttttcaacttttctaaagataataattttgattacctcgaattccggctgtggatcggcctgtggtcagctttcttgtgcctgatcctcgtggccacagatgccagctttctagtccagtacttcactcgtttcacagaagagggattttcttcactgatcagtttcatcttcatatatgatgcatttaaaaaaatgattaagttggcagactactatccaattaatagtaactttaaggtcggctataataccctgttctcctgcacatgtgtgccccccgatccagccaacatctctattagcaacgatactacattggctcccgagtacctccctaccatgagttcaaccgatatgtatcacaacaccaccttcgactgggcatttctgtctaagaaggagtgcagcaagtacggaggaaatctcgtcggtaataactgcaatttcgtgccagatattacgttaatgtcgtttattctgtttttgggcacctatacgagctctatggctttgaaaaagttcaagacgagcccttattttccaaccacagctcgaaagctgatctccgactttgccatcattctgtcaattctgattttctgtgtaattgacgccctggtcggggtggatacccccaagttgatagtcccaagtgagttcaaacctacatctcctaacagaggctggtttgtgccaccctttggagaaaacccgtggtgggtatgtctggctgctgccatacccgccctcttggtcaccatactaattttcatggaccaacaaattaccgccgtcatagttaatcgtaaggagcacaaactgaagtttatccctatgcctgtcctgtatggggtgtttttatatatgggcgtggcctcgcttaacggagttcagttcatggaccgcctgaaactgctgctcatgcctctgaagcatcagcctgacttcatttatctacgacatgtgcccctgcgcagggtccatctgttcactttcctccaagttctctgcctggctcttctgtggattctgaaaagtaccgtcgcagccatcatcttccccgtgatgatcttagctttggttgctgttcgcaagggtatggattatctgttctctcaacatgatctgtcatttttggatgacgtcatcccagaaaaagacaaaaaaaaaaaggaagatgagaaaaaaaagaagaagaagaagggttctcttgacagtgataacgatgacagcgattgtccatattccgagaaggtaccctctataaagataccaatggatattatggagcagcagccatttctctctgactccaaacctagtgaccgggagcggagccccacctttctggagcgccacacttcctgctag

SEQ ID NO: 49717 - DNA, 3285 bp, Artificial Sequence
  derived and/or modified sequence
atggaggacgaagcagttctggatcggggcgccagtttcttaaaacacgtgtgtgatgaggaggaagtcgagggtcatcatacgatttacattggcgtacatgtgcctaagagctaccggagacggcgtcggcataaacgaaaaacgggccataaggagaaaaaggagaaggagcgaatttcagaaaactactcagacaaatccgatatagaaaatgcggatgagagcagttccagtattctgaaaccattaatttcaccagctgccgagaggataaggttcatccttggagaggaagatgacagccctgcacccccacagctgtttaccgaacttgacgagttattagcggtcgatgggcaagagatggagtggaaagagacggcacgctggattaaattcgaggaaaaggtggaacagggtggggagcgctggtcaaaaccacatgttgcgactctttctttgcacagtctgttcgagctgaggacctgtatggagaagggtagtattatgctcgatagggaagctagctctctcccgcagctggtcgaaatgatcgttgatcaccaaatcgagactggacttctgaaaccagaattgaaagacaaggtgacttatactttgctgcgaaagcatcgccaccagactaaaaagagcaatctgcggtccctggcagacattggcaagacagttagctccgcctcaaggatgttcacaaatcctgataatgggagtcctgcaatgacccacagaaatctcacgtctagctccctcaacgacatctccgacaagcccgaaaaggatcagctcaagaacaagtttatgaaaaagctccccagagatgctgaagcgtctaacgtgttggtgggtgaggtggactttttagacacccccttcatagcgttcgtgcgcttgcagcaggcggttatgctcggcgctttaaccgaggtaccagtgcctacacgatttctttttatccttctggggccaaaggggaaggcaaagtcttaccatgagatcggaagggctattgcaactctgatgagcgacgaggtgtttcacgacatcgcctacaaggctaaagacagacatgatctgattgctggaattgatgagtttctggatgaggtgatcgtgctgccgcctggcgagtgggatccagccatccggatcgaacccccgaagagcctgccttcatctgacaaaaggaagaatatgtattctggaggcgagaatgtgcaaatgaacggagatactccccacgacggtggtcacggcggaggcgggcacggagattgtgaggagcttcagagaactggtagattctgcggcgggctgatcaaggatataaagcgtaaggcccccttcttcgcgtccgacttctatgatgctctgaatattcaggcgctgtcggctatcctgtttatttatctggccacggtaactaatgctataacattcggagggctgttgggagacgcaacagataatatgcaaggagtgctcgagtccttcctggggaccgccgtgtctggggctatcttctgcctttttgcaggccaaccgctgaccattctgagctctaccggacctgtgctggtcttcgaaaggctgctctttaatttctcaaaggataataactttgattacctcgagtttcgattgtggatcgggttgtggtctgcttttctttgtttaattctcgtagccacagacgcatcctttctcgtacaatactttaccagattcacggaagagggatttagcagcctgatatcgttcatttttatttatgacgctttcaaaaaaatgattaagttggccgactactatccgatcaattcgaattttaaagtcgggtataacaccttattcagttgcacatgtgtgccacccgaccctgccaatattagtatcagtaatgatactactctggcacccgagtatctgccaacaatgagttccaccgacatgtaccataataccacatttgactgggccttcttgtctaagaaagaatgttccaagtatggagggaatctggtggggaataattgcaatttcgtccctgatatcaccctgatgtcattcatcctttttcttggtacatacacctcttccatggccttgaagaagtttaagacctcaccttattttcctactacagctcggaagctgatctccgacttcgctatcatcctgagcatactgattttttgcgtgatcgacgccttggtgggagttgatacacccaagctgattgtccccagtgagtttaaaccgacctccccaaatcggggctggttcgtgcccccatttggagagaatccctggtgggtttgcctggctgcggccattccagctttattagtgacaatcttaatctttatggaccagcagataactgcagtgattgtgaatagaaaagagcacaaactaaagaagggcgcgggatatcacctggaccttttttgggtcgcaatcttaatggtgatatgttccttgatggctctcccttggtatgttgcggccaccgtaatcagcatagcacatatcgacagcctaaaaatggagaccgaaacgtctgcccctggcgagcagcctaagttcctgggtgtcagggaacagcgtgtgaccggcaccctggtgtttattttaacgggtctatccgtattcatggctccaattctgaaattcatacccatgcccgttctgtacggggtttttctgtatatgggcgtggcttctttgaatggcgttcaatttatggatcggttaaagctcctgctgatgccgcttaagcaccagccggatttcatttatctccgacatgtgccactccgacgcgttcatctgtttaccttcctgcaagttctctgcctggcactgctctggatactgaaatcaaccgttgcggctataatcttccctgtaatgatacttgccctggtggctgtgcgaaaaggaatggattatcttttcagccagcatgatttgtcctttctggacgatgtcattcctgaaaaggataagaagaaaaaagaggacgagaaaaaaaagaaaaagaaaaagggctctttagactcggacaacgacgatgagaaagatcaccaacatagtctgaatgcgacacatcacgccgacaaaatccctttcctgcagagcctgggaatgccgtcacctccccgaactcccgttaaagtggttccacaaatccgcatcgaactggagcccgaagacaacgactatttctggcgctctaaaggaaccgaaaccacgctgtag

SEQ ID NO: 49718 - DNA, 2988 bp, Artificial Sequence
  derived and/or modified sequence
atggaggatgaagctgtgctggacagaggagccagcttcctgaagcacgtgtgtgatgaggaggaggtggagggccaccacaccatctacatcggcgtgcacgtgcccaagagctacagaagaagaagaagacacaagaggaagacaggccacaaggagaagaaggagaaggagcgcatcagcgagaactacagcgacaagagtgacattgaaaatgctgatgagagcagcagcagcatcctgaagcccctcatcagccctgctgctgagcgcatccgcttcatcctgggggaggaggatgacagccctgccccaccccagctgttcacagagctggatgagctgctggccgtggatggccaggagatggagtggaaggagacagcccgctggatcaagtttgaggagaaggtggagcagggcggggagcgctggagcaagccccacgtggccaccctgagcctgcacagcctgtttgagctgcggacctgcatggagaagggcagcatcatgctggaccgggaggccagcagcctgccccagctggtggagatgattgtggaccaccagattgaaacaggcctgctgaagccagagctgaaggacaaggtgacctacaccctgctgaggaagcaccgccaccagaccaagaagagcaacctgcggagcctggccgacatcggcaagacagtgtcctctgccagcaggatgttcaccaacccagacaatggcagccctgccatgacccacaggaacctgaccagcagcagcctgaatgacatcagtgacaagccagagaaggaccagctgaagaacaagttcatgaagaagctgcccagagatgctgaggccagcaatgtgctggtgggggaggtggacttcctggacacccccttcatcgcctttgtgcggctgcagcaggccgtgatgctgggcgccctgacagaggtgcctgtgcccacccgcttcctgttcatcctgctgggccccaagggcaaggccaagagctaccacgagatcggccgggccatcgccaccctgatgtctgatgaggtgttccatgacatcgcctacaaggccaaggacagacatgacctgattgctggcattgatgagttcctggatgaagtcatcgtgctgcccccaggagagtgggaccctgccatcagaattgagccccccaagagcctgcccagcagtgacaagaggaagaacatgtacagcggaggagaaaatgtgcagatgaatggagacacccctcatgatggcggccatggaggcggcggccacggggactgtgaggagctgcagaggacaggccgcttctgtggcggcctcatcaaggacatcaagaggaaggcccccttctttgccagtgacttctatgatgccctgaacatccaggccctgagcgccatcctcttcatctacctggccaccgtgaccaatgccatcacctttggaggcctgctgggagatgccacagacaacatgcagggcgtgctggagagcttcctgggcacagctgtgtctggggccatcttctgcctgtttgctggccagcccctgaccatcctgagcagcactggacctgtgctggtgtttgagcggctgctcttcaacttcagcaaggacaacaactttgactacctggagttccggctgtggattggcctgtggagcgccttcctgtgcctgatcctggtggccacagatgccagcttcctggtgcagtacttcacccgcttcacagaggagggcttcagcagcctcatctccttcatcttcatctatgatgccttcaagaagatgatcaagctggccgactactaccccatcaacagcaacttcaaggtgggctacaacaccctcttcagctgcacctgtgtgcccccagaccctgccaacatcagcatcagcaatgacaccaccctggcccctgagtacctgcccaccatgagcagcacagacatgtaccacaacaccacctttgactgggccttcctgagcaagaaggaatgttccaaatatggaggcaacctggtgggcaacaactgcaactttgtgcctgacatcaccctgatgtccttcatcctcttcctgggcacctacaccagctccatggccctgaagaagttcaagaccagcccctacttccccaccacagccaggaagctgatcagtgactttgccatcatcctgagcatcctgatcttctgtgtgattgatgccctggtgggcgtggacacccccaagctgattgtgcccagcgagttcaagcccaccagccccaacagaggctggtttgtgcccccatttggagagaacccctggtgggtgtgcctggccgccgccatcccagccctgctggtgaccatcctgatcttcatggaccagcagatcacagctgtgattgtgaacaggaaggagcacaagctgaagttcatccccatgcctgtgctgtatggagtcttcctgtacatgggcgtggccagcctgaatggagtgcagttcatggaccggctgaagctgctgctgatgcccctgaagcaccagcctgacttcatctacctgcggcacgtgcccctgcggcgggtgcacctgttcaccttcctgcaggtgctgtgcctggccctgctgtggatcctgaagagcacagtggccgccatcatcttccctgtgatgatcctggccctggtggccgtgaggaagggcatggactacctgttcagccagcacgacctgtccttcctggatgatgtgattcctgagaaggacaagaagaagaaggaggatgagaagaagaagaagaagaagaagggcagcctggacagcgacaatgatgacagcgactgcccctacagcgagaaggtgcccagcatcaagatccccatggacatcatggagcagcagcccttcctgagtgacagcaagcccagcgaccgggagaggagccccaccttcctggagcggcacaccagctgctag

SEQ ID NO: 49719 - DNA, 3285 bp, Artificial Sequence
  derived and/or modified sequence
atggaggatgaagctgtgctggacagaggagccagcttcctgaagcacgtgtgtgatgaggaggaggtggagggccaccacaccatctacatcggcgtgcacgtgcccaagagctacagaagaagaagaagacacaagaggaagacaggccacaaggagaagaaggagaaggagcgcatcagcgagaactacagcgacaagagtgacattgaaaatgctgatgagagcagcagcagcatcctgaagcccctcatcagccctgctgctgagcgcatccgcttcatcctgggggaggaggatgacagccctgccccaccccagctgttcacagagctggatgagctgctggccgtggatggccaggagatggagtggaaggagacagcccgctggatcaagtttgaggagaaggtggagcagggcggggagcgctggagcaagccccacgtggccaccctgagcctgcacagcctgtttgagctgcggacctgcatggagaagggcagcatcatgctggaccgggaggccagcagcctgccccagctggtggagatgattgtggaccaccagattgaaacaggcctgctgaagccagagctgaaggacaaggtgacctacaccctgctgaggaagcaccgccaccagaccaagaagagcaacctgcggagcctggccgacatcggcaagacagtgtcctctgccagcaggatgttcaccaacccagacaatggcagccctgccatgacccacaggaacctgaccagcagcagcctgaatgacatcagtgacaagccagagaaggaccagctgaagaacaagttcatgaagaagctgcccagagatgctgaggccagcaatgtgctggtgggggaggtggacttcctggacacccccttcatcgcctttgtgcggctgcagcaggccgtgatgctgggcgccctgacagaggtgcctgtgcccacccgcttcctgttcatcctgctgggccccaagggcaaggccaagagctaccacgagatcggccgggccatcgccaccctgatgtctgatgaggtgttccatgacatcgcctacaaggccaaggacagacatgacctgattgctggcattgatgagttcctggatgaagtcatcgtgctgcccccaggagagtgggaccctgccatcagaattgagccccccaagagcctgcccagcagtgacaagaggaagaacatgtacagcggaggagaaaatgtgcagatgaatggagacacccctcatgatggcggccatggaggcggcggccacggggactgtgaggagctgcagaggacaggccgcttctgtggcggcctcatcaaggacatcaagaggaaggcccccttctttgccagtgacttctatgatgccctgaacatccaggccctgagcgccatcctcttcatctacctggccaccgtgaccaatgccatcacctttggaggcctgctgggagatgccacagacaacatgcagggcgtgctggagagcttcctgggcacagctgtgtctggggccatcttctgcctgtttgctggccagcccctgaccatcctgagcagcactggacctgtgctggtgtttgagcggctgctcttcaacttcagcaaggacaacaactttgactacctggagttccggctgtggattggcctgtggagcgccttcctgtgcctgatcctggtggccacagatgccagcttcctggtgcagtacttcacccgcttcacagaggagggcttcagcagcctcatctccttcatcttcatctatgatgccttcaagaagatgatcaagctggccgactactaccccatcaacagcaacttcaaggtgggctacaacaccctcttcagctgcacctgtgtgcccccagaccctgccaacatcagcatcagcaatgacaccaccctggcccctgagtacctgcccaccatgagcagcacagacatgtaccacaacaccacctttgactgggccttcctgagcaagaaggaatgttccaaatatggaggcaacctggtgggcaacaactgcaactttgtgcctgacatcaccctgatgtccttcatcctcttcctgggcacctacaccagctccatggccctgaagaagttcaagaccagcccctacttccccaccacagccaggaagctgatcagtgactttgccatcatcctgagcatcctgatcttctgtgtgattgatgccctggtgggcgtggacacccccaagctgattgtgcccagcgagttcaagcccaccagccccaacagaggctggtttgtgcccccatttggagagaacccctggtgggtgtgcctggccgccgccatcccagccctgctggtgaccatcctgatcttcatggaccagcagatcacagctgtgattgtgaacaggaaggagcacaagctgaagaagggagctggctaccacctggacctcttctgggtggccatcctgatggtgatctgcagcctgatggccctgccctggtacgtggccgccaccgtcatcagcatcgcccacatcgacagcctgaagatggagacagagaccagcgcccctggagagcagcccaagttcctgggcgtgcgggagcagagggtgacaggcaccctggtgttcatcctgaccggcctgagcgtcttcatggcccccatcctgaagttcatccccatgcctgtgctgtatggagtcttcctgtacatgggcgtggccagcctgaatggagtgcagttcatggaccggctgaagctgctgctgatgcccctgaagcaccagcctgacttcatctacctgcggcacgtgcccctgcggcgggtgcacctgttcaccttcctgcaggtgctgtgcctggccctgctgtggatcctgaagagcacagtggccgccatcatcttccctgtgatgatcctggccctggtggccgtgaggaagggcatggactacctgttcagccagcacgacctgtccttcctggatgatgtgattcctgagaaggacaagaagaagaaggaggatgagaagaagaagaagaagaagaagggcagcctggacagcgacaatgatgatgagaaggaccaccagcacagcctgaatgccacccaccacgccgacaagatccccttcctgcagagcctgggcatgcccagcccccccaggacccctgtgaaggtggtgccccagatccgcatcgagctggagccagaagataatgactacttctggaggagcaagggcacagagaccaccctgtag

SEQ ID NO: 49720 - DNA, 2988 bp, Artificial Sequence
  derived and/or modified sequence
atggaggacgaggccgtgctggaccggggcgccagcttcctgaagcacgtctgcgacgaagaggaggtcgagggacaccacacaatttacatcggggtccatgtgcccaaaagctaccgccgtagacgaaggcataaacgaaagacaggacacaaggagaaaaaagagaaggagcgtatctcagaaaattactctgataaatcagatattgagaacgcggacgaaagtagttcctccatcctgaaaccactgatctccccagccgcagaaagaataaggttcattttaggagaagaagacgactctccagctccacctcagctattcactgagctcgacgagctgctggccgtcgacgggcaggaaatggagtggaaagagacagcgaggtggataaagtttgaagaaaaggtggaacagggaggcgaacgatggagtaaaccacacgtggccaccctcagtcttcattccctcttcgaattgcgcacgtgcatggagaagggctctatcatgctggaccgagaagcttcctccctgccgcaactggtggaaatgatagttgaccaccagattgagacggggttgctgaaaccggagcttaaggataaggtaacatacactcttctgcggaagcacagacatcagaccaagaagtctaacctacgtagtctcgccgacatcggaaagacagtgagcagcgcaagccgtatgtttacaaatccggacaacgggtcacctgcaatgactcataggaatctaacgagcagtagtcttaatgacatctcagataagcctgagaaagaccagttaaaaaataaattcatgaagaagttgccaagagatgctgaagcctcgaacgttctggttggcgaggtcgattttctggacacaccctttatcgcctttgtgcgcctgcagcaggccgtcatgctgggagccctgacggaggtgccagtcccaactagattcttatttattctgttgggaccaaaggggaaggcaaagtcctatcacgaaatagggagggccatcgcaaccctgatgagtgacgaggtattccacgatatcgcctataaagcgaaagaccggcacgaccttattgccggaatcgacgagttcttagacgaggtgattgtgctgcctccaggggagtgggatcccgcaattcggattgaaccacctaaatctctgccctcaagcgataaacggaagaacatgtactcaggaggcgagaacgtacagatgaatggtgacactcctcacgacggaggacacggaggcggaggccatggtgattgtgaggagctccagcggactgggaggttctgtggcgggctgattaaggacatcaagaggaaggcaccattctttgcctcggatttttatgacgcgctgaacatccaggccttatcagctatcctgtttatatacttggcaaccgtaacaaacgccattacgtttggggggctgctgggggatgcaacagacaacatgcagggagtactggagtctttcctgggcacagcagtgtctggagctatcttttgcctgttcgccggacagcctttgacgattctttcctcaaccggtcccgttctagtgttcgagcggctcctttttaacttcagcaaggacaataactttgactatctggagttcagactgtggattggactgtggtccgcattcctgtgcctgattctcgtagccaccgatgctagtttccttgtgcaatactttacaagattcacagaagagggcttctcttctttaatctctttcatatttatctatgacgccttcaaaaaaatgatcaagctggccgactactacccaatcaattctaacttcaaagtgggttataacacattattcagctgcacatgcgtgcccccagacccagccaatatttctatttccaatgacacaacgctggccccagagtatctgccgacgatgtcatctaccgacatgtatcataacacgacttttgattgggccttcctgagcaagaaggaatgttccaagtacggcggaaacctcgtgggcaacaattgcaattttgtgcctgatattactctcatgtctttcatcctgtttctcggcacgtacacatcttcgatggcgttgaagaaatttaaaacctccccctacttcccgacaaccgcccggaagcttatttcagactttgccatcattctaagcattctgatcttctgtgtgattgacgcccttgttggcgtggacacccctaaactgattgtgccaagtgagtttaaacctacttctcctaacagaggatggttcgtgcctccctttggagagaatccttggtgggtgtgcctcgccgctgccattcccgcattactggtgaccattctgatcttcatggaccagcagattacagcggtaattgtgaatagaaaggaacacaagctcaagttcatcccgatgcccgtgctctacggcgtgtttttgtatatgggcgttgctagcttaaatggcgtacagtttatggacagactgaaactcctgttgatgccactgaaacaccaacctgatttcatctatttgcgacatgtcccactgcgaagagttcatctgtttacttttttacaggtcctctgcttggctctgttatggattctcaagagtacagtcgcggcaatcatcttcccggtgatgattttagctttggtcgcagtcaggaaagggatggactatctcttttcacagcatgacctgtcattcctcgacgatgtcattcctgagaaagataagaaaaagaaagaagatgagaagaaaaaaaagaagaagaagggttctcttgacagtgacaacgatgacagcgactgtccatactctgaaaaggtgccctccatcaagatcccaatggacataatggaacagcagccctttctaagcgacagtaaaccttccgatagggagaggagtccaacttttctggaaagacacactagttgctag

SEQ ID NO: 49721 - DNA, 3285 bp, Artificial Sequence
  derived and/or modified sequence
atggaggacgaggccgtgctggaccggggcgccagcttcctgaagcacgtatgcgatgaggaagaggtggaaggccaccacacgatatacataggcgtccacgtacctaaatcctaccggaggcgccgtaggcataaaaggaaaaccggacacaaggagaagaaagagaaagagagaatctctgaaaactattcggacaagtccgacattgagaacgcagatgagagctcgtcttccatcctgaaaccactgatcagtcccgccgcagaacgcatcaggtttatactgggggaggaagacgactctccagctccacctcagctgtttactgagctagatgaactcctagcagttgatggccaggaaatggagtggaaagagaccgccaggtggatcaaattcgaagagaaagtggaacagggcggagaacggtggagtaagccccacgtggcaaccctcagcttgcattccctttttgaacttaggacgtgcatggagaaaggctcaattatgcttgatcgagaagcctcttcccttcctcagctcgttgagatgatcgtagatcaccagatagaaacggggctcctgaagccagagttgaaagacaaggtcacctacaccctgttgaggaagcaccggcaccagacgaaaaagtctaatctccggtcactggccgacattggcaagaccgtgtcttcagctagccgtatgtttacaaaccccgataatggcagcccggcgatgacacacaggaaccttacatcatcttcactgaatgatatcagtgacaagcccgagaaggatcagttgaaaaataaatttatgaaaaagcttcccagagacgctgaggcttccaatgtgctggtgggtgaggttgatttcctggacacaccattcatcgcctttgtgaggctacagcaggccgtgatgcttggcgcattaaccgaagtgcccgttccgacccggttcctgtttatactcctaggaccaaagggaaaagctaagtcataccatgagatcggcagagccatcgccaccttgatgtccgatgaggtcttccacgatatagcctacaaagccaaagatcgtcatgatctgattgctggaatcgacgaatttttggacgaggtgatcgtgctgccgccgggagaatgggatccagcaattcgcatagaaccccctaagagcctcccatcttccgataagagaaagaatatgtactcaggtggcgagaatgtacagatgaacggcgacactccacatgatggaggtcatggcggcgggggtcacggtgattgtgaagagctgcagaggaccgggaggttctgcggcggacttattaaagacatcaaaagaaaggcccctttctttgcgtctgatttctatgacgctttgaatatccaggcccttagcgccattctgttcatttacttagcaactgtcactaacgccattactttcggaggcctgctaggagatgcgacggataatatgcagggagtattagagtccttcctcgggactgccgtctccggtgcgatcttttgtctcttcgctggacaaccattaaccattctcagcagcaccgggcctgttctggtgtttgagaggctgctctttaactttagcaaggacaacaatttcgactatttagaatttaggttgtggatcggtctctggtccgcttttctgtgcctcatcttagtggctacggacgccagcttcctggtccaatatttcactagatttactgaagagggtttcagtagtttgatctcttttatctttatctacgacgccttcaagaagatgatcaaattggccgactactatccaattaacagcaattttaaggtcggctacaacacacttttctcatgcacctgtgttccacctgacccagcgaatatttccatttccaacgacacgactttggccccagaatatctgcctaccatgtcatctactgatatgtatcataacaccacgtttgactgggcatttttgtctaagaaggaatgctccaagtatggtggaaatctcgtcggtaacaactgcaatttcgtccccgacattaccctgatgtccttcattttgttcctgggaacctacacatcttctatggcacttaagaagttcaaaaccagcccctatttccctaccaccgcccgtaagttgatttccgacttcgcaattatcctgtccatcctcattttttgtgtgattgacgccctcgttggcgtcgacacacccaaattaatcgtcccatcagagttcaagcccacaagtcccaatcgggggtggtttgtccctcctttcggtgagaatccatggtgggtttgcttggccgctgccatcccagctctactagtgacgatcttgattttcatggaccagcaaatcactgccgtgatcgtaaatagaaaggagcataagctgaaaaaaggcgctggataccatctcgatctcttttgggttgcaatcctgatggtgatctgtagcttgatggcactgccatggtacgtcgccgccactgtgatttcaatcgcccacatcgactctctgaaaatggagaccgaaacttctgcacccggagagcagccaaagtttctgggtgtgcgggagcagcgagtgactggcacactcgtattcatcctgactgggttatccgtttttatggctccgattttaaaattcattccgatgcctgttctctacggggtgtttctatatatgggggtggccagcctgaacggcgtccaatttatggatcggctgaaactccttctgatgcccctaaagcatcagcctgactttatctatttacgtcatgtgcccctgcgccgtgtgcatctctttacgtttttacaggtcttgtgcttagcccttttgtggattctgaagagcaccgtagctgccattatttttcccgtgatgatcttagccctggtcgctgttagaaagggaatggattatctctttagccaacacgacctcagctttctcgacgacgtaataccggaaaaggacaagaaaaagaaggaagatgagaaaaaaaaaaagaagaagaagggctcactggattccgataatgatgatgagaaagaccaccaacatagcctgaacgcaacacaccacgcagacaagatcccttttcttcagtcactcggcatgccgagcccgccaagaacacccgtaaaagtggttcctcagattagaatagaactggaaccggaagataatgattacttttggaggtccaaaggcaccgaaactaccctctag

SEQ ID NO: 49722 - DNA, 2988 bp, Artificial Sequence
  derived and/or modified sequence
atggaagacgaagcagtgctggatagaggcgctagcttccttaagcatgtctgcgacgaggaggaggtggaaggacatcatactatttacatcggtgttcacgtgccaaagagctatagaagacgcaggcgacacaaaagaaagacagggcataaagaaaagaaggaaaaagagcgaattagcgagaattactcagataagagcgacatcgaaaacgccgatgagtcttcatcaagcatcctgaaacctctgatcagtcccgcagcagagaggattaggtttattctaggggaggaggacgactccccagcaccccctcagcttttcacagagctggatgagctcctggccgtcgatggacaagaaatggagtggaaagagacagcccgatggattaagtttgaggaaaaagtggagcagggcggtgagagatggtcgaaacctcatgtggctacactgtccctccactcgctgtttgaattgagaacatgtatggagaaaggatcgatcatgctggatagggaagcctcctccctgcctcaactggtggaaatgattgtggaccatcagatagagaccggcctcctcaaaccagaactgaaagacaaagttacctacaccctgctgaggaagcacaggcaccagacaaaaaagagtaatttacgatctctcgccgatattggcaagacagtcagtagcgcatcccgtatgttcacgaacccagataatggttctcctgcgatgacacataggaatctgacctcatcttctttgaacgatataagcgataaacctgagaaggatcagttgaagaacaaattcatgaaaaaactccctagggacgctgaagcctcgaatgtgcttgttggcgaggtcgacttcctggacactccctttatagcttttgtgcgtttacagcaggctgtgatgctgggagctctgactgaagtgcctgttccaacaaggttcctgtttatattactcggcccaaagggaaaggccaagtcatatcacgaaataggtcgcgcaatcgcaaccctgatgagtgacgaagttttccacgatatcgcatataaggcgaaggatcgacacgacctcatagcaggcatagacgagtttctagatgaggttattgttctcccccctggcgaatgggaccccgctattagaattgaacccccaaaaagtctccccagctccgacaaaagaaaaaacatgtactcaggaggtgagaacgtgcaaatgaatggagataccccccatgacgggggtcatggaggtggcggacatggtgattgtgaagagcttcagagaacaggtcggttctgcggcggactcattaaggacatcaagcgaaaggccccattttttgcaagcgacttctacgacgctctcaatatccaggcgctcagtgcaatcctgtttatctacctggccaccgtaaccaacgccataaccttcggtggactcctaggcgacgctaccgacaacatgcaaggggttttggaaagctttttggggacagccgtgtccggggctatcttttgcctgtttgcaggacagcccctgacaattcttagttctaccggaccagtgctggtctttgagcggctactctttaactttagtaaggacaataactttgactacttggaattccggctttggattggactttggtctgccttcctatgtctcattctcgtcgcaaccgatgcctcttttttggtgcaatactttacccgttttacagaggagggatttagctcccttatctccttcatattcatctacgacgcattcaaaaaaatgatcaaactggcggattactatccgatcaactctaatttcaaggttggctataatacactgttttcctgtacttgcgttccgcctgatcccgctaacatctctatttccaacgacacgactttagcacctgagtacctgccaactatgtcatcgaccgatatgtaccataatacgacctttgactgggctttcctttctaagaaagagtgcagcaagtacggaggaaacctggtcggcaacaattgcaatttcgtcccagatatcacactgatgagcttcatcttgttccttgggacctacacatctagcatggcactgaaaaaattcaagacatctccatattttcctaccaccgccagaaagctcatcagcgactttgcgatcatcttgtctattctgatcttctgtgttattgacgcactggtcggggtggatacacctaaacttatcgtgccgagcgagtttaagccaacctctcccaatagaggctggtttgtccctccctttggcgagaatccatggtgggtctgcctggcagccgctattcctgctctgctggtgacgatactgatcttcatggatcagcaaatcaccgcagtgattgttaatcgcaaggagcacaagttgaagttcatcccaatgcccgtactgtatggagtgttcctgtatatgggagtggctagtttaaacggcgtgcagttcatggataggttaaagcttctgcttatgccccttaaacaccagcccgacttcatctatctgaggcatgtgcccctgaggcgtgtgcacttgtttacatttcttcaagtgctgtgcctggcactcctgtggatcctgaagtcaaccgtagccgcaatcatttttcccgtaatgatcctggccctagttgccgtccgtaagggtatggattacctgttctctcagcacgacttatccttcctggacgatgtcataccggaaaaggataagaagaagaaagaggatgaaaaaaaaaaaaagaaaaagaagggctccctcgactccgataacgacgactctgactgcccgtacagcgagaaagtgccttccattaagattcctatggatattatggaacaacagccctttcttagcgatagtaaaccaagcgatcgagagcgaagcccaactttcttagagcgtcatacgagctgctag

SEQ ID NO: 49723 - DNA, 3285 bp, Artificial Sequence
  derived and/or modified sequence
atggaggacgaagcagtgctcgatcgcggagcaagctttctcaagcatgtctgcgatgaggaagaggtcgagggtcaccatacaatctacattggggtgcacgtgcctaaaagctacaggcggagacgtagacataagcgcaaaacaggccacaaggagaaaaaggagaaggagagaataagcgagaattacagcgataaatccgatatcgagaatgctgacgaatcctcatcctctatcttgaagcctttgatcagcccagcagctgagcggatccgtttcatcctgggggaagaagacgattcaccagcaccccctcagcttttcaccgagctggacgagctccttgccgttgatggacaggagatggaatggaaggagacagccagatggatcaaattcgaggagaaagtcgaacaggggggtgagcgctggagtaaacctcacgtagccacccttagcctgcacagcttatttgagttgcggacctgtatggagaagggttcaatcatgctggaccgcgaggcatcctcactgccccagcttgtggagatgattgtcgatcatcagattgaaaccggattgcttaaacccgaactcaaagacaaggtgacatatacattgcttagaaagcatcggcaccagactaaaaagagtaacttgcgcagcctggcagatatcgggaagaccgttagttctgctagtcggatgtttactaatcctgacaatgggagccctgcgatgacccacaggaatctgacctcttcatcactgaacgacatcagtgataagccggaaaaagatcagcttaagaataagttcatgaagaaactgccgagagacgccgaggcgtccaatgtgctggttggcgaagtggattttctggataccccctttatcgcctttgtgaggctgcagcaagcagtgatgttgggggctttaaccgaggttcctgtgcctacccgcttcctttttattctacttggcccaaaaggcaaagccaagtcttatcacgaaatcgggcgtgcaatagcaactctgatgtccgatgaagtgttccatgacatcgcatataaggcgaaggaccgacacgatctgatcgctggcattgatgagtttctcgatgaagtgatcgtgcttcccccaggagagtgggacccggctatccgcattgagccacccaaaagcctacccagttcggataagaggaaaaatatgtattccggaggagagaatgtgcagatgaatggtgacaccccccatgatggcggacacggcggaggcggacatggtgattgcgaagaactgcaaaggactgggagattttgtggaggcctgattaaggacattaaaaggaaagcgcctttttttgcatccgatttttacgacgcactgaacatacaggcgctgagcgcaattctgtttatctacctagcgacagttactaatgcaattaccttcgggggtttgttgggggacgcgacagacaatatgcagggagttctagagagttttctgggcactgccgtgagcggtgctatcttctgtctctttgccggacagccactcacaattctcagctccacgggcccagtcctcgtgttcgagagactgctgttcaatttctccaaggataataacttcgactacttggagttccggctgtggataggattatggagtgcattcttgtgcttgattctcgtcgccactgacgcaagttttctggtgcagtacttcacccgcttcacagaagaaggcttttcttctctgatctcattcattttcatctatgatgcctttaaaaagatgattaagctcgcggactactaccccatcaacagtaacttcaaagtcggttacaataccctgttctcctgcacgtgcgtgcccccagacccagctaacatcagcatatctaatgataccacacttgcccctgaatatctgccgaccatgtcttcaactgatatgtatcacaatacaaccttcgactgggctttcctgtctaaaaaggagtgctcaaagtacgggggaaatctcgttggaaataattgtaatttcgtgcccgatatcaccctgatgtccttcatcctgtttctgggcacctatacttcgtcaatggctcttaagaaatttaaaacttctccctatttcccaacaacagcccgtaaactcatatctgattttgctatcattcttagtatcctgatcttttgtgttattgatgcactggtgggcgttgacacccccaagcttattgtcccttccgagttcaagccaacaagcccaaaccggggatggttcgttcccccattcggggagaacccatggtgggtttgtttggcagcagccattccagcgttgcttgttaccatattaatctttatggaccagcagataactgctgtgatcgtgaaccgcaaggagcacaagctgaagaagggcgcagggtaccaccttgacctgttctgggttgcgattctgatggtaatctgctcgctgatggccctgccttggtacgtagccgcaactgtcatctcaatcgcccatatcgactccctcaaaatggagactgagacatctgccccaggggagcaacccaagttcctcggggttagggagcagcgtgtgacaggtacactggtcttcatactcaccgggctgagcgtcttcatggcaccaattctcaagtttatcccgatgccagttttgtatggcgtgtttctgtacatgggggtagcatctctcaacggcgtgcagttcatggaccgcttgaagctgctgcttatgccattaaagcaccaacctgacttcatctatctgaggcacgttcccctgagacgcgtgcacctgtttaccttcctgcaggtgctgtgtctagcactcttgtggatcctgaagtctactgtggccgcaattatcttccctgttatgatcctggctctggtagctgtgagaaaggggatggattatctgttcagccagcatgatctgtctttcttggacgatgtgattcctgagaaagacaaaaagaagaaagaggatgaaaaaaaaaagaagaagaaaaaaggatccttggattccgataacgacgacgaaaaggaccatcagcatagtctgaatgccactcaccacgcagacaaaattccatttttgcagagtctaggaatgccatccccacccaggaccccagtcaaggtggtgccacagatccggattgagctcgaacctgaagacaatgactacttttggcgctcgaaggggaccgagaccacactgtag

SEQ ID NO: 49724 - DNA, 3771 bp, Artificial Sequence
  derived and/or modified sequence
ggcagtggcagtggccgctgcagccccacactccgccgccaaactggaggagcgacggaagccagaccccaggaggatggaggatgaagctgtcctggacagaggggcttccttcctcaagcatgtgtgtgatgaagaagaagtagaaggccaccataccatttacatcggagtccatgtgccgaagagttacaggagaaggagacgtcacaagagaaagacagggcacaaagaaaagaaggaaaaggagagaatctctgagaactactctgacaaatcagatattgaaaatgctgatgaatccagcagcagcatcctaaaacctctcatctctcctgctgcagaacgcatccgattcatcttgggagaggaggatgacagcccagctccccctcagctcttcacggaactggatgagctgctggccgtggatgggcaggagatggagtggaaggaaacagccaggtggatcaagtttgaagaaaaagtggaacagggtggggaaagatggagcaagccccatgtggccacattgtcccttcatagtttatttgagctgaggacatgtatggagaaaggatccatcatgcttgatcgggaggcttcttctctcccacagttggtggagatgattgttgaccatcagattgagacaggcctattgaaacctgaacttaaggataaggtgacctatactttgctccggaagcaccggcatcaaaccaagaaatccaaccttcggtccctggctgacattgggaagacagtctccagtgcaagtaggatgtttaccaaccctgataatggtagcccagccatgacccataggaatctgacttcctccagtctgaatgacatttctgataaaccggagaaggaccagctgaagaataagttcatgaaaaaattgccacgtgatgcagaagcttccaacgtgcttgttggggaggttgactttttggatactcctttcattgcctttgttaggctacagcaggctgtcatgctgggtgccctgactgaagttcctgtgcccacaaggttcttgttcattctcttaggtcctaaggggaaagccaagtcctaccacgagattggcagagccattgccaccctgatgtctgatgaggtgttccatgacattgcttataaagcaaaagacaggcacgacctgattgctggtattgatgagttcctagatgaagtcatcgtccttccacctggggaatgggatccagcaattaggatagagcctcctaagagtcttccatcctctgacaaaagaaagaatatgtactcaggtggagagaatgttcagatgaatggggatacgccccatgatggaggtcacggaggaggaggacatggggattgtgaagaattgcagcgaactggacggttctgtggtggactaattaaagacataaagaggaaagcgccattttttgccagtgatttttatgatgctttaaatattcaagctctttcggcaattctcttcatttatctggcaactgtaactaatgctatcacttttggaggactgcttggggatgccactgacaacatgcagggcgtgttggagagtttcctgggcactgctgtctctggagccatcttttgcctttttgctggtcaaccactcactattctgagcagcaccggacctgtcctagtttttgagaggcttctatttaatttcagcaaggacaataattttgactatttggagtttcgcctttggattggcctgtggtccgccttcctatgtctcattttggtagccactgatgccagcttcttggttcaatacttcacacgtttcacggaggagggcttttcctctctgattagcttcatctttatctatgatgctttcaagaagatgatcaagcttgcagattactaccccatcaactccaacttcaaagtgggctacaacactctcttttcctgtacctgtgtgccacctgacccagctaatatctcaatatctaatgacaccacactggccccagagtatttgccaactatgtcttctactgacatgtaccataatactacctttgactgggcatttttgtcgaagaaggagtgttcaaaatacggaggaaacctcgtcgggaacaactgtaattttgttcctgatatcacactcatgtcttttatcctcttcttgggaacctacacctcttccatggctctgaaaaaattcaaaactagtccttattttccaaccacagcaagaaaactgatcagtgattttgccattatcttgtccattctcatcttttgtgtaatagatgccctagtaggcgtggacaccccaaaactaattgtgccaagtgagttcaagccaacaagtccaaaccgaggttggttcgttccaccgtttggagaaaacccctggtgggtgtgccttgctgctgctatcccggctttgttggtcactatactgattttcatggaccaacaaattacagctgtgattgtaaacaggaaagaacataaactcaagtttatacccatgcctgtactctatggtgtgttcctgtatatgggagtagcatcccttaatggtgtgcagttcatggatcgtctgaagctgcttctgatgcctctgaagcatcagcctgacttcatctacctgcgtcatgttcctctgcgcagagtccacctgttcactttcctgcaggtgttgtgtctggccctgctttggatcctcaagtcaacggtggctgctatcatttttccagtaatgatcttggcacttgtagctgtcagaaaaggcatggactacctcttctcccagcacgacctcagcttcctggatgatgtcattccagaaaaggacaagaaaaagaaggaggatgagaagaaaaagaaaaagaagaagggaagtctggacagtgacaatgatgattctgactgcccatactcagaaaaagttccaagtattaaaattccaatggacatcatggaacagcaacctttcctaagcgatagcaaaccttctgacagagaaagatcaccaacattccttgaacgccacacatcatgctgataaaattcctttccttcagtcactcggtatgccaagtcctcctagaactccagtaaaagttgtgcctcaaattagaatagaacttgaacctgaagacaatgattatttctggaggagcaagggaacagaaactacattgtaacctgtttgtctttcttaaaactgacatttgttgttaatgtcatttgtttttgtttggctgtttgtttattttttaacttttatttcgtctcagtttttggtcacaggccaaataatacagcgctctctctgcttctctcttgcatagacacaatcaagacaatagtgcaccgttccttaaaaacagcatctgaggaatcccccttttgttcttaaactttcagatgtgtcctttgataaccaaattctgtcactcaagacacagacacgcacagaccctgtcctttgcctctattaagcagaggatggaagtattaaggattttgtaacaccttttatgaaaatgttgaaggaacttaaaactttagctttggagctgtgcttactggcttgtctttgtctggtagaacaaaccttgacctccagacagagtcccttctcacttatagagctctccaggactggaaaaagtgctgctattttaacttgctcttgcttgtaaatcctaatcttagagttatcaaaagaagaaaaaactgaaggtactttactccctatagagaaac

SEQ ID NO: 49725 - DNA, 7596 bp, Artificial Sequence
  derived and/or modified sequence
gcggcggcggccgcggtggcagcgaaggcggcggcggcggcggcagtggcagtggccgctgcagccccacactccgccgccaaactggaggagcgacggaagccagaccccaggaggatggaggatgaagctgtcctggacagaggggcttccttcctcaagcatgtgtgtgatgaagaagaagtagaaggccaccataccatttacatcggagtccatgtgccgaagagttacaggagaaggagacgtcacaagagaaagacagggcacaaagaaaagaaggaaaaggagagaatctctgagaactactctgacaaatcagatattgaaaatgctgatgaatccagcagcagcatcctaaaacctctcatctctcctgctgcagaacgcatccgattcatcttgggagaggaggatgacagcccagctccccctcagctcttcacggaactggatgagctgctggccgtggatgggcaggagatggagtggaaggaaacagccaggtggatcaagtttgaagaaaaagtggaacagggtggggaaagatggagcaagccccatgtggccacattgtcccttcatagtttatttgagctgaggacatgtatggagaaaggatccatcatgcttgatcgggaggcttcttctctcccacagttggtggagatgattgttgaccatcagattgagacaggcctattgaaacctgaacttaaggataaggtgacctatactttgctccggaagcaccggcatcaaaccaagaaatccaaccttcggtccctggctgacattgggaagacagtctccagtgcaagtaggatgtttaccaaccctgataatggtagcccagccatgacccataggaatctgacttcctccagtctgaatgacatttctgataaaccggagaaggaccagctgaagaataagttcatgaaaaaattgccacgtgatgcagaagcttccaacgtgcttgttggggaggttgactttttggatactcctttcattgcctttgttaggctacagcaggctgtcatgctgggtgccctgactgaagttcctgtgcccacaaggttcttgttcattctcttaggtcctaaggggaaagccaagtcctaccacgagattggcagagccattgccaccctgatgtctgatgaggtgttccatgacattgcttataaagcaaaagacaggcacgacctgattgctggtattgatgagttcctagatgaagtcatcgtccttccacctggggaatgggatccagcaattaggatagagcctcctaagagtcttccatcctctgacaaaagaaagaatatgtactcaggtggagagaatgttcagatgaatggggatacgccccatgatggaggtcacggaggaggaggacatggggattgtgaagaattgcagcgaactggacggttctgtggtggactaattaaagacataaagaggaaagcgccattttttgccagtgatttttatgatgctttaaatattcaagctctttcggcaattctcttcatttatctggcaactgtaactaatgctatcacttttggaggactgcttggggatgccactgacaacatgcagggcgtgttggagagtttcctgggcactgctgtctctggagccatcttttgcctttttgctggtcaaccactcactattctgagcagcaccggacctgtcctagtttttgagaggcttctatttaatttcagcaaggacaataattttgactatttggagtttcgcctttggattggcctgtggtccgccttcctatgtctcattttggtagccactgatgccagcttcttggttcaatacttcacacgtttcacggaggagggcttttcctctctgattagcttcatctttatctatgatgctttcaagaagatgatcaagcttgcagattactaccccatcaactccaacttcaaagtgggctacaacactctcttttcctgtacctgtgtgccacctgacccagctaatatctcaatatctaatgacaccacactggccccagagtatttgccaactatgtcttctactgacatgtaccataatactacctttgactgggcatttttgtcgaagaaggagtgttcaaaatacggaggaaacctcgtcgggaacaactgtaattttgttcctgatatcacactcatgtcttttatcctcttcttgggaacctacacctcttccatggctctgaaaaaattcaaaactagtccttattttccaaccacagcaagaaaactgatcagtgattttgccattatcttgtccattctcatcttttgtgtaatagatgccctagtaggcgtggacaccccaaaactaattgtgccaagtgagttcaagccaacaagtccaaaccgaggttggttcgttccaccgtttggagaaaacccctggtgggtgtgccttgctgctgctatcccggctttgttggtcactatactgattttcatggaccaacaaattacagctgtgattgtaaacaggaaagaacataaactcaagaaaggagcagggtatcacttggatctcttttgggtggccatcctcatggttatatgctccctcatggctcttccgtggtatgtagctgctacggtcatctccattgctcacatcgacagtttgaagatggagacagagacttctgcacctggagaacaaccaaagtttctaggagtgagggaacaaagagtcactggaacccttgtgtttattctgactggtctgtcagtctttatggctcccatcttgaagtttatacccatgcctgtactctatggtgtgttcctgtatatgggagtagcatcccttaatggtgtgcagttcatggatcgtctgaagctgcttctgatgcctctgaagcatcagcctgacttcatctacctgcgtcatgttcctctgcgcagagtccacctgttcactttcctgcaggtgttgtgtctggccctgctttggatcctcaagtcaacggtggctgctatcatttttccagtaatgatcttggcacttgtagctgtcagaaaaggcatggactacctcttctcccagcacgacctcagcttcctggatgatgtcattccagaaaaggacaagaaaaagaaggaggatgagaagaaaaagaaaaagaagaagggaagtctggacagtgacaatgatgatgagaaagatcaccaacattccttgaacgccacacatcatgctgataaaattcctttccttcagtcactcggtatgccaagtcctcctagaactccagtaaaagttgtgcctcaaattagaatagaacttgaacctgaagacaatgattatttctggaggagcaagggaacagaaactacattgtaacctgtttgtctttcttaaaactgacatttgttgttaatgtcatttgtttttgtttggctgtttgtttattttttaacttttatttcgtctcagtttttggtcacaggccaaataatacagcgctctctctgcttctctcttgcatagacacaatcaagacaatagtgcaccgttccttaaaaacagcatctgaggaatcccccttttgttcttaaactttcagatgtgtcctttgataaccaaattctgtcactcaagacacagacacgcacagaccctgtcctttgcctctattaagcagaggatggaagtattaaggattttgtaacaccttttatgaaaatgttgaaggaacttaaaactttagctttggagctgtgcttactggcttgtctttgtctggtagaacaaaccttgacctccagacagagtcccttctcacttatagagctctccaggactggaaaaagtgctgctattttaacttgctcttgcttgtaaatcctaatcttagagttatcaaaagaagaaaaaactgaaggtactttactccctatagagaaaccattgccatcattgtagcaagtgctggaatgtcccttttttcctatgcaactttttttaaccctttaatgaacttatctgttgagtacattgaagaatatttttcttcctagattttgttgtttaaattatggggcctaacctgccacttattttttgtcaatttttaaaacttttttttaattactgtaaagaaaatgaattttttcctgcagcaggaaacatagttttgagtagttctacctcttatttgtagctgccaggctttctgtaaaaattgtattgtatataatgtgatttttacacatacatacacacacaaatacacaatctctagggtaagccagaaggcaagatcagattaaaaacaccatgtttctaagcatccatttttccctttctttaaaagaaacttaactgttctatgaaggagattgagggagaagagacaaactcctatgtcatgagaataaccgatgttctgataatagtagcatctaggtacagatgctggttgtattaccacgtcaatgtcctatgcagtattgttagacattttctcattttgaaatatttgtgtgtttgtgtatgtgctctgtgccatggctggtgtatatatgtgcaatgttagaaggcaaaagagtgatggtaggcagagggcaaagtcattgaatctcttatgccagttttcataaaacccaaaccacatatgaaaaaatccattaagggtccaagaagtctgtccatatgaaaatgagggtaaatatagtttatttcccaggtatcagtcattataattgatataatagctctaacatgcaatataaaattcataggagtattaatagcccatttacacatctataaaatgtaatgggattgcagagctgcagagtacagtgtaacagtactctcatgcaatttttttcaggatgcaaaggcaattattctttgtaagcgggacatttagaatatatttgtgtacatattatatgtatgtatatttcaaagtaccacactgaaaattagacatttattaaccaaatttaacgtggtatttaaaggtaatatttttaatatgatacattacatattgtgaatgtatactaaaaaaacattttaaatgttaaaattataatttcagattcatataaccacaactgtgatatatcctaactataaccagttgttgaggggtatactagaagcagaatgaaaccacattttttggtttgataatatgcacttattgactcccactcattgttatgttaattaagttattattctgtctccttgtaattttgattacaaaaattttattatcctgagttagctgttacttttacagtacctgatactcctaaaacttttaacttatacaaattagtcaataatgaccccaattttttcattaaaataatagtggtgaattatatgttattgtgttaaaacctcacttgccaaattctggcttcacatttgtatttagggctatccttaaaatgatgagtctatattatctagctttctattaccctaatataaactggtataagaagactttccttttttctttatgcatggaagcatcaataaattgtttaaaaaccatgtatagtaaattcagcttaacccgtgatcttcttaagttaaaggtacttttgttttataaaagctctagataaaactttcttttctgatcatgaatcaagtatctgtggtttcatgcccctctctatacctttcaaagaactcctgaagcaacttaactcatcatttcagcctctgagtagaggtaaaacctatgtgtacttctgtttatgatccatattgatatttatgacatgaacacagaatagtaccttacatttgctaaacagacagttaatatcaaatcctttcaatattctgggaacccagggaagtttttaaaaatgtcattactttcaaaggaacagaagtagttaaccaaactaacaagcaaaacctgaggtttacctagtgacaccaaattatcggtattttaactgaatttacccattgactaagaatgaaccagatttggtggtggttttgtttctatgcaaactggacacaaattacaacagtaaatttttttataagtgcttctcccttctccatgatgtgacttccggagataaaggattcaaaagataaagacaaagtacgctcagagttgttaaccagaaagtcctggctgtggttgcagaaacactgttggaagaaaagagatgactaagtcaagtgtctgccttatcaaaagagcaaaaatgcctctggttttgtgtttgggagaaaagtatcttggacgcactgttttccttgataaaagtcatcttctctactgtgtgaaatgaatacttggaattctaattgttttgtgtgccaggggcagtaatgtccctgcctcttctcccaatcaaggttgaggagtggggctggggagaggacttaactgacttaagaagtaggaaaacaaaaacctctctcctcagccttccacctccaagagaggaggaaaaacagttgtctgctgtctgtaattcagtttgcgtgtattttatgctcatgcaccaacccatacagagtaaatcttttatcaactgtatactggtgtttaatagagaatgattgtcttccgagttttttggttccttttttaactgtgttaaagtacttgaaatgtattgactgctgactatattttaaaaacaaaatgaaataatttgagttgtattacagaggttgacattgttcagggatgggacaaagccttcttcaatccttttcatactacttaatgattttggtgcaggaacctgagattttctgatttatatttcatgatatttcacatttgctcttcacagcatgagcatgaagcccagtggcaccaaatggctgggtacaatcaagtgatattttgtagcacctcactatctgaaaggccatgagttttcagatgatttcattgagcttcattgcagcctgaaattttaaaaaagttgtgtaatacgccaaccagtcaagttgtgttttggccagagatttagatatgtccaatttcctggctcatttcattgtgctctatgggtacgtataaaaagcaagaattctgtttcctaggcaaacattgcaactcagggctaaagtcatccagtgaaacttttagagccagaagtaactttgtcccagtcctacaatgtgaaaagagtgaatagttgcctctttttagccattttcatggctggtacatattcgtacgcattacttttcagaatcaatacgcactttcagatattcttatttttattctcttaagtctttattaactttggagagagaaatgatgcatctttttattttaaatgaagtagatcaacatggtggaacaaaatgataaagaacagaaaacatttcaatatattactaataactttttccaatataaatcctaaaattcctataacatagtattttacagttttatgaagctttctattgtgacttttatggaattaagagatgaagaagatgagatattttagcatttatatttttcaaaattatatgtatacttaaaaataaagtaactttatgcattta

SEQ ID NO: 49726 - protein, 590 aa, Artificial Sequence
  derived and/or modified sequence
MGFHLITQLKGMSVVLVLLPTLLLVMLTGAQRACPKNCRCDGKIVYCESHAFADIPENISGGSQGLSLRFNSIQKLKSNQFAGLNQLIWLYLDHNYISSVDEDAFQGIRRLKELILSSNKITYLHNKTFHPVPNLRNLDLSYNKLQTLQSEQFKGLRKLIILHLRSNSLKTVPIRVFQDCRNLDFLDLGYNRLRSLSRNAFAGLLKLKELHLEHNQFSKINFAHFPRLFNLRSIYLQWNRIRSISQGLTWTWSSLHNLDLSGNDIQGIEPGTFKCLPNLQKLNLDSNKLTNISQETVNAWISLISITLSGNMWECSRSICPLFYWLKNFKGNKESTMICAGPKHIQGEKVSDAVETYNICSEVQVVNTERSHLVPQTPQKPLIIPRPTIFKPDVTQSTFETPSPSPGFQIPGAEQEYEHVSFHKIIAGSVALFLSVAMILLVIYVSWKRYPASMKQLQQHSLMKRRRKKARESERQMNSPLQEYYVDYKPTNSETMDISVNGSGPCTYTISGSRECEMPHHMKPLPYYSYDQPVIGYCQAHQPLHVTKGYETVSPEQDESPGLELGRDHSFIATIARSAAPAIYLERIAN

SEQ ID NO: 49727 - DNA, 1773 bp, Artificial Sequence
  derived and/or modified sequence
atgggattccatctcatcacacagctcaagggaatgtccgtcgtactcgtcctgctgccaacgctacttctagtgatgcttactggagcccagcgggcttgccctaagaactgccgttgtgacggaaaaatagtgtactgtgagagtcatgcttttgccgatataccagagaatatttcaggagggtctcagggactgagtctgcgctttaactcaatccagaaactgaaatctaaccagttcgctggactaaaccagcttatctggctgtatctcgatcacaattacatcagctctgtggacgaggacgcgttccagggtattcgccggttaaaagaactcattttgtcatcaaataagatcacatacctgcataataaaacttttcatcccgttccgaatctgcgaaatctggacctgtcctacaataaactgcaaactctacagtctgagcagttcaaggggctgagaaaactgatcattctccaccttcgcagcaattcactgaagacagtgcctatccgggtcttccaggattgtcggaacctggacttcttggatctgggatataatcgtctgagaagccttagcagaaatgcatttgccggcctgctgaagctcaaggagcttcaccttgagcacaaccagttctccaagataaacttcgcccattttccccgcttgtttaaccttcgttcaatatacttgcagtggaaccggatccgctccatctctcagggactcacatggacttggagtagtctgcataatctggacctcagcgggaatgacatccaaggaatcgagccgggcacttttaagtgcctgcctaatctacagaagctcaatctggacagcaacaaattgactaacataagtcaggagactgtgaacgcatggattagccttattagcatcactctcagtgggaacatgtgggagtgttcgaggtctatctgtccattgttttattggcttaaaaacttcaaaggaaacaaggagtccactatgatctgtgccggacccaaacacatccagggagaaaaggtttcagatgctgttgaaacctataacatttgttcagaggtccaagtggtcaacactgagaggtctcacctggttcctcagaccccacagaaacctctgattatcccacggcctactattttcaagcctgatgtaacccagagcacatttgagacgccctctccttcccctggctttcagatccccggggcagagcaagaatatgagcacgtgagtttccataaaattatagctggcagcgtcgctctattcctgtcggtggccatgattttactcgtaatctatgtgtcttggaagagataccctgcttccatgaaacaattacagcagcactccctaatgaagcgaagaaggaagaaggccagagaatctgaaaggcaaatgaacagtccacttcaagagtactatgtagattacaagcccactaactcagaaacaatggacatctccgtgaacgggagcggaccatgcacgtacaccatttctggcagcagagagtgcgagatgcctcatcatatgaaaccactcccctattactcatacgatcagccagtgatagggtattgccaggcccaccagcctctccacgtcacaaaaggctatgagaccgtatctcccgagcaggatgaaagcccagggttggagctgggtcgtgaccacagcttcatcgcaacaatcgcaagatctgccgcacccgctatttacctggagaggattgctaactag

SEQ ID NO: 49728 - DNA, 1773 bp, Artificial Sequence
  derived and/or modified sequence
atgggcttccacctgatcacacagctcaagggcatgagcgtggtgctggtcctgcttccaacattgctcctcgttatgctgactggagctcagcgcgcctgtcccaagaattgtcggtgtgacgggaagattgtgtactgtgaatcgcacgccttcgcagatatacccgaaaacatatctgggggttcccagggactctcactccggtttaatagtattcaaaagcttaagtcgaaccaatttgctgggctgaaccagctgatatggctgtatctcgaccacaattacatttccagtgtggacgaagacgccttccaaggcattagacggctcaaagagctgatcctgagttcgaacaagatcacttatctccataacaagacctttcaccctgttccaaatctccgtaacctcgacctctcgtacaacaagcttcaaacgttgcagtcagagcaattcaaagggctaaggaagttgatcattctgcaccttcggtccaatagtcttaagaccgtgcctatccgtgtgttccaggactgcagaaatctcgatttcctggatctcggatataaccgcctgcgatcactgagcaggaacgctttcgctggcctcttgaaactcaaagagctgcacctcgagcacaatcagttctccaagattaacttcgcacacttccctcggttgtttaatttgcggtccatctacctacaatggaacaggattcggtctatctcacaaggactcacgtggacatggtcctctctgcacaacctcgacctgagtggaaacgatattcagggcatagaacctggcacatttaagtgcttaccaaatctgcagaagttgaatctcgattctaacaagctcaccaatatctcccaggagactgtgaacgcttggatcagcctgattagcatcacacttagtggtaatatgtgggaatgtagcaggtcaatctgcccacttttctattggcttaaaaattttaaaggcaataaagaatctaccatgatttgcgcgggtcctaagcacattcagggagaaaaggtgtcagacgctgtggagacttacaatatatgctctgaggttcaggtagttaacaccgagcgaagtcacttggttccacaaacacctcagaagcctctcattatacctcgacccaccatcttcaagccagacgttacacagtctacctttgagacccctagcccaagccctgggtttcagatacccggcgccgagcaggaatatgaacacgtgagcttccacaagattatagctgggtctgtggcactcttcttgagcgtggctatgattcttctagtgatctatgtgtcttggaagaggtatccagccagtatgaagcagttgcaacaacactcactgatgaaaaggcgcaggaagaaagctcgcgagagcgagaggcagatgaactctccgctgcaggaatattatgtggactacaagcctaccaattccgaaaccatggatatctctgttaacgggagcggaccctgtacctatacaattagcggttcccgtgaatgtgagatgccacatcatatgaagccgcttccctactatagctacgaccaaccagtaattggatattgccaggcccaccagccgttgcacgtgacaaagggatatgagactgtgtctcccgagcaggatgagtccccgggactggagctgggtcgcgatcattcttttatcgccactatcgcccgttccgctgcccccgctatttatctggaaagaatcgccaattag

SEQ ID NO: 49729 - DNA, 1773 bp, Artificial Sequence
  derived and/or modified sequence
atgggcttccacctgatcacccagctgaagggcatgtctgtggtgctggtgctgctgcccaccctgctgctggtgatgctgaccggggcccagagggcctgccccaagaactgccgctgtgatggcaagatcgtgtactgtgagagccacgcctttgctgacatccctgagaacatcagcggcggcagccagggcctgagcctgcgcttcaacagcatccagaagctgaagagcaaccagtttgctggcctgaaccagctgatctggctgtacctggaccacaactacatcagctctgtggatgaagatgccttccagggcatccggcggctgaaggagctgatcctgagcagcaacaagatcacctacctgcacaacaagaccttccaccctgtgcccaacctgaggaacctggacctgagctacaacaagctgcagaccctgcagagcgagcagttcaagggcctgaggaagctgatcatcctgcacctgcggagcaacagcctgaagacagtgcccatccgggtcttccaggactgcaggaacctggacttcctggacctgggctacaaccggctgcggagcctgagcagaaatgcctttgctggcctgctgaagctgaaggagctgcacctggagcacaaccagttcagcaagatcaactttgcccacttccccaggctcttcaacctgcggagcatctacctgcagtggaaccgcatccgcagcatcagccagggcctgacctggacctggagcagcctgcacaacctggacctgtctggaaatgacatccagggcatcgagcccggcaccttcaagtgcctgcccaacctgcagaagctgaacctggacagcaacaagctgaccaacatcagccaggagaccgtgaatgcctggatcagcctcatcagcatcaccctgagcggcaacatgtgggagtgcagccgcagcatctgccccctcttctactggctgaagaacttcaagggcaacaaggagagcaccatgatctgtgccggccccaagcacatccagggcgagaaggtgtctgatgctgtggagacctacaacatctgcagcgaggtgcaggtggtgaacacagagaggagccacctggtgccccagaccccccagaagcccctcatcatcccccggcccaccatcttcaagccagatgtgacccagagcacctttgagacccccagccccagccctggcttccagatccctggagctgagcaggagtatgaacatgtgtccttccacaagatcatcgccggctctgtggccctcttcctgtctgtggccatgatcctgctggtgatctacgtgtcctggaagcgctacccagcctccatgaagcagctgcagcagcacagcctgatgaagagaagaaggaagaaggcccgggagagcgagcggcagatgaacagccccctgcaggagtactacgtggactacaagcccaccaacagcgagaccatggacatctctgtgaatggaagtggcccctgcacctacaccatcagcggcagcagagaatgtgagatgccccaccacatgaagcccctgccctactacagctatgaccagcctgtgattggctactgccaggcccaccagcccctgcacgtgaccaagggctatgagaccgtgtccccagagcaggatgagagccctggcctggagctgggccgggaccacagcttcatcgccaccatcgcccggtctgctgccccagccatctacctggagcgcatcgccaactag

SEQ ID NO: 49730 - DNA, 2247 bp, Artificial Sequence
  derived and/or modified sequence
acaaactcaagcattagcaccaacaagctctgagcatcatcagtctctggaaagccttctgaattagacaagggctgcctcccagcacagctacaaaacactttaaacctgaccagctaaatggataaacctagcctgcatagcttttaaactggggtctcatacagcacaggaggcctacttgcttcaagaactgaaaatccagaggatgaattgctttatctgggaatggcaaaagccagcacaataaggaatgccaggtggtggtggtttccgcacaagagaccaaataagaagaaagctgagagaggggggaaacgtttttggatgacaaaggatgggtttccatttaattacgcagctgaaaggcatgagtgtggtgctggtgctacttcctacactgctgcttgttatgctcacgggtgctcagagagcttgcccaaagaactgcagatgtgatggcaaaattgtgtactgtgagtctcatgctttcgcagatatccctgagaacatttctggagggtcacaaggcttatcattaaggttcaacagcattcagaagctcaaatccaatcagtttgccggccttaaccagcttatatggctttatcttgaccataattacattagctcagtggatgaagatgcatttcaagggatccgtagactgaaagaattaattctaagctccaacaaaattacttatctgcacaataaaacatttcacccagttcccaatctccgcaatctggacctctcctacaataagcttcagacattgcaatctgaacaatttaaaggccttcggaaactcatcattttgcacttgagatctaactcactaaagactgtgcccataagagtttttcaagactgtcggaatcttgattttttggatttgggttacaatcgtcttcgaagcttgtcccgaaatgcatttgctggcctcttgaagttaaaggagctccacctggagcacaaccagttttccaagatcaactttgctcattttccacgtctcttcaacctccgctcaatttacttacaatggaacaggattcgctccattagccaaggtttgacatggacttggagttccttacacaacttggatttatcagggaatgacatccaaggaattgagccgggcacatttaaatgcctccccaatttacaaaaattgaatttggattccaacaagctcaccaatatctcacaggaaactgtcaatgcgtggatatcattaatatccatcacattgtctggaaatatgtgggaatgcagtcggagcatttgtcctttattttattggcttaagaatttcaaaggaaataaggaaagcaccatgatatgtgcgggacctaagcacatccagggtgaaaaggttagtgatgcagtggaaacatataatatctgttctgaagtccaggtggtcaacacagaaagatcacacctggtgccccaaactccccagaaacctctgattatccctagacctaccatcttcaaacctgacgtcacccaatccacctttgaaacaccaagcccttccccagggtttcagattcctggcgcagagcaagagtatgagcatgtttcatttcacaaaattattgccgggagtgtggctctctttctctcagtggccatgatcctcttggtgatctatgtgtcttggaaacgctacccagccagcatgaaacaactccagcaacactctcttatgaagaggcggcggaaaaaggccagagagtctgaaagacaaatgaattcccctttacaggagtattatgtggactacaagcctacaaactctgagaccatggatatatcggttaatggatctgggccctgcacatataccatctctggctccagggaatgtgagatgccacaccacatgaagcccttgccatattacagctatgaccagcctgtgatcgggtactgccaggcccaccagccactccatgtcaccaagggctatgagacagtgtctccagagcaggacgaaagccccggcctggagctgggccgagaccacagcttcatcgccaccatcgccaggtcggcagcaccggccatctacctagagagaattgcaaactaacgctgaagccaactcctcactggggagctccatgggggggagggagggccttcatcttaaaggagaatgggtgtccacaatcgcgcaatcgagcaagctcatcgttcctgttaaaacatttatggcatagagaaaag

SEQ ID NO: 49731 - DNA, 2227 bp, Artificial Sequence
  derived and/or modified sequence
aaacactttaaacctgaccagctaaatggataaacctagcctgcatagcttttaaactggggtctcatacagcacaggaggcctacttgcttcaagaactgaaaatccagaggatgaattgctttatctgggaatggcaaaagccagcacaataaggaatgccagtttgtatggggctactagctcacatgcgggatcagaatggtgtgaatgacagccgcactgtgtcatgaaggtggtggtggtttccgcacaagagaccaaataagaagaaagctgagagaggggggaaacgtttttggatgacaaaggatgggtttccatttaattacgcagctgaaaggcatgagtgtggtgctggtgctacttcctacactgctgcttgttatgctcacgggtgctcagagagcttgcccaaagaactgcagatgtgatggcaaaattgtgtactgtgagtctcatgctttcgcagatatccctgagaacatttctggagggtcacaaggcttatcattaaggttcaacagcattcagaagctcaaatccaatcagtttgccggccttaaccagcttatatggctttatcttgaccataattacattagctcagtggatgaagatgcatttcaagggatccgtagactgaaagaattaattctaagctccaacaaaattacttatctgcacaataaaacatttcacccagttcccaatctccgcaatctggacctctcctacaataagcttcagacattgcaatctgaacaatttaaaggccttcggaaactcatcattttgcacttgagatctaactcactaaagactgtgcccataagagtttttcaagactgtcggaatcttgattttttggatttgggttacaatcgtcttcgaagcttgtcccgaaatgcatttgctggcctcttgaagttaaaggagctccacctggagcacaaccagttttccaagatcaactttgctcattttccacgtctcttcaacctccgctcaatttacttacaatggaacaggattcgctccattagccaaggtttgacatggacttggagttccttacacaacttggatttatcagggaatgacatccaaggaattgagccgggcacatttaaatgcctccccaatttacaaaaattgaatttggattccaacaagctcaccaatatctcacaggaaactgtcaatgcgtggatatcattaatatccatcacattgtctggaaatatgtgggaatgcagtcggagcatttgtcctttattttattggcttaagaatttcaaaggaaataaggaaagcaccatgatatgtgcgggacctaagcacatccagggtgaaaaggttagtgatgcagtggaaacatataatatctgttctgaagtccaggtggtcaacacagaaagatcacacctggtgccccaaactccccagaaacctctgattatccctagacctaccatcttcaaacctgacgtcacccaatccacctttgaaacaccaagcccttccccagggtttcagattcctggcgcagagcaagagtatgagcatgtttcatttcacaaaattattgccgggagtgtggctctctttctctcagtggccatgatcctcttggtgatctatgtgtcttggaaacgctacccagccagcatgaaacaactccagcaacactctcttatgaagaggcggcggaaaaaggccagagagtctgaaagacaaatgaattcccctttacaggagtattatgtggactacaagcctacaaactctgagaccatggatatatcggttaatggatctgggccctgcacatataccatctctggctccagggaatgtgagatgccacaccacatgaagcccttgccatattacagctatgaccagcctgtgatcgggtactgccaggcccaccagccactccatgtcaccaagggctatgagacagtgtctccagagcaggacgaaagccccggcctggagctgggccgagaccacagcttcatcgccaccatcgccaggtcggcagcaccggccatctacctagagagaattgcaaactaacgctgaagccaactcctcactggggagctccatgggggggagggagggccttcatcttaaaggagaatgggtgtccacaatcgcgcaatcgagcaagctcatcgttcctgttaaaacatttatggcatagagaaaagaaaaa

SEQ ID NO: 49732 - DNA, 1773 bp, Artificial Sequence
  derived and/or modified sequence
atgggcttccacctgatcacccagctgaagggcatgagcgtggtgctggtgctcctgcccactctactgttggtaatgctcactggcgcccagagggcatgcccaaagaattgtagatgcgatggcaagatcgtttactgcgagtcacacgcattcgctgatattcctgaaaacatcagcggtgggtctcagggcctttcccttaggttcaactccatacagaaactgaagtctaaccagtttgccgggctcaatcagctaatctggctctacttggaccataattacatatcgagcgttgacgaggacgcgttccagggaattaggcggcttaaagaattgattctgtcaagtaataagattacgtacctgcacaataagaccttccaccctgtgccgaatctgaggaacttggacctcagctataataaactgcagaccctgcagtctgaacaatttaagggcttaaggaagctgatcattttgcacctccggtccaacagcctgaagacggtgcctatccgcgtgtttcaggattgtcggaacctggacttcctggatcttggctacaacagactacgctccttgtctagaaatgcatttgccggactcctgaagctaaaagagttacacttagagcataaccagttctccaagatcaactttgcccactttcctaggctcttcaacctccgaagtatctacttacagtggaacaggatccgtagtatctcacagggcttaacatggacatggtctagcctgcacaacctcgatctgagtggcaatgatatccagggaattgaacctggaaccttcaaatgcctacccaacctccagaagctcaacctcgatagcaataaactcaccaacatttcacaggaaaccgttaatgcctggatatcactgataagcataaccttatctggaaacatgtgggaatgttcaaggtccatctgtcccctcttttactggcttaaaaactttaagggcaacaaagaaagcaccatgatctgcgctggccccaagcacattcagggtgagaaagtcagcgatgccgttgagacctataacatctgctccgaggtgcaggtggtgaatacggaaagatcccatctggtgccccagacgccccagaaaccactgattatacccagacccaccatcttcaaacctgatgtgacacagtcgacattcgagacccccagcccttcacccggcttccagatccccggcgcagagcaggaatacgagcacgtgtccttccacaagattatagcagggtctgtggcactttttctatcagttgctatgattttgttggtcatctacgtgtcatggaaacggtatcccgcttctatgaagcaactgcagcaacactccctgatgaagagaaggagaaagaaagcacgggagtccgaacggcaaatgaactcccccctgcaagaatattatgtcgattacaaacccacaaatagtgagacaatggatatcagcgtgaatgggtctggaccctgcacgtacacaattagtggaagtagggagtgcgaaatgcctcaccatatgaagccgttgccctactatagttatgaccagccagttatcggttactgtcaggcccatcagccgctccacgtcacaaagggatacgaaactgtatccccagagcaagacgagagcccaggacttgagctggggcgagaccattcttttatcgcaacaatcgcacggtctgccgcccccgccatttatctcgagagaatcgccaattag

SEQ ID NO: 49733 - DNA, 1773 bp, Artificial Sequence
  derived and/or modified sequence
atgggcttccacctgatcacccagctgaagggcatgagcgtggtgctggtgctgctacccactctcctgctcgtgatgttaacaggagcccagcgagcctgtccgaaaaactgtcgttgtgacggaaagatcgtgtactgcgagagccacgcctttgctgacatcccggagaacattagcggcggttcccaaggactatcactaaggttcaacagtattcagaaattaaaatcaaaccagtttgccggcctcaatcagcttatctggctgtacctggatcacaattacatctctagcgtcgatgaagatgcctttcaaggcatccggcgtctaaaggaacttatccttagctcaaataagatcacctatcttcataataaaactttccaccccgtgccaaatctgagaaacctggacctgagctacaataagctccagacgttacagtcagaacagtttaagggcctacgcaagttgataatccttcacctgaggtcgaactctctcaaaacggttccaatcagggtgtttcaggactgtagaaatcttgattttctggacctcggctacaatagactgaggtctctgtcccgcaatgcttttgcgggcttgctgaaactcaaggaacttcatttggaacataatcagtttagcaagattaatttcgcgcattttccacggctatttaacttgagatcaatctatctgcagtggaataggatccgctcgatatctcagggcctcacatggacatggtcgtccctgcataacctcgacctgtccggaaatgatattcaggggattgagccagggacgtttaaatgtttgcctaacctacagaagctcaacctcgattctaacaagcttaccaatatctcacaggaaacagtgaacgcatggatttctctgataagtataacattgtcaggtaatatgtgggaatgtagtcgatcaatttgccccctgttctattggctgaaaaattttaagggaaacaaagagagcacaatgatctgtgccggccctaaacacatccagggagagaaagtcagcgatgcggtcgaaacatacaatatttgtagtgaggtacaagtggttaataccgagcgtagccatctggtgccccagactccacaaaaacccctgatcattccacgtccaaccatattcaaacctgacgtgacgcaatctaccttcgagacccccagcccctctcctggctttcagatcccaggcgcagaacaggagtatgagcatgtatcatttcataaaattatcgccggaagcgttgcactgtttctcagcgtggctatgatcctgctggtgatttatgtatcatggaagagatatcccgccagcatgaagcaattacagcaacactccttgatgaagcgccggcggaagaaagcccgcgagagtgagcggcaaatgaattctcctttacaggagtattatgtggattataagccgacaaatagtgaaaccatggacatcagcgtaaacggatccggtccctgcacctataccataagtggctctcgtgaatgtgagatgccgcaccatatgaaacctttaccgtactacagttacgaccaaccagttatcggctactgtcaagcccatcagcctctgcacgtaacaaagggctacgagaccgtttcccccgagcaggacgagagcccagggctggagcttggccgggaccactcctttatcgcaaccattgcccgctcagccgcccctgcaatctatcttgaacgcatcgctaactag

SEQ ID NO: 49734 - DNA, 1773 bp, Artificial Sequence
  derived and/or modified sequence
atgggcttccatctgatcacccagcttaaagggatgtccgtggtgttggtgctactgccaacgctcctcctggtcatgctgactggcgctcaacgggcttgtcccaagaactgccgatgtgacggaaagattgtttactgcgagtcccatgcctttgcagacattcctgagaacatctcaggcggaagccaggggctctccctaaggttcaatagtatccagaagctaaagtctaatcaatttgccggactcaaccagttaatttggctgtacttggatcacaattacatcagcagcgtggacgaggatgccttccagggcatccggaggctcaaagagcttattctttccagcaacaagattacctacctccataacaaaacgtttcaccccgtgcctaatctcaggaacttggaccttagttataacaagctgcagactctccagtcagagcagtttaaggggctgcgaaagttaatcatccttcaccttcgcagcaactcgctgaagaccgtgcccattcgcgtgttccaggactgcaggaacctggactttttggacttgggttacaacaggctgcgatcgttaagcagaaatgctttcgcaggtctgctcaagctaaaagaattacacctggaacataaccagttctccaagatcaacttcgcccattttccgaggcttttcaatctgaggtcgatctatctgcagtggaaccgaattcgatcaatcagccagggactgacatggacctggtcgagtctgcacaatctggacctgtccggcaacgacatccagggcatagaacccggaaccttcaagtgtttaccgaatctccaaaagctgaatctggactctaacaagctgactaacatctcccaggagaccgtgaacgcctggatttcactgatcagcattacactttctgggaacatgtgggagtgctctcgtagtatctgccccctgttttattggctgaagaatttcaagggcaacaaagaatctaccatgatatgcgctggccctaagcacatacaaggagagaaagtatcagacgctgtggagacttacaacatctgctctgaggttcaagttgttaacacagaaaggtctcatctagtgccgcaaactccacagaaacctctcataattcccagacctactatcttcaagccggatgtgactcaatccacctttgagactccctcaccaagtccaggtttccaaattccgggagctgaacaggaatacgaacacgtcagtttccataagataattgcaggatcagtagcattattccttagtgttgccatgatcctactggtgatatatgtgagctggaaacgttatccagcttccatgaagcagttacagcagcattcacttatgaagaggagacgaaaaaaggcaagggagtccgagagacaaatgaacagtcccctgcaagagtattatgtggactacaagcctacaaatagcgaaacaatggatatttctgtaaacggttctggtccctgtacatatactatctcaggcagccgcgagtgcgagatgccccatcatatgaagccactgccctattatagttacgaccaaccagtcatcggctactgccaagcacatcagccactgcatgtgaccaagggctatgagaccgtgtcaccagagcaggacgaaagccctgggttggagctaggacgagaccatagtttcattgcaactatcgctcggtcagcggcaccagccatctacctggaacgtatcgccaattag

SEQ ID NO: 49735 - DNA, 1773 bp, Artificial Sequence
  derived and/or modified sequence
atgggctttcaccttatcacccagctcaaaggaatgtcagtggttctggtcctcctccccactctgcttctggtcatgttgacaggtgcccaaagggcatgccccaaaaattgcagatgtgacggtaagatcgtgtactgtgaatctcacgccttcgctgacattcccgagaacatcagcggcggaagtcagggattaagtttgcggtttaactctattcaaaaactcaagtcaaaccagttcgccggtctgaatcagctgatatggctttacctggatcacaactacatttcgtctgtcgatgaggacgcatttcaaggaatccggcgtctgaaagaactcattctttcatcgaataagattacctacttgcataacaaaactttccatcctgtgccaaacttaagaaacttggatctcagctataacaagcttcagaccctccagtccgaacagttcaaaggcctccgtaaactgatcattcttcatctgcggtctaattccctgaaaacggtgccaatcagggtgtttcaagattgtcgcaatctggactttctcgatctgggttacaataggctccgcagtctttcacgaaatgctttcgctggactactaaagttgaaggagctccatctcgaacacaaccagttctctaaaatcaacttcgcccattttcctaggttgtttaacctccgcagtatctacctgcagtggaacagaattaggtccatcagtcagggcctgacatggacttggagctctctccacaatctggatttgtctggaaacgacatacagggcatcgagccagggacatttaagtgcctccctaatctccagaagctcaacctggactccaataagttaacaaacatttctcaggagaccgtgaacgcatggattagtctcatcagcatcaccctgtcagggaatatgtgggagtgtagtcggagcatttgtcccttgttctactggttgaagaactttaagggtaacaaagaatccacaatgatttgtgccggaccaaagcatatccagggggagaaggtgtccgacgcggttgaaacttataacatttgctcagaagttcaggtggtgaataccgagaggtctcatctggtgccacagactccccagaagcctctgataattcccaggcccaccatcttcaaacccgacgtaacacagtcaacatttgagactccctccccttctccaggattccagattccaggggcagaacaagaatatgagcatgtgagttttcacaagatcatcgctggaagcgtggccctgttcctgtctgtggcgatgatcctactagtcatttacgtctcatggaagagataccccgcatccatgaagcagctacagcaacattccctgatgaaacgcagaagaaagaaggcacgcgaaagcgagcgtcagatgaactcgccactgcaggaatactatgttgactacaaacccacaaatagtgaaacgatggacatctctgttaacgggtctgggccttgtacctacactatttctggatcgcgagagtgtgaaatgccacaccacatgaagcccctgccttattactcgtatgatcagccagtgattgggtactgccaggcccaccagcccctgcacgtcacaaaggggtacgagacagtgagcccagaacaggacgagagccccggattggaactcgggcgtgaccatagcttcatcgcaaccattgccaggagtgcagctcccgctatctatttggaacgaatcgctaactag

SEQ ID NO: 49736 - DNA, 1773 bp, Artificial Sequence
  derived and/or modified sequence
atgggcttccacctgatcacccagctgaagggcatgagcgtggtgctggtgctgctgcccaccctgctgctggtgatgctgaccggcgcccagagagcctgccccaagaactgcagatgcgacggcaagatcgtgtactgcgagagccacgccttcgccgacatccccgagaacatcagcggcggcagccagggcctgagcctgagattcaacagcatccagaagctgaagagcaaccagttcgccggcctgaaccagctgatctggctgtacctggaccacaactacatcagcagcgtggacgaggacgccttccagggcatcagaagactgaaggagctgatcctgagcagcaacaagatcacctacctgcacaacaagaccttccaccccgtgcccaacctgagaaacctggacctgagctacaacaagctgcagaccctgcagagcgagcagttcaagggcctgagaaagctgatcatcctgcacctgagaagcaacagcctgaagaccgtgcccatcagagtgttccaggactgcagaaacctggacttcctggacctgggctacaacagactgagaagcctgagcagaaacgccttcgccggcctgctgaagctgaaggagctgcacctggagcacaaccagttcagcaagatcaacttcgcccacttccccagactgttcaacctgagaagcatctacctgcagtggaacagaatcagaagcatcagccagggcctgacctggacctggagcagcctgcacaacctggacctgagcggcaacgacatccagggcatcgagcccggcaccttcaagtgcctgcccaacctgcagaagctgaacctggacagcaacaagctgaccaacatcagccaggagaccgtgaacgcctggatcagcctgatcagcatcaccctgagcggcaacatgtgggagtgcagcagaagcatctgccccctgttctactggctgaagaacttcaagggcaacaaggagagcaccatgatctgcgccggccccaagcacatccagggcgagaaggtgagcgacgccgtggagacctacaacatctgcagcgaggtgcaggtggtgaacaccgagagaagccacctggtgccccagaccccccagaagcccctgatcatccccagacccaccatcttcaagcccgacgtgacccagagcaccttcgagacccccagccccagccccggcttccagatccccggcgccgagcaggagtacgagcacgtgagcttccacaagatcatcgccggcagcgtggccctgttcctgagcgtggccatgatcctgctggtgatctacgtgagctggaagagataccccgccagcatgaagcagctgcagcagcacagcctgatgaagagaagaagaaagaaggccagagagagcgagagacagatgaacagccccctgcaggagtactacgtggactacaagcccaccaacagcgagaccatggacatcagcgtgaacggcagcggcccctgcacctacaccatcagcggcagcagagagtgcgagatgccccaccacatgaagcccctgccctactacagctacgaccagcccgtgatcggctactgccaggcccaccagcccctgcacgtgaccaagggctacgagaccgtgagccccgagcaggacgagagccccggcctggagctgggcagagaccacagcttcatcgccaccatcgccagaagcgccgcccccgccatctacctggagagaatcgccaactag

SEQ ID NO: 49737 - protein, 126 aa, Artificial Sequence
  derived and/or modified sequence
MFQKDEYCILILGLDNAGKTTFLEQSKTRFNKNYKGMSLSKITTTVGLNIGTVDVGKARLMFWDLGGQEELQSLWDKDKTKCGDLGTLHSSKVSASFRLRDLAADHHRTQKWQRPDVGTAGWLPLP

SEQ ID NO: 49738 - protein, 106 aa, Artificial Sequence
  derived and/or modified sequence
TFLEQSKTRFNKNYKGMSLSKITTTVGLNIGTVDVGKARLMFWDLGGQEELQSLWDKDKTKCGDLGTLHSSKVSASFRLRDLAADHHRTQKWQRPDVGTAGWLPLP

SEQ ID NO: 49739 - protein, 173 aa, Artificial Sequence
  derived and/or modified sequence
MYTLLSGLYKYMFQKDEYCILILGLDNAGKTTFLEQSKTRFNKNYKGMSLSKITTTVGLNIGTVDVGKARLMFWDLGGQEELQSLWDKYYAECHGVIYVIDSTDEERLAESKQAFEKVVTSEALCGVPVLVLANKQDVETCLSIPDIKTAFSDCTSKIGRRDCLTQACSALTG

SEQ ID NO: 49740 - DNA, 522 bp, Artificial Sequence
  derived and/or modified sequence
atgtacaccctgctgagcggcctgtacaagtacatgttccagaaggacgagtactgcatcctgatcctgggcctggacaacgccggcaagaccaccttcctggagcagagcaagaccagattcaacaagaactacaagggcatgagcctgagcaagatcaccaccaccgtgggcctgaacatcggcaccgtggacgtgggcaaggccagactgatgttctgggacctgggcggccaggaggagctgcagagcctgtgggacaagtactacgccgagtgccacggcgtgatctacgtgatcgacagcaccgacgaggagagactggccgagagcaagcaggccttcgagaaggtggtgaccagcgaggccctgtgcggcgtgcccgtgctggtgctggccaacaagcaggacgtggagacctgcctgagcatccccgacatcaagaccgccttcagcgactgcaccagcaagatcggcagaagagactgcctgacccaggcctgcagcgccctgaccggctag

SEQ ID NO: 49741 - DNA, 522 bp, Artificial Sequence
  derived and/or modified sequence
atgtatacattgttatcaggactctacaagtacatgttccagaaggatgagtattgtattctcatactgggcttggacaatgccggcaaaacgacatttctagaacaaagcaagacgcgttttaacaagaactacaaaggcatgagtctctcaaaaatcaccaccacagtgggtctgaatatcggcaccgttgatgtgggcaaagcccgcctgatgttttgggacctgggggggcaggaagagcttcaatcactgtgggacaaatattacgcagagtgccatggcgtgatttatgtgatcgacagtaccgatgaggaaagattggcggagtctaaacaggcattcgaaaaggtcgtgaccagtgaagcgctgtgtggcgtgcccgttttagtactggccaacaagcaagacgtggaaacttgcctgtccatacctgacatcaaaaccgcctttagtgattgtacttccaagatcggtagacgggactgtctcacccaagcttgctctgcactcacaggctag

SEQ ID NO: 49742 - DNA, 522 bp, Artificial Sequence
  derived and/or modified sequence
atgtacaccctgctgagcggcctgtacaagtacatgttccagaaggatgagtactgcatcctgatcctgggcctggacaatgctgggaagaccaccttcctggagcagagcaagacccgcttcaacaagaactacaagggcatgagcctgagcaagatcaccaccaccgtgggcctgaacattggaacagtggatgtgggcaaggcccggctgatgttctgggacctgggcggccaggaggagctgcagagcctgtgggacaagtactatgcagagtgccacggcgtcatctacgtgattgacagcacagatgaggagcggctggccgagagcaagcaggcctttgagaaggtggtgaccagcgaggccctgtgtggggtgcctgtgctggtgctggccaacaagcaggatgtggagacctgcctgagcatcccagacatcaagacagccttcagtgactgcaccagcaagattggccggcgggactgcctgacccaggcctgcagcgccctgaccggctag

SEQ ID NO: 49743 - DNA, 522 bp, Artificial Sequence
  derived and/or modified sequence
atgtacaccctgctgagcggcctgtacaagtacatgttccagaaggatgagtattgtatactgatactgggactggataacgcagggaagaccacctttcttgagcagagcaagactcgcttcaataaaaattacaagggcatgtctctttccaagattactacaactgtgggtttgaatattggcaccgtggatgtggggaaggctaggctcatgttctgggacttgggagggcaggaggagctgcagagtctgtgggacaagtactacgctgaatgccacggggtcatatacgtcattgactccacggacgaagagaggctcgctgaatcgaagcaggctttcgaaaaggtagtgacatccgaggctctgtgtggggtccctgtgctggttctagcaaataagcaggacgtcgaaacatgtctctctatccccgacatcaaaactgcctttagcgactgcacatccaagattgggagacgagattgtcttacgcaagcttgtagcgccctgactggctag

SEQ ID NO: 49744 - DNA, 522 bp, Artificial Sequence
  derived and/or modified sequence
atgtataccctgctgtcaggactttataagtacatgtttcagaaagatgaatattgcatcctcatcctgggcctggacaatgctggaaagacgacatttctggaacagtccaaaactcggtttaataagaattataaagggatgtccttatccaaaatcaccaccaccgttgggcttaacatagggacagtcgacgtaggaaaggcaagactgatgttttgggatctgggcggacaagaggaactgcagtctctgtgggataagtactatgcagaatgccacggcgttatatacgtgatcgacagcaccgacgaggagcgactcgcagaaagcaagcaggcctttgagaaagtcgtcacctctgaagcactctgtggcgtgccagtcctcgtcctcgctaataagcaggatgtggagacatgcctgtccatacccgatattaaaaccgccttttctgactgcacttccaaaattggccgtagggattgcctcactcaggcttgttctgccctgaccggctag

SEQ ID NO: 49745 - DNA, 2614 bp, Artificial Sequence
  derived and/or modified sequence
ggaggccgctgggacgcggttcagctcattccctgaggccggcccgcgtcccgtcaggcgccgcgcggggttagcgcggggtcagcggaggtcagcgggggtcagcagcagcggctccgagggcgcggcggacgcaggatgtacacgctgctgtcgggcttgtacaagtacatgtttcagaaggacgagtactgcatcctgatcctgggcctggacaatgctgggaagacgaccttcctggagcagtcgaaaacccgatttaacaagaactacaaggggatgagtctatccaaaatcaccaccaccgtgggcctaaacatcggcactgtggatgtgggaaaggctcggctcatgttctgggacttaggagggcaggaagagctgcagtctttgtgggacaagtattatgcggagtgtcacggcgtcatctacgtcattgactccaccgacgaggagaggctggctgagtccaagcaggcgtttgagaaggtggtgaccagcgaggcgctgtgcggtgtccccgtcttggtgctggccaacaagcaggatgtggagacgtgcctctcaatccctgacatcaagacggccttcagcgactgcaccagcaagatcggcaggcgagattgcctgacccaggcctgctcggccctcacagggtgagtgggggctgcacctgcgggggctttggggaccgagaccccccgcctcacacccgctgtcttcacagcaaaggggtgcgcgagggcatcgagtggatggtgaagtgtgtcgtgcggaatgtgcaccggccgccgcggcagagggacatcacgtaggcgcagccgcgctgccgtcgggacggctggtcccctggtgctggaggagtggcctcctgttggctcccatgctgctgatctggggggtgggtttgctttgctttggggttcttctatttactttgttttctcgaagacaaactttcctctatgtctggaaaagcgtaggcatccggaggctttggaggggagtctggcagcccggctggcccaggccctgcagcggcagcctttccacagggcgcagcggcggcctttcgaggccctttctggggggtctgagggagacctggttgggaattggggctccagtgctcaggctggcttgggctgcatgaggacagccctgtgggaccctcgggagaccccgtggctgtctccgccccatcgaggaggaggcccgtcagccatggctgccatctggcttctgccctgtgaccccgtgaccccgtgaccccgaagtggtctggggctgatcttgccttgaggaagacccaggccatgttcccaaaggccagcgggggccctggattgtgatgcagcctcgggacagggctgaggcctgcgggggaagacctataccccacgcctgggcctggcttcacctcaccctaatcccccgggagggagctgactgatgcaaaaagctgagggggcctgctgggagtggctgtttttatgccccagccccgcaagttggggagtgtttgtgggggtccagagccctcccccagccaggagagaacctcccggaggggttctctgtggggccctgtgtcccctgctcgggagtaaggctggtcctggggtcctccctgcacggaccccactgggcctgccgagtgctgtgttcttcctcagtctggctgtgggcaggagcggcctgcccagtgtcacccagggtgagtgcaaaataaagacggcgagtgtggctctgtccatcccttccctcctggagggtggaggctcctggctgttggacacggtgatggtgttactgggctgctcaggggctggtgggcaggtgaggggctccccaggtgggcctggagagtccaggcactcccttcctgcggatgtgggaaggacatggggtcctgggaggagctgctgggaaggggcatgagtcagggtgggggtggcgcagcagctgcggggctgtgactcacaggagtcgggccctggaagtccccgcgtcctctccaggggaccctgtgtgtgttctgcaggttggttcccaggacctgggggggacctccagccccgggaacctggccgtgctggggaggcgagtggctggtgcagccccccggttgctctgggtgcatcgggaggcttcagagcctgccccagagagggagaagcttcacttcccggaaagcatgggaggcctggaggaggtctttggcaggtcccctctcgggaaatcccctgtgagttgggagtgggaggaattcataagtggggggttagtgtgggccccggcgactagggctggcctgagccccatcctgttcttccagcaatgataccctcccaggccctgaccctcgctgagcttcaggggcccctgccacgtgccacagccactgggggcagaggtggcactccccactgatcctcccagggagggtctgtctgaggtaggggaagccccgggcagcagttctgatggcaggcagcctgagggatctgggcacagcgggcggctcaggtgtccccggctgccctcccagtagctgtgcaactacaaccagttttatgaaaaagctttataaaaataagctttaagaaacctc

SEQ ID NO: 49746 - protein, 1139 aa, Artificial Sequence
  derived and/or modified sequence
MSRRFTVTSLPPAGPARSPDPESRRHSVADPRHLPGEDVKGDGNPKESSPFINSTDTEKGKEYDGKNMALFEEEMDTSPMVSSLLSGLANYTNLPQGSREHEEAENNEGGKKKPVQAPRMGTFMGVYLPCLQNIFGVILFLRLTWVVGIAGIMESFCMVFICCSCTMLTAISMSAIATNGVVPAGGSYYMISRSLGPEFGGAVGLCFYLGTTFAGAMYILGTIEILLAYLFPAMAIFKAEDASGEAAAMLNNMRVYGTCVLTCMATVVFVGVKYVNKFALVFLGCVILSILAIYAGVIKSAFDPPNFPICLLGNRTLSRHGFDVCAKLAWEGNETVTTRLWGLFCSSRFLNATCDEYFTRNNVTEIQGIPGAASGLIKENLWSSYLTKGVIVERSGMTSVGLADGTPIDMDHPYVFSDMTSYFTLLVGIYFPSVTGIMAGSNRSGDLRDAQKSIPTGTILAIATTSAVYISSVVLFGACIEGVVLRDKFGEAVNGNLVVGTLAWPSPWVIVIGSFFSTCGAGLQSLTGAPRLLQAISRDGIVPFLQVFGHGKANGEPTWALLLTACICEIGILIASLDEVAPILSMFFLMCYMFVNLACAVQTLLRTPNWRPRFRYYHWTLSFLGMSLCLALMFICSWYYALVAMLIAGLIYKYIEYRGAEKEWGDGIRGLSLSAARYALLRLEEGPPHTKNWRPQLLVLVRVDQDQNVVHPQLLSLTSQLKAGKGLTIVGSVLEGTFLENHPQAQRAEESIRRLMEAEKVKGFCQVVISSNLRDGVSHLIQSGGLGGLQHNTVLVGWPRNWRQKEDHQTWRNFIELVRETTAGHLALLVTKNVSMFPGNPERFSEGSIDVWWIVHDGGMLMLLPFLLRHHKVWRKCKMRIFTVAQMDDNSIQMKKDLTTFLYHLRITAEVEVVEMHESDISAYTYEKTLVMEQRSQILKQMHLTKNEREREIQSITDESRGSIRRKNPANTRLRLNVPEETAGDSEEKPEEEVQLIHDQSAPSCPSSSPSPGEEPEGEGETDPEKVHLTWTKDKSVAEKNKGPSPVSSEGIKDFFSMKPEWENLNQSNVRRMHTAVRLNEVIVKKSRDAKLVLLNMPGPPRNRNGDENYMEFLEVLTEHLDRVMLVRGGGREVITIYS

SEQ ID NO: 49747 - DNA, 3420 bp, Artificial Sequence
  derived and/or modified sequence
atgagccgccgttttacggtgacctcattaccccccgcaggcccggcgcgctcacccgatccagagagccgccggcactccgtggcggatccaagacacctgccgggcgaagacgtaaaaggcgacgggaacccaaaagaatccagtccctttattaacagcacggatactgaaaaaggaaaggaatatgacgggaagaacatggccctgtttgaagaagagatggatacttcaccaatggtgtcttctctgctttcaggactggcgaactataccaatctgccacagggttctcgcgagcacgaggaagccgagaacaatgagggcgggaagaagaaacccgtgcaggcaccaagaatgggcacttttatgggagtgtaccttccatgcctgcaaaatatattcggtgtcatcttattcctgagattgacttgggtggtaggtatcgcagggataatggaaagcttctgcatggtgttcatttgctgcagctgtaccatgctgactgccatttccatgagtgctatcgccacaaacggcgttgtgcccgccggtggttcctactatatgattagccggtccctgggtccagagtttgggggggctgtgggcctgtgtttctacctaggaaccacctttgctggcgcaatgtacatactgggaaccattgaaattcttctggcttatttatttcctgctatggccatctttaaagctgaagatgcctccggggaagccgctgctatgctgaataacatgcgagtctacggaacctgtgtgttgacttgcatggctactgtggtgtttgtgggcgtaaaatatgtaaacaaattcgcgctggtcttccttggctgtgtcatactctccattttagccatctacgccggggtgatcaagtccgccttcgatcctcccaactttccaatctgtctgctgggtaataggacattatctagacacggatttgatgtctgcgcgaagctggcgtgggaaggcaatgagaccgtcaccacgcgtctgtgggggttgttctgcagtagtcggtttttgaacgctacatgcgacgagtattttacacgcaacaacgtcacagaaatacaaggaatacctggagctgcgtcgggactaataaaggagaacctctggagcagttacttgacaaaaggggtgatcgtggagcgatccggaatgacgtccgtgggtctcgcagatgggacgcccatcgacatggatcatccgtacgttttctcagacatgacctcttactttacactgctggtcggcatctatttcccttcagttaccggaatcatggccggatccaatagaagcggagacctgagggacgcccaaaaaagtatccccacgggaacgatcctggccatcgcgactacatctgctgtgtatatttcaagcgtggtgctctttggcgcatgcatcgagggggtggtattgcgagacaaatttggcgaagctgtgaacggtaatctggtcgtgggcacattggcctggccatctccttgggttattgttatcgggtcttttttttctacctgtggggccggactccagtctctgacaggcgcacctcggctcctccaggccatctcccgggacggcattgtcccattcctgcaggtgtttgggcatgggaaagctaacggcgagccaacctgggcccttctgctgaccgcctgcatttgtgagattggtattctaatagctagtttggatgaagttgccccaatcctttctatgttttttttgatgtgttatatgtttgtaaatttggcctgcgccgtgcagaccttgctccgaacgccgaattggcggcctcgctttagatattatcactggactctgagcttccttggcatgtcgctgtgtctagcattgatgtttatttgttcctggtattacgcattggtcgccatgctgatcgcggggttgatatacaaatatatcgaatatcgtggtgccgagaaagaatggggtgacgggatacgggggctatccctgtcagccgcccgctatgccttgctccgccttgaagagggaccccctcacactaagaattggcgtccacagctgttggtccttgtaagagtcgaccaggaccagaacgtagtgcacccccagctgctcagtctgacctcccagctcaaggccggaaagggtcttacaatagttggaagcgtcctggagggaacatttttagagaaccaccctcaagcacagcgcgctgaggagtcaattcgtcgcttgatggaggctgagaaagtaaagggtttttgccaagttgtcatttctagtaatctacgggatggcgtctcacatctgatacagagtggcggtctggggggactacagcacaacacagtgctggtgggctggcccagaaactggcggcagaaagaagaccatcaaacttggcggaacttcattgaacttgtgcgggagaccaccgccggtcacctggccctacttgtcactaaaaatgtttcaatgtttccaggcaatcccgagagattcagtgaaggcagcattgacgtctggtggatcgttcacgacggcggcatgctgatgttgctgccctttctcttgcgccatcacaaagtttggaggaagtgtaaaatgagaatctttaccgtggcgcaaatggacgacaactctattcagatgaagaaggatctgaccacttttctctatcatttgagaatcacagcagaagtcgaggttgttgaaatgcacgaatctgacattagcgcttatacttatgagaagacactggtgatggaacagagatcccagatattgaaacagatgcatctgacaaagaacgaacgcgagagggagatccaaagcataacagacgagtctaggggatctatcaggcggaaaaaccctgctaatactaggctgagattgaatgtcccagaggagactgctggagactctgaagagaagcctgaagaagaggttcaactcattcatgatcagtcagcccctagttgcccttctagctccccatcaccaggtgaggagccagaaggggagggggaaacagatcctgagaaagtccacttgacctggacgaaggacaagtccgtggctgagaaaaacaagggaccatcacccgtgagtagcgaaggaataaaagactttttttcgatgaaacctgagtgggagaatctgaatcagtcaaacgttagaaggatgcataccgccgtgagactgaacgaggttatcgtgaagaagtcccgcgatgctaagctagtcctcctgaatatgcccggccctccaaggaacagaaatggtgatgagaattacatggagtttctagaggtgctcaccgagcacttggaccgagtgatgttggtacgtgggggtggacgggaagtgatcaccatttactcatag

SEQ ID NO: 49748 - DNA, 3420 bp, Artificial Sequence
  derived and/or modified sequence
atgagccgccgcttcaccgtgaccagcctgcccccagctggccctgcccggagcccagaccctgagagccgccgccacagcgtggccgaccccaggcacctgcctggagaagatgtgaagggagatggcaaccccaaggagagcagccccttcatcaacagcacagacacagagaagggcaaggagtatgatggcaagaacatggccctgtttgaggaggagatggacaccagccccatggtgagcagcctgctgagcggcctggccaactacaccaacctgccccagggcagccgggagcacgaggaggctgaaaataatgaaggaggcaagaagaagcctgtgcaggcccccaggatgggcaccttcatgggcgtgtacctgccctgcctgcagaacatctttggagtcatcctcttcctgcggctgacctgggtggtgggcattgctggcatcatggagagcttctgcatggtgttcatctgctgcagctgcaccatgctgacagccatctccatgtctgccatcgccaccaatggagtggtgcctgctgggggcagctactacatgatcagccgcagcctgggccctgagtttggaggagctgtgggcctgtgcttctacctgggcaccacctttgctggggccatgtacatcctgggcaccatcgagatcctgctggcctacctgtttcctgccatggccatcttcaaggccgaggatgccagcggggaggccgccgccatgctgaacaacatgagggtgtatggcacctgtgtgctgacctgcatggccaccgtggtgtttgtgggcgtgaagtatgtgaacaagtttgccctggtgttcctgggctgtgtgatcctgagcatcctggccatctatgctggggtcatcaagagcgcctttgacccccccaacttccccatctgcctgctgggcaacagaaccctgagccgccacggctttgatgtgtgtgccaagctggcctgggagggcaatgaaacagtgaccacccggctgtggggcctcttctgcagcagccgcttcctgaatgccacctgtgatgagtacttcaccaggaacaacgtgacagagatccagggcatccctggggccgccagcggcctcatcaaggagaacctgtggagcagctacctgaccaagggcgtgattgtggagaggagcggcatgacctctgtgggcctggctgatggcacccccatcgacatggaccacccctacgtgttcagtgacatgaccagctacttcaccctgctggtgggcatctacttccccagcgtgacaggcatcatggccggcagcaacagaagtggggacctgagagatgcccagaagagcatccccaccggcaccatcctggccatcgccaccaccagcgctgtgtacatcagctctgtggtgctgtttggagcctgcatcgagggcgtggtgctgcgggacaagtttggagaggccgtgaatggaaacctggtggtgggcaccctggcctggcccagcccctgggtgattgtcatcggcagcttcttcagcacctgtggggccggcctgcagagcctgactggagccccccggctgctgcaggccatcagcagagatggcatcgtgcccttcctgcaggtgtttggccacggcaaggccaacggggagcccacctgggccctgctgctgacagcctgcatctgtgagatcggcatcctgattgccagcctggatgaggtggcccccatcctgtccatgttcttcctgatgtgctacatgtttgtgaacctggcctgtgctgtgcagaccctgctgcggacccccaactggaggccccgcttccgctactaccactggaccctgtccttcctgggcatgagcctgtgcctggccctgatgttcatctgctcctggtactatgccctggtggccatgctgattgctggcctcatctacaagtacatcgagtacagaggagctgagaaggagtggggagatggcatccggggcctgagcctgtctgctgcccgctatgccctgctgcggctggaggagggccccccccacaccaagaactggaggccccagctgctggtgctggtgcgggtggaccaggaccagaatgtggtgcacccccagctgctgagcctgaccagccagctgaaggccggcaagggcctgaccatcgtgggctctgtgctggagggcaccttcctggagaaccacccccaggcccagagagctgaggagagcatccggcggctgatggaggccgagaaggtgaagggcttctgccaggtggtgatcagcagcaacctgagagatggagtgagccacctgatccagagcggcggcctgggcggcctgcagcacaacacagtgctggtgggctggcccaggaactggaggcagaaggaggaccaccagacctggaggaacttcatcgagctggtgcgggagaccacagctggccacctggccctgctggtgaccaagaatgtgtccatgtttcctggcaaccctgagcgcttcagcgagggcagcattgatgtgtggtggatcgtgcatgatggcggcatgctgatgctgctgcccttcctgctgcggcaccacaaggtgtggaggaagtgcaagatgaggatcttcaccgtggcccagatggatgacaacagcatccagatgaagaaggacctgaccaccttcctgtaccacctgcgcatcacagctgaggtggaggtggtggagatgcatgaaagtgacatcagcgcctacacctatgagaagaccctggtgatggagcagaggagccagatcctgaagcagatgcacctgaccaagaatgaaagagagcgggagatccagagcatcacagatgagagccggggcagcatccggaggaagaacccagccaacacccggctgcggctgaatgtgcctgaggagacagctggggacagcgaggagaagccagaggaggaggtgcagctgattcatgaccagagcgcccccagctgccccagcagcagccccagccctggagaggagcctgagggggagggggagacagatcctgagaaggtgcacctgacctggaccaaggacaagtctgtggccgagaagaacaagggccccagccctgtgtcctctgagggcatcaaggacttcttctccatgaagccagagtgggagaacctgaaccagagcaatgtgcggaggatgcacacagctgtgcggctgaatgaggtgattgtgaagaagagcagagatgccaagctggtgctgctgaacatgcctggcccccccaggaacagaaatggagatgagaactacatggagttcctggaggtgctgacagagcacctggacagagtgatgctggtgcggggcggcggccgggaggtgatcaccatctacagctag

SEQ ID NO: 49749 - DNA, 3420 bp, Artificial Sequence
  derived and/or modified sequence
atgagccggcggttcaccgtgaccagcctgccccccgccggccccgcgaggagccccgatcctgagtccaggcggcactctgttgctgatcctagacatctgccgggtgaggatgttaagggggatggaaacccaaaagagtccagcccctttataaattcaactgatactgagaagggcaaagagtatgacggcaagaatatggctctgtttgaagaagaaatggatacctcacctatggtgtcctccctgcttagcggcctcgctaactatactaatctgccacagggatcccgggagcatgaggaggcggagaacaacgagggaggcaaaaagaagccagtccaagccccacgaatgggtactttcatgggcgtatacctgccgtgtctgcagaatattttcggggtgattctctttctgcgcctgacatgggtcgtgggaatcgctgggattatggaaagcttttgcatggtgttcatttgctgcagttgcactatgctgaccgctatcagcatgtcagccatagccactaatggggtcgtgccagctggggggtcgtactacatgatctctcgatcccttggccctgaattcggtggggctgttgggttatgtttctacctgggaactacctttgccggggcaatgtatatcctcgggaccatcgagatcctgctggcctacttgtttcccgccatggccatcttcaaggccgaggatgcttcgggagaggccgctgccatgttaaataatatgcgcgtttacggaacctgtgtactcacttgtatggctaccgtggtgtttgtgggggttaagtacgtgaacaagttcgccctcgtgttcctgggttgtgtgattctgtctatcctggccatctacgccggggtcattaagagcgcctttgatcctcccaacttccccatatgcttgcttggcaaccgcacactctcacggcatgggttcgacgtttgcgctaaactggcgtgggaggggaacgagacagtcaccacaaggctgtggggtctgttctgctcaagcaggtttttaaacgccacctgtgatgaatactttacacggaacaatgtgacagaaattcaggggattcctggcgcagccagcggcttgatcaaagaaaatctttggtcctcgtacctgacaaaaggcgttattgtggagcggtccggaatgacaagtgtgggactggccgatggcacccccatcgatatggatcatccttacgtgttctccgacatgactagttattttaccctattggtgggcatctatttccctagtgtcacaggcatcatggccggctcaaacaggtcaggagatcttcgggacgctcagaaatctatccccacgggcaccatcctggctatcgctaccacgtccgccgtttacatctcttcggtcgtgctctttggggcctgtatcgaaggggtggtcctcagggacaagtttggggaggccgtcaacgggaacctggtggtggggaccctggcatggccttccccttgggtcattgtgatcggatcctttttctctacgtgcggcgccggtctgcagtccctgaccggggcacctcgccttttgcaggccatttctagggatgggatcgttcccttcctccaggtgtttggccacggcaaagccaatggcgaaccaacatgggccctactgcttaccgcctgcatctgtgaaattggcattctgatagctagtttggacgaagtcgcccccatcttgtccatgttctttttgatgtgttacatgtttgtcaatctagcttgcgcggttcaaaccctcctacggacgccaaactggagaccacggtttagatactaccactggacgctgtcgttcctgggaatgtcactgtgcctcgccctcatgttcatctgctcctggtattatgccctggtggcaatgctcattgccggcctgatttacaagtacatagagtatcgtggggccgaaaaggagtggggtgatggcataagaggcctgtctctatccgcagccagatacgccttactgcgacttgaagaaggcccccctcatactaaaaactggaggccgcaactccttgtgctggtgcgagttgatcaggaccaaaatgtcgtgcatcctcaactgctgtctctcacaagccagctgaaagccggtaagggcctgaccatcgttggcagcgtcctggaagggacattcttggaaaatcaccctcaggcgcagcgtgccgaggagagcatccggaggctcatggaagctgagaaggtgaagggcttctgccaggttgtcatttccagcaacctgagagacggagtttcccatctgatccagtccggtgggttgggcgggctgcagcacaacacagtactggtgggatggcctcgcaactggcgacaaaaggaagatcaccagacttggcgtaattttatcgagctcgtgcgcgaaaccaccgctggccacctggctctcttggtgaccaaaaacgtcagcatgtttccaggaaacccagaaaggtttagcgagggttccatagatgtgtggtggatagtgcacgacggcggaatgctgatgctgctaccattcctgctccggcaccacaaagtttggaggaagtgtaagatgcggatctttactgtggcacagatggacgataactcaatccagatgaaaaaagatttgaccacttttctttaccacctgcgtatcaccgccgaggtggaggtggtggagatgcacgagtcagacatttcagcctatacatacgaaaaaacccttgtcatggagcagcggagccagatcctgaaacaaatgcatctcactaagaatgagagggaacgggagatacagagcatcactgacgaatcccggggcagcatccgcaggaagaatcctgccaatacccgacttagattgaatgtacccgaagaaacagctggcgactctgaggagaagcctgaagaggaggtccaactgattcatgatcagagtgcccctagctgccctagctccagtccatcccctggcgaggaaccggagggggaaggtgagaccgatcctgagaaggtgcatctgacgtggacaaaggacaaaagcgtggcagagaagaataagggccccagcccagtctctagcgaagggattaaagatttcttttcaatgaagccagaatgggaaaaccttaatcaaagtaacgtgcgtcgaatgcataccgctgtgaggctcaatgaggtcatcgtgaaaaagtccagagacgccaaactggttctgctcaacatgcccggaccaccaaggaataggaatggagacgagaattatatggaatttcttgaggtcctgacagagcatctggaccgcgtgatgctggtgcgaggcggcggacgagaggtgattaccatttacagctag

SEQ ID NO: 49750 - DNA, 3420 bp, Artificial Sequence
  derived and/or modified sequence
atgtccaggcgctttacggtgacctccctccccccagcaggacccgctcgaagccctgaccccgagtctaggaggcactctgttgctgatccccgtcacctgccaggcgaggacgtgaaaggggatgggaatcccaaggaaagttccccattcataaacagcaccgacactgagaagggtaaggaatatgatggcaagaacatggccctcttcgaagaggaaatggacactagccctatggtatcaagcctgctgagtgggctggctaattatacaaacctgcctcagggctcaagggaacacgaggaggcagagaacaacgaggggggaaagaagaaaccagtgcaggctcctcgtatgggtaccttcatgggggtgtacttaccatgtctccaaaatatattcggcgttatactgttccttcgactcacgtgggtggtcggaatcgccggaatcatggaaagcttctgcatggtgtttatttgttgctcgtgtactatgcttaccgcaattagtatgtcagctatcgccacaaatggagtggtgcccgctggaggctcttactacatgatatcacgctccctgggccctgagttcggtggggctgtcgggctctgtttctacttggggacaacctttgcaggggctatgtatatccttggtaccatcgaaattttgttggcatatttattccctgcgatggcaatttttaaagctgaggatgctagtggtgaggccgcagctatgttaaataacatgcgcgtctatggtacatgcgtcctgacgtgtatggcgaccgttgtcttcgtgggggtcaagtacgtgaataagttcgccctggttttcctcggatgtgttatcttatccatcttggcaatttacgcgggtgtcatcaagtcggcttttgacccacccaatttccctatctgcttgcttggcaaccgcaccttgagtagacatgggtttgacgtgtgcgccaagctagcctgggagggtaatgaaacagttaccactaggctgtgggggctgttctgctcatccaggtttctaaacgctacttgcgacgagtattttacgaggaataatgtgacggagatccagggcatcccaggcgctgcctctggactgattaaggaaaacctgtggtcgtcttaccttacaaagggcgtcatcgtggagcgctccggcatgacctccgtgggcctcgcagatggaactcccattgatatggaccatccctacgtcttttccgatatgacatcatatttcacactattggtcggtatatactttccttccgttaccggcatcatggccggatcaaaccgctctggcgatctccgcgacgcgcaaaagtcaatcccgactggtacgattttagctattgccacaacctctgctgtctatataagcagtgttgtgttgttcggtgcgtgtatcgagggtgtggtgttaagggataagttcggcgaggccgtgaacgggaatctggtggtaggtacccttgcgtggccaagtccatgggttatcgtgatcggctcgtttttttcgacctgtggtgccggtctgcagtctcttacaggggctccacgcttgcttcaggcaatctccagggatgggatagtccctttcctgcaagtttttgggcacggaaaggccaacggtgagcctacatgggcgcttcttctcactgcttgcatatgtgagattggcatcttgatcgcctcattggacgaggtggctccgattctaagtatgtttttcctcatgtgctacatgtttgtgaatctggcatgcgctgtccagaccctcctccgaactccgaactggcgccctcggtttcgttactatcactggaccctgagctttctcggcatgagcttgtgccttgccctcatgttcatctgctcttggtattacgccctggtggctatgttgattgcaggcttaatatacaaatacatcgaatataggggagccgaaaaagagtggggcgacgggatccgaggcctgagcctgagtgccgcacgatacgccctgctacgcttggaagagggaccccctcatacaaaaaattggcgccctcagctccttgtgttggtgagagtggatcaggaccagaacgtggtgcacccacagctgctgagtcttacgagccagctgaaggcaggtaagggattgaccatcgtcggaagtgtgttggaggggactttcttggagaaccatcctcaggctcagcgagcagaggaaagcatccgcagactcatggaagctgaaaaggtgaaggggttttgccaggtcgtcatatcctccaatctgcgagacggagtaagccacctgatacagagtggcggactgggagggctccagcacaacacggtgctggtgggctggccccgtaattggagacagaaggaggaccatcagacctggcgcaattttattgagctggtccgagagaccaccgcaggacacctggccctgttagtgactaagaatgtaagtatgttcccaggaaaccctgagcgattcagcgaagggagtattgatgtgtggtggattgtacatgatggcggtatgctcatgcttttgccgttccttctgaggcaccataaagtctggcgtaagtgcaagatgaggatcttcaccgtggcccagatggacgataattccatccaaatgaaaaaggacctaactactttcctgtatcacctgcgcatcacagcagaagtggaggtggtcgagatgcacgagagcgacataagcgcttatacctacgaaaagacccttgtgatggagcaaagatctcagatcttgaagcagatgcatctcacaaagaacgagagggagagggaaatccaaagcattaccgatgagtctaggggcagcattagaagaaaaaacccagctaatacaagattgcgcttgaatgtcccagaggagaccgcaggtgactctgaagaaaagcccgaggaagaagttcagctcattcacgatcagtcagcaccaagttgtccaagttcatcccccagtcctggagaggaaccggaaggggagggcgaaacagatcctgaaaaggtgcacctgacctggaccaaggataaatctgttgccgagaagaacaagggtccttcgccagtctcatctgagggaataaaagactttttctctatgaagcctgaatgggaaaacctgaaccaatcaaacgttagaaggatgcatacggcagtgagattgaacgaagtcatcgtaaagaaatcgcgtgacgccaaactcgtcctcttgaatatgccaggtccgccaaggaatagaaatggcgacgaaaactacatggaattccttgaggtactcactgaacatttagacagagtgatgctggtgaggggcggtggacgtgaggtcattacaatatactcctag

SEQ ID NO: 49751 - DNA, 6041 bp, Artificial Sequence
  derived and/or modified sequence
ctccctcctagagcctggttgcagccacttgtgcgatcccggaccttgccgcggccgcctggctcctttccgcgccatgagccgcaggttcacggtcacctcgctgccccccgcagggcccgccagaagccctgacccagagtcccgccggcattcggtcgcagacccccgccacctcccgggggaagacgtcaaaggtgatggcaaccccaaggaaagcagtcccttcatcaacagcaccgacacagagaagggaaaggagtatgatggcaagaacatggccttgtttgaggaggagatggacaccagccctatggtgtcctccttgctcagtggcctggccaactacaccaacctgccccagggaagtagggagcatgaagaggcagaaaacaatgagggtggaaaaaagaagccggtgcaggccccacgcatgggcaccttcatgggcgtgtacctgccgtgcctgcagaacatctttggcgtcatcctcttcctgcggctcacctgggtggtgggcattgcaggcatcatggagtccttctgcatggtgttcatctgctgctcctgtacgatgctcacggccatctccatgagtgcaattgcaacgaatggtgttgtgcctgctggtggctcctactacatgatttccaggtctctgggcccagagtttgggggtgccgtgggcctctgcttctacctgggcactacctttgcaggagccatgtacatcctgggcaccatcgaaatcctgctggcttacctcttcccagccatggccatcttcaaggcagaagatgccagtggggaggcagcagccatgctgaacaacatgcgtgtttacggcacctgtgtgctcacctgcatggccactgtggtgtttgtgggtgtcaagtatgtcaacaagtttgcccttgtcttcctgggttgtgtcatcctctccatcctggccatctatgctggggtcatcaagtctgccttcgacccacccaacttcccgatctgcctcctgggtaaccgcacgctgtctcgccatggctttgatgtctgtgccaagctggcttgggaaggaaatgagacggtgaccacacggctatggggccttttctgctcctctcgcttcctcaacgccacctgtgatgaatacttcacccgaaacaatgtcacagagatccagggcatccctggtgctgccagtggcctcatcaaagagaacctctggagctcctacctgaccaagggcgtgattgtggagaggagtgggatgacctcggtgggcctggccgatggcactcctatcgacatggaccacccttatgtcttcagtgatatgacctcctacttcaccctgctggttggcatctacttcccctcagtcacagggatcatggctggttctaaccgctctggggacctgagggatgcccagaagtcaatccccactggcaccatcctggccatcgccaccacctctgctgtctacatcagctccgttgttctgtttggggcctgcattgagggggtcgtcctgcgggacaagtttggcgaagctgtgaatggcaacctcgtggtgggcactctggcctggccatctccatgggtaattgtcatcggatccttcttctccacctgtggggctgggctgcagagcctcacgggggccccacgcctgctgcaggccatctcgagggatggcattgtgcccttcctgcaggtctttggccatggcaaggccaatggagagccgacctgggccctgctcctgactgcctgcatctgcgagattggcatcctcattgcatccctcgacgaggtggcccccatcctctctatgttcttcctgatgtgctacatgtttgtgaatctggcctgtgcagtgcagacgctgctgaggacacccaactggaggccacgctttcgatattaccactggaccctctccttcctgggcatgagcctctgcctggccctcatgttcatctgctcctggtattatgcactggtagccatgctcattgctggactcatctacaagtacattgagtaccgtggggcagagaaggagtggggcgatgggatacgaggtctgtctctcagtgcggctcgctatgccctcttacgcctggaggaagggcccccacacaccaagaactggaggccacagctgctggtgctggtgcgtgtggaccaagaccagaatgtggtgcacccccagctgctctcactgacctcccagctgaaggcggggaagggcctgaccatcgtgggctctgtccttgagggcacctttctggaaaatcatccacaggcccagcgggcagaagagtctatcaggcgcctgatggaggcagagaaggtgaagggcttctgccaggtggtgatctcctccaacttgcgtgatggcgtgtcccatctgatccagtccgggggcctcggggggctgcagcacaacactgtgcttgttggctggccccgcaactggcgccagaaggaagatcatcagacgtggaggaacttcattgagctggtccgggaaaccacagctggccacttagccctgctggtcaccaagaacgtttccatgtttcctgggaaccctgagcgcttctctgagggcagcatcgacgtttggtggattgtgcacgatggaggcatgctcatgctgctgcccttcctgctgcggcaccacaaggtctggcggaagtgcaagatgcgtatcttcactgtggcccagatggatgacaatagcatccagatgaagaaggatctgaccacatttctgtatcatttacgcatcactgcggaggtcgaggtggtggagatgcatgagagcgacatctcagcttacacctatgagaagacgttggtgatggagcagcgttcccagatcctcaaacagatgcatttaaccaagaatgagcgggagcgggagatccagagtatcacagatgagtcacgaggctcaatccggagaaagaatccagccaacacgcggctccgcctgaacgtcccagaagagacggctggtgacagtgaagagaagccagaggaggaggtgcagctgatccacgatcagagtgctcccagctgccccagcagctccccgtccccaggggaggagcctgagggggaaggggagacagatccggagaaggtgcatctcacctggaccaaggacaagtcggtggcagagaagaataagggccccagtcctgtctcctctgagggcatcaaggacttcttcagcatgaagccggagtgggagaacttgaaccagtccaacgtgcggcgcatgcacacggccgtgcggctgaacgaggtcatcgtgaagaaatcccgggacgccaagcttgttttgctcaacatgcctgggcctccccgcaaccgcaatggtgatgaaaactacatggagtttctcgaggtcctcacagagcacctggaccgggtgatgctggtccgcggcggcggccgcgaggtcatcaccatctactcctgagaaccaggacctgccacccgggcccgagcgcgcccggcccgcggctccggagccctcgccgcgccccccgccgctgtcaccgtttacatacagaccctgtgcccgtgtcctggccccttaccccgctgcctgaagcccggaggccacgcctgttggggctgattcggagagggcgccccgccgcgcagagaccagagctcctcagtgccagtttggcccctgggtcttcgctgccctttttctaagcccggcctcgtctcgccggaggagacgctgcaataaaggttgggagaaggcgcggaaaggagaggagctggggccttggggacccccaggtagtccatgcggcccattcctccccttcccactcccgccgcggtcctcgctctgcgctcctccggcgctgctccctggctcccggcggcccggaggcccgcggggtgggaaggccgcgcttgccgtctccgccgccccttctcgccgagccgtggggcgcgggcggccgagcctatacatagtgtacaggagacatcgcgtgtatttttaacgtccccatatttatgtgactagaagcgcaacagacttctcgccatagtcgagctctcccgctgggggcactgcggggaggcgaggcctcgggaagctgaattttccttgacgtccaagagtttgagagcgaaagtgctttaggcccaggcgggggtcgtggcctcgttccctcgacacctccgtcctgctctcgcctcttcgccctttccgcgcgcccttggcttcccaccctcctctccagtccttttccgagatgaggtgagacaagggtccaacttttcctggattcgcctcccagcggacgtgagcttccactgcggctgcagagacgcgagcaacctcttctcatcggctcttatgcaagttggggccaggataggggaggggtgctcctcaagaggaagaaaccgagaggcccgcgccccaccgaggaagccccgccccggtgccttcgctggggagcaggcgtctctcctcagtcggcttgtcgcctgctccccgtatcccatggctcctcgccaaagactgaaattgtggagctggagggcgccccctccccggagtttcctccctgggacaagtgagggaggagggggccgattctggtttaggggccggacccactgagaggccccagagccgcccgtgatgttcctcccccgtccccatctggcagctcctgtctcgcctgagggacccagccgccttctccgtgctctggggccgggcctcgctgcttagcagcggcctctagctccgtctcccggggacctgggcctgagggagggctggagtcgcacgcgctttgtccttagcgcctgtctgctctcctctaactaggacccagggcctttggcttccccagctcatccttggcccttccgctccaccagcctggtctgaggcgtgctctgtccttagagaaggcgcggtggccgggttcccttcccctagggcacattactaagggggtcaggcactgcatgctcgttccagcaccatctgggactgggtacagtacctccagccccagggccctgacctgcgcacctagcttgacatctcacgcacctcccagagctggcgccactgagtaatccggacctcaccacctcttttcctttgagcccaaggcagagctggagctggcgccacccagacagcgtcaggtgtggctggggtaggtttggaggtctgccagttacaccaagtcccctctgagattcgatcaggggactggatagattctttcaggtactcaatcaggaagctggaggtgttagacaccagccccctgcatccttcagtagacctccctctgaacaccacagccaggtcctgccttctgggggcctgaatattccagagctgatgtgatgggctgtgcagaagggggctgtatcaacatcaattagggaaccaaagttgcactatctgggcccagattgtctggttggcaagagcaaagtttccgttgatgaaacagacatcccacaacaaaaacccaagttttctgtgctacatgtgcaatatttgttatgaatgttatcacaagtcattcatcaagttatctttataatcactgtagttagatgtttcatgtccattcaagtgacttttattctgagtgcaatatttcaatagccttgtagtgataactagtgttgcttttgttttagatgatctatgtgcagggcaatgcaatgaagttgaaaacccttgtaaataggagaggttgcaaaccaaatcaagagtatttattactattactgctattattattaggcctgcctttaattttcagtgtaagtgttcagtatgccgcatcctgcctcagtattgatcttgtgttctttgtgccaatatgaaaaggagagggttggttctttcctttattgttgaatgctcccatttaatgctttatggcttttactgtgttacttttttagactcccgtctgcacaaaatgcaataaaaataattttattataccctt

SEQ ID NO: 49752 - DNA, 3420 bp, Artificial Sequence
  derived and/or modified sequence
atgagcagaagattcaccgtgaccagcctgccccccgccggccccgccagaagccccgaccccgagagcagaagacacagcgtggccgaccccagacacctgcccggcgaggacgtgaagggcgacggcaaccccaaggagagcagccccttcatcaacagcaccgacaccgagaagggcaaggagtacgacggcaagaacatggccctgttcgaggaggagatggacaccagccccatggtgagcagcctgctgagcggcctggccaactacaccaacctgccccagggcagcagagagcacgaggaggccgagaacaacgagggcggcaagaagaagcccgtgcaggcccccagaatgggcaccttcatgggcgtgtacctgccctgcctgcagaacatcttcggcgtgatcctgttcctgagactgacctgggtggtgggcatcgccggcatcatggagagcttctgcatggtgttcatctgctgcagctgcaccatgctgaccgccatcagcatgagcgccatcgccaccaacggcgtggtgcccgccggcggcagctactacatgatcagcagaagcctgggccccgagttcggcggcgccgtgggcctgtgcttctacctgggcaccaccttcgccggcgccatgtacatcctgggcaccatcgagatcctgctggcctacctgttccccgccatggccatcttcaaggccgaggacgccagcggcgaggccgccgccatgctgaacaacatgagagtgtacggcacctgcgtgctgacctgcatggccaccgtggtgttcgtgggcgtgaagtacgtgaacaagttcgccctggtgttcctgggctgcgtgatcctgagcatcctggccatctacgccggcgtgatcaagagcgccttcgacccccccaacttccccatctgcctgctgggcaacagaaccctgagcagacacggcttcgacgtgtgcgccaagctggcctgggagggcaacgagaccgtgaccaccagactgtggggcctgttctgcagcagcagattcctgaacgccacctgcgacgagtacttcaccagaaacaacgtgaccgagatccagggcatccccggcgccgccagcggcctgatcaaggagaacctgtggagcagctacctgaccaagggcgtgatcgtggagagaagcggcatgaccagcgtgggcctggccgacggcacccccatcgacatggaccacccctacgtgttcagcgacatgaccagctacttcaccctgctggtgggcatctacttccccagcgtgaccggcatcatggccggcagcaacagaagcggcgacctgagagacgcccagaagagcatccccaccggcaccatcctggccatcgccaccaccagcgccgtgtacatcagcagcgtggtgctgttcggcgcctgcatcgagggcgtggtgctgagagacaagttcggcgaggccgtgaacggcaacctggtggtgggcaccctggcctggcccagcccctgggtgatcgtgatcggcagcttcttcagcacctgcggcgccggcctgcagagcctgaccggcgcccccagactgctgcaggccatcagcagagacggcatcgtgcccttcctgcaggtgttcggccacggcaaggccaacggcgagcccacctgggccctgctgctgaccgcctgcatctgcgagatcggcatcctgatcgccagcctggacgaggtggcccccatcctgagcatgttcttcctgatgtgctacatgttcgtgaacctggcctgcgccgtgcagaccctgctgagaacccccaactggagacccagattcagatactaccactggaccctgagcttcctgggcatgagcctgtgcctggccctgatgttcatctgcagctggtactacgccctggtggccatgctgatcgccggcctgatctacaagtacatcgagtacagaggcgccgagaaggagtggggcgacggcatcagaggcctgagcctgagcgccgccagatacgccctgctgagactggaggagggccccccccacaccaagaactggagaccccagctgctggtgctggtgagagtggaccaggaccagaacgtggtgcacccccagctgctgagcctgaccagccagctgaaggccggcaagggcctgaccatcgtgggcagcgtgctggagggcaccttcctggagaaccacccccaggcccagagagccgaggagagcatcagaagactgatggaggccgagaaggtgaagggcttctgccaggtggtgatcagcagcaacctgagagacggcgtgagccacctgatccagagcggcggcctgggcggcctgcagcacaacaccgtgctggtgggctggcccagaaactggagacagaaggaggaccaccagacctggagaaacttcatcgagctggtgagagagaccaccgccggccacctggccctgctggtgaccaagaacgtgagcatgttccccggcaaccccgagagattcagcgagggcagcatcgacgtgtggtggatcgtgcacgacggcggcatgctgatgctgctgcccttcctgctgagacaccacaaggtgtggagaaagtgcaagatgagaatcttcaccgtggcccagatggacgacaacagcatccagatgaagaaggacctgaccaccttcctgtaccacctgagaatcaccgccgaggtggaggtggtggagatgcacgagagcgacatcagcgcctacacctacgagaagaccctggtgatggagcagagaagccagatcctgaagcagatgcacctgaccaagaacgagagagagagagagatccagagcatcaccgacgagagcagaggcagcatcagaagaaagaaccccgccaacaccagactgagactgaacgtgcccgaggagaccgccggcgacagcgaggagaagcccgaggaggaggtgcagctgatccacgaccagagcgcccccagctgccccagcagcagccccagccccggcgaggagcccgagggcgagggcgagaccgaccccgagaaggtgcacctgacctggaccaaggacaagagcgtggccgagaagaacaagggccccagccccgtgagcagcgagggcatcaaggacttcttcagcatgaagcccgagtgggagaacctgaaccagagcaacgtgagaagaatgcacaccgccgtgagactgaacgaggtgatcgtgaagaagagcagagacgccaagctggtgctgctgaacatgcccggcccccccagaaacagaaacggcgacgagaactacatggagttcctggaggtgctgaccgagcacctggacagagtgatgctggtgagaggcggcggcagagaggtgatcaccatctacagctag

SEQ ID NO: 49753 - protein, 321 aa, Artificial Sequence
  derived and/or modified sequence
MATRRLTDAFLLLRNNSIQNRQLLAEQVSSHITSSPLHSRSIAALADDRMALVSGISLDPEAAIGVTKRPPPKWVDGVDEIQYDVGRIKQKMKELASLHDKHLNRPTLDDSSEEEHAIEITTQEITQLFHRCQRAVQALPSRARACSEQEGRLLGNVVASLAQALQELSTSFRHAQSGYLKRMKNREERSQHFFDTSVPLMDDGDDNTLYHRGFTEDQLVLVEQNTLMVEEREREIRQIVQSISDLNEIFRDLGAMIVEQGTVLDRIDYNVEQSCIKTEDGLKQLHKAEQYQKKNRKMLVILILFVIIIVLIVVLVGVKSR

SEQ ID NO: 49754 - protein, 251 aa, Artificial Sequence
  derived and/or modified sequence
MALVSGISLDPEAAIGVTKRPPPKWVDGVDEIQYDVGRIKQKMKELASLHDKHLNRPTLDDSSEEEHAIEITTQEITQLFHRCQRAVQALPSRARACSEQEGRLLGNVVASLAQALQELSTSFRHAQSGYLKRMKNREERSQHFFDTSVPLMDDGDDNTLYHRGFTEDQLVLVEQNTLMVEEREREIRQIVQSISDLNEIFRDLGAMIVEQGTVLDRIDYNVEQSCIKTEDGLKQLHKAEQYQKKNRKMLV

SEQ ID NO: 49755 - protein, 272 aa, Artificial Sequence
  derived and/or modified sequence
MALVSGISLDPEAAIGVTKRPPPKWVDGVDEIQYDVGRIKQKMKELASLHDKHLNRPTLDDSSEEEHAIEITTQEITQLFHRCQRAVQALPSRARACSEQEGRLLGNVVASLAQALQELSTSFRHAQSGYLKRMKNREERSQHFFDTSVPLMDDGDDNTLYHRGFTEDQLVLVEQNTLMVEEREREIRQIVQSISDLNEIFRDLGAMIVEQGTVLDRIDYNVEQSCIKTEDGLKQLHKAEQYQKKNRKMLVILILFVIIIVLIVVLVGVKSR

SEQ ID NO: 49756 - protein, 122 aa, Artificial Sequence
  derived and/or modified sequence
MALVSGISLDPEAAIGVTKRPPPKWVDGVDEIQYDVGRIKQKMKELASLHDKHLNRPTLDDSSEEEHAIEITTQEITQLFHRCQRAVQALPSRARACSEQEGRLLGNVVASLAQALQELSTS

SEQ ID NO: 49757 - DNA, 966 bp, Artificial Sequence
  derived and/or modified sequence
atggccaccagaagactgaccgacgccttcctgctgctgagaaacaacagcatccagaacagacagctgctggccgagcaggtgagcagccacatcaccagcagccccctgcacagcagaagcatcgccgccctggccgacgacagaatggccctggtgagcggcatcagcctggaccccgaggccgccatcggcgtgaccaagagacccccccccaagtgggtggacggcgtggacgagatccagtacgacgtgggcagaatcaagcagaagatgaaggagctggccagcctgcacgacaagcacctgaacagacccaccctggacgacagcagcgaggaggagcacgccatcgagatcaccacccaggagatcacccagctgttccacagatgccagagagccgtgcaggccctgcccagcagagccagagcctgcagcgagcaggagggcagactgctgggcaacgtggtggccagcctggcccaggccctgcaggagctgagcaccagcttcagacacgcccagagcggctacctgaagagaatgaagaacagagaggagagaagccagcacttcttcgacaccagcgtgcccctgatggacgacggcgacgacaacaccctgtaccacagaggcttcaccgaggaccagctggtgctggtggagcagaacaccctgatggtggaggagagagagagagagatcagacagatcgtgcagagcatcagcgacctgaacgagatcttcagagacctgggcgccatgatcgtggagcagggcaccgtgctggacagaatcgactacaacgtggagcagagctgcatcaagaccgaggacggcctgaagcagctgcacaaggccgagcagtaccagaagaagaacagaaagatgctggtgatcctgatcctgttcgtgatcatcatcgtgctgatcgtggtgctggtgggcgtgaagagcagatag

SEQ ID NO: 49758 - DNA, 966 bp, Artificial Sequence
  derived and/or modified sequence
atggccactcgccgtcttaccgatgcattcctattgcttcgcaataactctatccaaaaccggcagctattagctgaacaggtcagtagccacatcacctcaagcccacttcactcgcgatctatcgccgcactcgctgacgatcgtatggccctcgtgtcggggattagtctcgatccggaggcagcaataggggtcacaaagcgaccgccaccaaaatgggtggacggcgtagatgagattcagtatgatgtggggaggatcaaacaaaagatgaaagagctggcttcactacacgataaacacctcaaccgacccacactagacgattcctcagaggaggaacatgccatcgagattacaacacaggagattacccagctgtttcacaggtgtcagcgggctgtgcaggccctcccatcgagggccagagcttgtagtgagcaggagggccggctgctgggaaatgtagtggcctccctggcacaggcactccaggagctgagcacctcctttaggcatgcgcagtcaggctacctgaagcggatgaaaaatcgcgaagagcggtctcagcacttttttgatacctcagtccccctgatggacgacggcgacgataacaccttgtaccacaggggctttactgaggaccaactggtgctggtggaacagaacacactcatggtggaagaacgagagagagaaattaggcagattgtccaatctatctccgacttaaacgagattttcagagatttaggggccatgatagtggagcaggggacagtcttagacaggatagactacaacgtcgaacaatcctgcattaagacggaagacggcctgaagcagctgcataaagccgagcagtatcagaaaaagaacagaaagatgctggtgatcctgatcttgtttgtcataattattgtgctaatcgtggtcctggtgggagtgaaatctaggtag

SEQ ID NO: 49759 - DNA, 966 bp, Artificial Sequence
  derived and/or modified sequence
atggccacccggcggctgacagatgccttcctgctgctgaggaacaacagcatccagaaccggcagctgctggccgagcaggtgagcagccacatcaccagcagccccctgcacagccgcagcattgctgccctggctgatgacaggatggccctggtgtctggcatcagcctggaccctgaggccgccatcggcgtgaccaagaggcccccacccaagtgggtggatggagtggatgagatccagtatgatgtgggccgcatcaagcagaagatgaaggagctggccagcctgcatgacaagcacctgaaccggcccaccctggatgacagcagcgaggaggagcacgccatcgagatcaccacccaggagatcacccagctgttccaccgctgccagagagctgtgcaggccctgcccagccgggcccgggcctgcagcgagcaggagggccgcctgctgggcaatgtggtggccagcctggcccaggccctgcaggagctgagcaccagcttcagacatgcccagagcggctacctgaagaggatgaagaaccgggaggagaggagccagcacttctttgacacctctgtgcccctgatggatgatggagatgacaacaccctgtaccaccggggcttcacagaggaccagctggtgctggtggagcagaacaccctgatggtggaggagcgggagcgggagatccggcagatcgtgcagagcatcagtgacctgaatgagatcttccgggacctgggcgccatgattgtggagcagggcaccgtgctggacagaattgactacaacgtggagcagagctgcatcaagacagaagatggcctgaagcagctgcacaaggccgagcagtaccagaagaagaacaggaagatgctggtgatcctgatcctgtttgtgatcatcatcgtgctgattgtggtgctggtgggcgtgaagagcaggtag

SEQ ID NO: 49760 - DNA, 966 bp, Artificial Sequence
  derived and/or modified sequence
atggccacccggcggctgaccgacgccttcctgctgctgcggaacaacagtatccagaacagacagctgttggccgaacaagtcagctctcacatcacctcttccccactgcattcccggagtatcgcagcattggccgacgacaggatggcactagtatccggaatctcacttgatcccgaggccgctataggtgtaacaaaaagaccacccccgaagtgggtggatggcgtcgacgagattcagtacgacgtgggaaggatcaaacagaagatgaaggaactggcatctctgcacgacaagcacttaaatcgaccaaccctggacgactcgtccgaggaggaacatgctattgaaatcactactcaggaaataacccagctattccaccggtgccaaagagcagttcaggctctaccctctagggctcgagcttgttctgaacaggaaggcaggttgctcggcaacgtcgtagcttcacttgcccaggcgctccaggagttaagcaccagtttccgacatgctcagtcaggttatctcaaaaggatgaaaaaccgagaagaacgttcgcagcactttttcgacaccagtgtgcccctgatggacgacggggatgacaataccctgtaccatcgaggattcactgaggaccagttggtactggtcgagcagaacaccctcatggtcgaagaacgcgagcgggaaataagacaaatagtacagtcgattagtgacctaaacgagattttcagggacctcggtgcaatgattgttgagcagggaaccgtcctcgacaggatcgattacaatgtggagcagagttgcattaagaccgaagatggccttaaacaactgcacaaagccgaacagtatcagaaaaaaaacagaaaaatgctggtaatccttattttgttcgttattattatcgtgctcattgtggtgctcgtcggcgtgaaaagtcggtag

SEQ ID NO: 49761 - DNA, 966 bp, Artificial Sequence
  derived and/or modified sequence
atggcaaccaggcgcctcactgatgcatttctgttgctgcggaataacagcatccagaacaggcagctgcttgccgagcaggtgtcttctcatattacttcctcccccttacactctcgttcaatagctgctttagccgatgaccgcatggcactcgtttccggcatctccctggacccagaggctgccattggcgttaccaagcgtccaccccctaaatgggtggacggcgtcgacgaaatccaatacgacgtcggcaggatcaagcaaaaaatgaaggaactggcatcgctacatgacaagcatctcaatagaccgaccctggacgactctagcgaggaggaacatgctatagagatcacaacacaggaaatcacccagcttttccatagatgccaaagagctgtacaggctcttccctcaagggcacgcgcatgcagcgagcaggaagggaggctacttgggaatgtagtggcttcacttgcacaggcactgcaggagctgtctacctcttttcggcatgcccagtccggctatctgaagagaatgaagaatcgcgaagaaagatcgcagcacttctttgataccagtgtgcctctaatggatgacggtgatgataacactctctaccatcgcggattcacagaagaccagctcgtcttggtggagcagaacacactgatggtcgaagaacgagagagggaaataagacagatagtacagagcatcagtgatttgaacgagatctttagagatctgggtgccatgattgttgaacagggtactgtgctggacaggatagattacaacgttgaacaaagttgtattaagactgaggatggattaaagcagctgcataaggcagaacagtatcaaaagaagaatcggaagatgcttgttattctgatcctgtttgtgatcatcattgtgttgattgtcgtgttagttggcgtcaagagccgctag

SEQ ID NO: 49762 - DNA, 4329 bp, Artificial Sequence
  derived and/or modified sequence
aggcctgaggccttgtcgagaagcttccgtgaaagggtgggccagccgggccacgagaaagaaagtgaataaatcaggaatataagtgggcggggggcccctgagaggggggtcgcaaagggtgagacatggccaccaggcgtttaaccgacgctttcttgttgttgcggaataattccatccaaaaccggcagctgttagccgagcaagtgagtagtcacatcacctccagccctctgcattcacgtagcattgctgcgcttgctgatgaccgtatggcactggtgtcaggcatcagcttagatccagaagcagcgattggtgtgacaaaacggccacctcctaagtgggtggatggagtggatgaaattcagtatgatgttggccggattaagcagaagatgaaagaattggccagccttcatgacaagcatttaaacagacccaccctggatgacagcagcgaagaggaacatgccattgagataactacccaagagatcactcagctcttccacaggtgccagcgtgccgtgcaggccctgccgagccgggcccgggcctgctccgagcaggaggggcggctgcttgggaacgtggtggcctcgctggcgcaggccctgcaggaactctccaccagcttccggcacgcacagtcaggctacctcaaacgcatgaagaatcgagaggaaagatcccagcattttttcgacacatcagtaccactaatggatgatggagacgataacactctttaccatcggggttttacagaggaccagttagttctggtggagcagaacacactgatggtggaagagcgggaacgagagattcgccagattgtacagtccatttctgacctgaatgaaatattcagggacttaggggcgatgattgtagaacagggtacagtccttgacagaattgactataacgttgaacagtcctgtatcaaaactgaagatggtttgaaacagcttcacaaggcagaacagtatcaaaagaagaatcggaagatgcttgtgattttaatattatttgtcatcatcattgtgctcattgttgtcctcgttggcgtgaagtctcgataagtggcattgggttttcgtgtgtgccgcgcgtgtggatctcccgggtgtgaggggcttggcctgcgccccgccagctgcccgcagaggtgcagcctcgaggaatctgagggcgtcggggcagcgaacctttgcatccacggactcctccttccctagtcctgctcaagcggtccggggaatgggtttttgtttttccttcattgttgagaatttaaggacctttgatactgctgcacaatagagattgagttctgggatcagttataatatatattttttttagaaagagaaaatgagctgagagtttacaggcactgcagaagctgttcagtattatatgtgtatatgctatttttttagcagccatgtctgagcagaatgttaacataatttttggaaaaattttctttaaaccatctggtttttaagaaatttggtaccaaaaattgatgagtagaggcaaaaatgccccttcatctttctctatatattttccagttgaaaacaaactaagaagtcctttaagaatttataatccgttccccattaacttaatttagcttttccatcactgttaatgatcagagtaacaaagtgtgaaaaataagaaaccatcattgatgttaattaacacatttagatgggccagttaaaacagcttcataagttttaaattaattgtaaatggaatattcctcatttaaaatttttgcactgcattttctactgtaaaccaaaagaggttactaagcaaaaccacctaaatttaagttggtgatttaaatgaatctcacattaaaagaaagcttgacagtgttatgaaagccaccagactcagccagtgtgtccccatgggtatccccagccatccttgctcaatccattacttatatactaactacataatgacctgttcaaaccagactctatttaatgaactgtgaatttacacagaggccattttaaatgggtcaccccatttaggattagtggatctcaaattattaaccaaacatcactccatttcaaagtaaaatattccaccagcgatttgatttattggctcttccattgccactgagcaatgcccaggaagcaggcacattgccaaggactgggggcatcttgactaggaagctcctcgtttgtgtgagcgtgggtcagaccgccaaagtaggacttcatcgtttacctacctattatcaatatggtgcttgaatatattcctataactgtagaacagtgtggaaagtgatggtaactttgaagttgttcatgttttattggctttgttttaattgacactagtagagttttaatggtctttgtgtaaattttaatggcttttccattgtttttgcttctcttaaaaagtttaagaagaatatgacctcattaaatgtgctgttttatttggaccagtcacacaaaatgtctctctagagttgactttaaagttgtttacagaaatttaaactcaattccagagattgaagttgtccaaacagctcatgggcttagtgtccaaacccctgcccagccttccctttccaagttggtgccacctccaggtagccattggtggttttcctattactgatgtggctgtggaatgataaggtcctagaggggccctggcatttcaggaagcggacctggtattccctgacaaacattgcttaggaaagagggccggagaataagaagccagcacctcatcagtcagccctgcaatgtgagacttccgtagctgttgagagtcactgcaggtgttctttcatcccatctgattttaacccatggttgagacgttccaagttagatctgctgctcttaggtgtggggctgtccacattagggaacttgcctcaaaaacagtccacagtggcaataccggacttctgttcaagctttttaaagtgctgagccttacaaacccctgaaggaaagtgaccctttaagagaggatcatctttttttatatttattttcaccaaatagggtgatgagggttggtttttgttccctcaacccatttgggtaaaataacggatctgattagaaactgttttaaggaggggctgggctcggtggctcacgcctgtaatcccagactttgagaggccaaggcggtcacgaggtcaggagttcgagaccagcctagccaacatggtgaaaccccgtctctacaaaaaatacaaaaattagccgggtgggacacgcctgtaatcccagctactcaagaggctgaggcaggagaatagcttgaacccgggaggcagaggttgcagtgagccgagatcacaccactgcactccagcctgggtgacagagcgaggctccgtctcaaaaaaaaaaaaaaaaaattgttttagcgctgggtttcccaaggtgggagagacagacccagcctggagctggcccctggcctgtgtgctgacttcttggggtcctcaaaccactgtatttttctgttgagcctgtacttggggagagatcagtagcatttgaggaagtaagagaaaagaatcatggtacctcagggtttctttccctttactcgctggcagccattgtctgtgggcacctcatgtttttccacactctactgggccgtggaggtaacgatcacccaggccagtctcctctgcctgggatgcgccctctgagaggaggcctagcagggcaggctccctctgggcatccctggatgcagcctctggacacatgcctcctttaaagtgtccgggtgcagctcaggttgagtggaggtagaaggagaaacagacatgtttaccacgcgttttccaaagctcctgatctttcccaagattgtaactgaaaactgctgtctcttgttttgttcgttttgggggtggtggtgctggctgggccatgcttgtgaagtgatgtgtgtctctgatttaacggattcactgttttctctgctaattgagagagcgttatttacattatttatttgttttgacacaagtgctttcagtgttttatcctagctaatggcttcttaaaggtaataaaacccttccaacgtaattggtcagataaaactttttttcttgtatgcttaaataaagcaattagtgaagcacttctatccaaaatgacttttttgtccttttttaaaaccaatttactgttactggaaactttttgtacaataaagcaatcacgcagattaaagaacatcctgcaatcctagtattaattttaa

SEQ ID NO: 49763 - DNA, 1577 bp, Artificial Sequence
  derived and/or modified sequence
agatccggggatggagggagccggagaagaggagtgagaaggccggggaggcaggccctgctgtcttcctgcaggccggcagcctgctggcagtggaggaccaggccgtccaggaaaggaaggggtcaggaggtcgggcagggcctcagcaggttcagacaagtccccagaagggagctgcaggcgccctcgagtccaggccccaagcctggctccggttgtccaaagagggcctaggccaggcctctggtgcggaaactgagtcacagccagacctcagggcacggcctagacgcttacgagccaaagttaggggtagagagcagagacctccggggggtctcagggagtagggggcttcagggcctcccagtctagagccggattggcgagttagacgctttcttgttgttgcggaataattccatccaaaaccggcagctgttagccgagcaagtgagtagtcacatcacctccagccctctgcattcacgtagcattgctgcgcttgctgatgaccgtatggcactggtgtcaggcatcagcttagatccagaagcagcgattggtgtgacaaaacggccacctcctaagtgggtggatggagtggatgaaattcagtatgatgttggccggattaagcagaagatgaaagaattggccagccttcatgacaagcatttaaacagacccaccctggatgacagcagcgaagaggaacatgccattgagataactacccaagagatcactcagctcttccacaggtgccagcgtgccgtgcaggccctgccgagccgggcccgggcctgctccgagcaggaggggcggctgcttgggaacgtggtggcctcgctggcgcaggccctgcaggaactctccaccagcttccggcacgcacagtcaggctacctcaaacgcatgaagaatcgagaggaaagatcccagcattttttcgacacatcagtaccactaatggatgatggagacgataacactctttaccatcggggttttacagaggaccagttagttctggtggagcagaacacactgatggtggaagagcgggaacgagagattcgccagattgtacagtccatttctgacctgaatgaaatattcagggacttaggggcgatgattgtagaacagggtacagtccttgacagaattgactataacgttgaacagtcctgtatcaaaactgaagatggtttgaaacagcttcacaaggcagaacagtatcaaaagaagaatcggaagatgcttgtgattttaatattatttgtcatcatcattgtgctcattgttgtcctcgttggcgtgaagtctcgataagtggcattgggttttcgtgtgtgccgcgcgtgtggatctcccgggtgtgaggggcttggcctgcgccccgccagctgcccgcagaggtgcagcctcgaggaatctgagggcgtcggggcagcgaacctttgcatccacggactcctccttccctagtcctgctcaagcggtccggggaatgggtttttgtttttccttcattgttgagaatttaaggacctttgatactgctgcac

SEQ ID NO: 49764 - protein, 308 aa, Artificial Sequence
  derived and/or modified sequence
MATRRLTDAFLLLRNNSIQNRQLLAEQELDELADDRMALVSGISLDPEAAIGVTKRPPPKWVDGVDEIQYDVGRIKQKMKELASLHDKHLNRPTLDDSSEEEHAIEITTQEITQLFHRCQRAVQALPSRARACSEQEGRLLGNVVASLAQALQELSTSFRHAQSGYLKRMKNREERSQHFFDTSVPLMDDGDDNTLYHRGFTEDQLVLVEQNTLMVEEREREIRQIVQSISDLNEIFRDLGAMIVEQGTVLDRIDYNVEQSCIKTEDGLKQLHKAEQYQKKNRKMLVILILFVIIIVLIVVLVGVKSR

SEQ ID NO: 49765 - protein, 308 aa, Artificial Sequence
  derived and/or modified sequence
MATRRLTDAFLLLRNNSIQNRQLLAEQQLSKLADDRMALVSGISLDPEAAIGVTKRPPPKWVDGVDEIQYDVGRIKQKMKELASLHDKHLNRPTLDDSSEEEHAIEITTQEITQLFHRCQRAVQALPSRARACSEQEGRLLGNVVASLAQALQELSTSFRHAQSGYLKRMKNREERSQHFFDTSVPLMDDGDDNTLYHRGFTEDQLVLVEQNTLMVEEREREIRQIVQSISDLNEIFRDLGAMIVEQGTVLDRIDYNVEQSCIKTEDGLKQLHKAEQYQKKNRKMLVILILFVIIIVLIVVLVGVKSR

SEQ ID NO: 49766 - protein, 121 aa, Artificial Sequence
  derived and/or modified sequence
MALVSGISLDPEAAIGVTKRPPPKWVDGVDEIQYDVGRIKQKMKELASLHDKHLNRPTLDDSSEEEHAIEITTQEITQLFHRCQRAVQALPSRARACSEQEGRLLGNVVASLAQALQELST

SEQ ID NO: 49767 - protein, 202 aa, Artificial Sequence
  derived and/or modified sequence
MATRRLTDAFLLLRNNSIQNRQLLAEQELDELADDRMALVSGISLDPEAAIGVTKRPPPKWVDGVDEIQYDVGRIKQKMKELASLHDKHLNRPTLDDSSEEEHAIEITTQEITQLFHRCQRAVQALPSRARACSEQEGRLLGNVVASLAQALQELSTSFRHAQSGYLKRMKNREERSQHFFDTSVPLMDDGDDNTLYHRRTS

SEQ ID NO: 49768 - DNA, 927 bp, Artificial Sequence
  derived and/or modified sequence
atggccaccagaagactgaccgacgccttcctgctgctgagaaacaacagcatccagaacagacagctgctggccgagcaggagctggacgagctggccgacgacagaatggccctggtgagcggcatcagcctggaccccgaggccgccatcggcgtgaccaagagacccccccccaagtgggtggacggcgtggacgagatccagtacgacgtgggcagaatcaagcagaagatgaaggagctggccagcctgcacgacaagcacctgaacagacccaccctggacgacagcagcgaggaggagcacgccatcgagatcaccacccaggagatcacccagctgttccacagatgccagagagccgtgcaggccctgcccagcagagccagagcctgcagcgagcaggagggcagactgctgggcaacgtggtggccagcctggcccaggccctgcaggagctgagcaccagcttcagacacgcccagagcggctacctgaagagaatgaagaacagagaggagagaagccagcacttcttcgacaccagcgtgcccctgatggacgacggcgacgacaacaccctgtaccacagaggcttcaccgaggaccagctggtgctggtggagcagaacaccctgatggtggaggagagagagagagagatcagacagatcgtgcagagcatcagcgacctgaacgagatcttcagagacctgggcgccatgatcgtggagcagggcaccgtgctggacagaatcgactacaacgtggagcagagctgcatcaagaccgaggacggcctgaagcagctgcacaaggccgagcagtaccagaagaagaacagaaagatgctggtgatcctgatcctgttcgtgatcatcatcgtgctgatcgtggtgctggtgggcgtgaagagcagatag

SEQ ID NO: 49769 - DNA, 927 bp, Artificial Sequence
  derived and/or modified sequence
atggccaccagaagactgaccgacgccttcctgctgctgagaaacaacagcatccagaacagacagctgctggccgagcagcagctgagcaagctggccgacgacagaatggccctggtgagcggcatcagcctggaccccgaggccgccatcggcgtgaccaagagacccccccccaagtgggtggacggcgtggacgagatccagtacgacgtgggcagaatcaagcagaagatgaaggagctggccagcctgcacgacaagcacctgaacagacccaccctggacgacagcagcgaggaggagcacgccatcgagatcaccacccaggagatcacccagctgttccacagatgccagagagccgtgcaggccctgcccagcagagccagagcctgcagcgagcaggagggcagactgctgggcaacgtggtggccagcctggcccaggccctgcaggagctgagcaccagcttcagacacgcccagagcggctacctgaagagaatgaagaacagagaggagagaagccagcacttcttcgacaccagcgtgcccctgatggacgacggcgacgacaacaccctgtaccacagaggcttcaccgaggaccagctggtgctggtggagcagaacaccctgatggtggaggagagagagagagagatcagacagatcgtgcagagcatcagcgacctgaacgagatcttcagagacctgggcgccatgatcgtggagcagggcaccgtgctggacagaatcgactacaacgtggagcagagctgcatcaagaccgaggacggcctgaagcagctgcacaaggccgagcagtaccagaagaagaacagaaagatgctggtgatcctgatcctgttcgtgatcatcatcgtgctgatcgtggtgctggtgggcgtgaagagcagatag

SEQ ID NO: 49770 - DNA, 609 bp, Artificial Sequence
  derived and/or modified sequence
atggccaccagaagactgaccgacgccttcctgctgctgagaaacaacagcatccagaacagacagctgctggccgagcaggagctggacgagctggccgacgacagaatggccctggtgagcggcatcagcctggaccccgaggccgccatcggcgtgaccaagagacccccccccaagtgggtggacggcgtggacgagatccagtacgacgtgggcagaatcaagcagaagatgaaggagctggccagcctgcacgacaagcacctgaacagacccaccctggacgacagcagcgaggaggagcacgccatcgagatcaccacccaggagatcacccagctgttccacagatgccagagagccgtgcaggccctgcccagcagagccagagcctgcagcgagcaggagggcagactgctgggcaacgtggtggccagcctggcccaggccctgcaggagctgagcaccagcttcagacacgcccagagcggctacctgaagagaatgaagaacagagaggagagaagccagcacttcttcgacaccagcgtgcccctgatggacgacggcgacgacaacaccctgtaccacagaagaaccagctag

SEQ ID NO: 49771 - DNA, 927 bp, Artificial Sequence
  derived and/or modified sequence
atggcgacccggcgtctaaccgatgcatttttgctgttaaggaataacagcatccagaacagacagctcctggctgaacaggagctcgacgagctggcagacgaccggatggcacttgtgagcggcatcagtctggaccccgaggctgctataggcgtgacaaagcggcctccacccaagtgggtggacggagtagacgaaatccagtatgatgtgggcaggatcaaacagaagatgaaggaactggcctccctccacgataaacatctcaatcgacccaccctggacgacagttctgaggaagaacatgcgatcgagataaccacccaggagattacacaactcttccacagatgccagagagctgttcaggcactccccagtcgagcgagagcctgtagcgaacaggaaggacgattgcttggcaacgtggttgctagcttggctcaggccctgcaagagctgtctacatcatttcgtcatgctcagagtggatatctgaaacggatgaaaaacagggaggagagatcccagcacttcttcgatacaagtgtgccactcatggatgatggggacgacaacaccctgtaccacagaggctttaccgaagaccagctggttctggtggagcagaacaccctgatggtagaggagagggagagggagattcgccaaatcgtgcagtccatctctgacctgaacgaaatcttcagggatctgggggcaatgatcgtagaacaggggaccgtgttggaccgcattgattacaatgtggaacagagttgtattaagacagaggatggcctgaagcagctgcataaggccgaacagtaccaaaagaagaatagaaaaatgcttgtgattctgatcctctttgtgattattattgtgctaatcgtcgtcttggtgggtgttaagtcacgttag

SEQ ID NO: 49772 - DNA, 927 bp, Artificial Sequence
  derived and/or modified sequence
atggctactcgccgtctgaccgatgcctttctcctgctgcgcaataattctattcagaataggcagctactagccgaacagcagctgtctaaactggctgacgacaggatggcactcgtttcaggaataagcttggatccagaagccgccatcggggtgaccaaaaggccccccccaaagtgggttgatggggtcgacgagattcagtacgatgttgggcgtatcaagcaaaaaatgaaggaactcgccagcctgcatgataaacacctcaaccgacctactctggatgatagcagcgaagaggagcacgctatcgaaattaccactcaggagataacccagctttttcatcgctgccagcgcgctgtccaggccttgccaagtcgagctcgagcatgctcggagcaggagggtcggcttcttggtaatgtcgtcgcctctctcgcccaggcattgcaggaattaagcacctcgttccgccatgctcaaagcggatatttaaaacgtatgaagaacagggaggagcgcagccagcattttttcgacacttctgtcccactaatggatgacggcgacgataacacattatatcatcgcggatttaccgaagaccaattagtgttagttgaacaaaacacattgatggtggaagaaagagagagagagattcgtcagatagtgcagagcatatctgatcttaatgagatcttcagggacctaggggccatgatcgtcgaacaagggacagtcctagatcgtattgattataatgtcgaacagtcatgcatcaagacagaagatggcctgaaacagctccataaggcggagcagtaccagaagaagaacagaaaaatgctagttatcctgatcctgtttgtcatcataatcgtgctgatagtggtcctggttggtgtcaagtctagatag

SEQ ID NO: 49773 - DNA, 609 bp, Artificial Sequence
  derived and/or modified sequence
atggcgacaagaaggctgactgacgcttttctgctgctgaggaataactccattcagaataggcagctgctggcggagcaagagctggatgagctcgccgacgatcgcatggccctcgtgagtggcatctctttagaccctgaagcagctatcggagttaccaaacgccctcctcccaagtgggtggacggagtcgatgaaatacagtacgatgtggggaggatcaagcagaagatgaaagagctggcatccctccatgacaagcacttgaatcggccgacgttagacgattctagcgaagaagagcatgctatcgaaatcactacacaagaaatcacacaactctttcataggtgtcaaagagcagtacaggccctgccttctagggcccgtgcctgtagcgagcaagaagggagacttcttggcaatgtcgtcgcctctttggcccaagcccttcaggaattgagcacaagtttccgccacgcacagtccggatatctgaaacgaatgaaaaacagagaggagcgttcacagcattttttcgatacttcagtcccgcttatggatgacggtgacgataacacactgtatcataggcgaaccagttag

SEQ ID NO: 49774 - DNA, 927 bp, Artificial Sequence
  derived and/or modified sequence
atggccacccggcggctgacagatgccttcctgctgctgaggaacaacagcatccagaaccggcagctgctggccgagcaggagctggatgagctggctgatgacaggatggccctggtgtctggcatcagcctggaccctgaggccgccatcggcgtgaccaagaggcccccacccaagtgggtggatggagtggatgagatccagtatgatgtgggccgcatcaagcagaagatgaaggagctggccagcctgcatgacaagcacctgaaccggcccaccctggatgacagcagcgaggaggagcacgccatcgagatcaccacccaggagatcacccagctgttccaccgctgccagagagctgtgcaggccctgcccagccgggcccgggcctgcagcgagcaggagggccgcctgctgggcaatgtggtggccagcctggcccaggccctgcaggagctgagcaccagcttcagacatgcccagagcggctacctgaagaggatgaagaaccgggaggagaggagccagcacttctttgacacctctgtgcccctgatggatgatggagatgacaacaccctgtaccaccggggcttcacagaggaccagctggtgctggtggagcagaacaccctgatggtggaggagcgggagcgggagatccggcagatcgtgcagagcatcagtgacctgaatgagatcttccgggacctgggcgccatgattgtggagcagggcaccgtgctggacagaattgactacaacgtggagcagagctgcatcaagacagaagatggcctgaagcagctgcacaaggccgagcagtaccagaagaagaacaggaagatgctggtgatcctgatcctcttcgtcatcatcatcgtgctgattgtggtgctggtgggcgtgaagagcaggtag

SEQ ID NO: 49775 - DNA, 927 bp, Artificial Sequence
  derived and/or modified sequence
atggccacccggcggctgacagatgccttcctgctgctgaggaacaacagcatccagaaccggcagctgctggccgagcagcagctgagcaagctggctgatgacaggatggccctggtgtctggcatcagcctggaccctgaggccgccatcggcgtgaccaagaggcccccacccaagtgggtggatggagtggatgagatccagtatgatgtgggccgcatcaagcagaagatgaaggagctggccagcctgcatgacaagcacctgaaccggcccaccctggatgacagcagcgaggaggagcacgccatcgagatcaccacccaggagatcacccagctgttccaccgctgccagagagctgtgcaggccctgcccagccgggcccgggcctgcagcgagcaggagggccgcctgctgggcaatgtggtggccagcctggcccaggccctgcaggagctgagcaccagcttcagacatgcccagagcggctacctgaagaggatgaagaaccgggaggagaggagccagcacttctttgacacctctgtgcccctgatggatgatggagatgacaacaccctgtaccaccggggcttcacagaggaccagctggtgctggtggagcagaacaccctgatggtggaggagcgggagcgggagatccggcagatcgtgcagagcatcagtgacctgaatgagatcttccgggacctgggcgccatgattgtggagcagggcaccgtgctggacagaattgactacaacgtggagcagagctgcatcaagacagaagatggcctgaagcagctgcacaaggccgagcagtaccagaagaagaacaggaagatgctggtgatcctgatcctcttcgtcatcatcatcgtgctgattgtggtgctggtgggcgtgaagagcaggtag

SEQ ID NO: 49776 - DNA, 609 bp, Artificial Sequence
  derived and/or modified sequence
atggccacccggcggctgacagatgccttcctgctgctgaggaacaacagcatccagaaccggcagctgctggccgagcaggagctggatgagctggctgatgacaggatggccctggtgtctggcatcagcctggaccctgaggccgccatcggcgtgaccaagaggcccccacccaagtgggtggatggagtggatgagatccagtatgatgtgggccgcatcaagcagaagatgaaggagctggccagcctgcatgacaagcacctgaaccggcccaccctggatgacagcagcgaggaggagcacgccatcgagatcaccacccaggagatcacccagctgttccaccgctgccagagagctgtgcaggccctgcccagccgggcccgggcctgcagcgagcaggagggccgcctgctgggcaatgtggtggccagcctggcccaggccctgcaggagctgagcaccagcttcagacatgcccagagcggctacctgaagaggatgaagaaccgggaggagaggagccagcacttctttgacacctctgtgcccctgatggatgatggagatgacaacaccctgtaccacaggaggaccagctag

SEQ ID NO: 49777 - DNA, 927 bp, Artificial Sequence
  derived and/or modified sequence
atggccacccggcggctgaccgacgccttcctgctgctgcggaacaatagcatacagaacagacagctcctcgcagaacaagagctcgatgagttggctgatgacaggatggctctcgtaagcggaatttccctggatcccgaggctgccatcggcgtcactaagcgccctccgcctaagtgggtcgatggcgtagatgagatccagtatgatgtcggtcgaattaagcagaagatgaaggagctcgcatccctgcatgacaaacacctgaaccgcccaaccctagatgatagcagtgaggaggaacatgcaattgagatcactacccaagagattacccagctctttcaccgctgccaaagggcagtccaggcattaccgtcgcgggcacgcgcttgctcggaacaggagggcagattactcgggaacgtagtcgcctcactagctcaggccttacaggagctgtctacgagcttcaggcacgcccagagtggatacttgaaaagaatgaagaacagagaagagcgcagtcagcacttcttcgatacatcagtgccactcatggatgatggagacgataacaccctgtaccatcgaggatttaccgaagaccagctggtgctggttgagcagaatacgcttatggtggaggaaagagagagggagattcggcaaattgtacaaagtatatccgacttgaacgaaatctttagagatctcggtgcaatgatagtagaacagggcacagttctcgaccgcatcgactacaacgtggagcaatcgtgtatcaaaacagaggatggtctcaagcagttgcataaggcagagcagtatcagaagaagaatcggaaaatgttggtaatcctgatactgtttgtaattatcatcgtgcttatcgtcgtgctggtaggcgtcaagtcacgctag

SEQ ID NO: 49778 - DNA, 927 bp, Artificial Sequence
  derived and/or modified sequence
atggccacccggcggctgaccgacgccttcctgctgctgcggaacaactctattcaaaaccggcagttactggcagaacagcaattgtcaaagctggctgacgataggatggccctggtttctggcatcagtctggaccctgaagccgccatcggagttactaagaggcccccacctaagtgggttgacggcgtcgacgagatacagtacgacgtaggccgcattaaacagaaaatgaaggaactggcctccctgcacgataagcacctaaacaggccaacattggacgacagctcagaagaagagcacgccatagagattaccactcaggagatcactcagttatttcaccgctgtcagagagcagttcaggcactcccaagccgagccagggcctgttccgagcaggaggggcgccttctgggcaatgtggttgcctcgttggctcaggcactgcaggaactgagtacgagcttccgccacgcccagagcgggtaccttaagagaatgaagaaccgggaagagcggtctcagcatttctttgacacatctgtcccacttatggacgacggggacgacaataccctctaccataggggctttacggaagaccagttggttctggtggaacagaatactcttatggttgaagagagagagagggaaattagacagattgttcagtccattagtgacctcaacgagatttttcgcgacttaggtgcaatgatagtcgagcagggcactgttctcgatcgtatcgactacaatgtagagcagtcctgcattaagacagaagacggcctgaagcagctgcacaaagccgaacagtatcagaagaaaaatcgaaagatgcttgtcattttgatactattcgtaatcatcattgtcttgatcgtggtccttgtgggtgtcaaatcccgttag

SEQ ID NO: 49779 - DNA, 609 bp, Artificial Sequence
  derived and/or modified sequence
atggccacccggcggctgaccgacgccttcctgctgctgcggaacaactccatccagaatagacagctcctggcggagcaggagctggacgaattagctgatgaccgtatggctcttgtaagcggcatttccttagaccctgaggccgccatcggcgtcaccaagaggccaccacctaagtgggtggacggagtggatgagatccagtacgacgtggggcgtattaaacagaagatgaaggaactggccagcctgcatgacaaacacctaaacaggccaaccctcgacgactctagcgaagaagaacacgctatagaaatcactacccaggagatcacccagctcttccacagatgccagcgcgctgtgcaagcattgccgtccagggcacgggcatgtagtgagcaagagggcaggcttctgggaaacgtggtggcatctctggcccaggcactgcaggagctttcaacttcttttcggcatgcacaatccggttaccttaagagaatgaagaacagggaagagaggtcacagcatttcttcgatacctctgttcctctgatggacgacggcgatgataataccctttaccaccgccgcacctcctag

SEQ ID NO: 49780 - DNA, 927 bp, Artificial Sequence
  derived and/or modified sequence
atggccacgagaagacttacagatgcctttctactgttaaggaataatagtatccaaaacagacagcttcttgcagaacaggagttggacgagttggctgacgacaggatggctctcgtgtccggcattagccttgaccccgaggcagcgatcggagtgactaaacggcctcctccgaaatgggttgatggagtggacgagatccagtatgatgtggggaggatcaaacagaaaatgaaggagctggcttccctgcatgacaaacatcttaaccgccctaccctagatgactcctccgaagaagaacacgcgattgagatcaccacccaagagattacacagctattccaccgctgccagcgggcagtgcaggcactgccctctagggctcgtgcttgcagtgaacaggaaggccgactgctgggaaacgtcgtggctagtctagctcaagccttacaggaattatccacgtcttttcggcatgcgcaaagcggctacctaaaaaggatgaagaaccgggaggagcggagccagcatttcttcgatacctctgttcccttgatggacgacggtgacgacaatacgttgtaccaccgaggcttcactgaggatcagctggtgctggttgagcagaataccctgatggttgaggaacgagaaagagaaattaggcagattgtccaatcaatcagcgacttgaatgaaatattccgagacctgggcgcaatgatcgtggaacaaggaactgtgttggaccgtattgactataatgtggaacagtcgtgtattaagactgaggatggattaaaacagttgcacaaagctgaacaataccagaaaaagaaccggaagatgctcgtaattttaattctgtttgtgatcataatcgtcctgattgtcgtgctggtcggagttaaatctcggtag

SEQ ID NO: 49781 - DNA, 927 bp, Artificial Sequence
  derived and/or modified sequence
atggcaacacggcgacttacagacgcattcctgctcttgcgcaataactccattcaaaaccggcaactgctcgcggagcaacagctcagcaagctggccgatgatcgaatggccctggtcagcgggatctccttggatcctgaagcggctataggtgttacaaagcgcccaccgccaaaatgggtcgatggagtagatgagattcagtacgatgtcggacgcatcaagcagaaaatgaaggagcttgcctcccttcacgataagcatcttaaccgcccaacgcttgatgattctagcgaagaggaacatgctattgagattaccactcaggaaataactcagttgttccaccgatgccagcgagcggttcaagccctgccttcgcgagctcgcgcttgtagtgagcaggaggggagattgctcggaaatgtcgtcgcatcgctcgcacaggctctgcaggagttgagtacttcgtttcggcacgcgcagtccggatatcttaagcgcatgaagaatagagaagagagaagccaacatttttttgacacaagcgtgcctcttatggacgatggagatgacaatacactgtaccatcggggttttaccgaggatcaactggtcctggtggaacagaatactctcatggtggaggagcgggagagggagatccgccagattgttcagagtattagcgatctgaatgagattttcagagatctcggcgctatgattgtagagcaggggacagtgctggatcgcattgactacaacgttgagcagagctgcataaagactgaggacggtctgaagcagcttcacaaagctgaacagtaccaaaagaagaaccgaaaaatgctggtaattttgatactcttcgtgatcatcattgtcctgatcgttgtgttagtaggcgtgaagtcacgttag

SEQ ID NO: 49782 - DNA, 609 bp, Artificial Sequence
  derived and/or modified sequence
atggccactcgcaggctgaccgacgctttcctgctgctccggaataacagcatccaaaacaggcagctgctggcggagcaggaactggacgagctagccgacgaccggatggctttggtctcaggcatttctctcgatccagaggccgctattggagtaacgaaacgtcctcccccaaaatgggtggatggcgttgatgagattcaatacgacgtaggtagaatcaagcaaaaaatgaaggagctggctagtttgcacgataaacacctcaatcgacctacactggacgactcaagcgaggaggagcatgctattgaaatcacaactcaagaaatcacccagctgttccacagatgccaacgggctgtccaggcgctgccatccagagccagggcctgttctgaacaggagggtcggcttttaggtaacgtggtcgcttccctcgcacaggcccttcaggaactttctacatcctttcgccatgcccagtcaggctatctcaagcggatgaagaaccgtgaagaaaggagccaacattttttcgatacctccgtaccgttgatggatgatggtgacgataataccttgtatcaccgtcggacatcctag

SEQ ID NO: 49783 - DNA, 4897 bp, Artificial Sequence
  derived and/or modified sequence
gagctgcagtcagatccggggatggagggagccggagaagaggagtgagaaggccggggaggcaggccctgctgtcttcctgcaggccggcagcctgctggcagtggaggaccaggccgtccaggaaaggaaggggtcaggaggtcgggcagggcctcagcaggttcagacaagtccccagaagggagctgcaggcgccctcgagtccaggccccaagcctggctccggttgtccaaagagggcctaggccaggcctctggtgcggaaactgagtcacagccagacctcagggcacggcctagacgcttacgagccaaagttaggggtagagagcagagacctccggggggtctcagggagtagggggcttcagggcctcccagtctagagccggattggcgagttagacgcttgtagatccaaggttggattggggtggggtctctgggacgttggatcgctacgcaaggattggggggattcaagtgcttagagatcgaagtctgccctgggtagggggagtcagacaattggaaagcctaggtagttatttggggaggggtctctacgccttggcgaagcgcacagctgcatctttttggcttgaggcctgaggccttgtcgagaagcttccgtgaaagggtgggccagccgggccacgagaaagaaagtgaataaatcaggaatataagtgggcggggggcccctgagaggggggtcgcaaagggtgagacatggccaccaggcgtttaaccgacgctttcttgttgttgcggaataattccatccaaaaccggcagctgttagccgagcaagagctggacgagcttgctgatgaccgtatggcactggtgtcaggcatcagcttagatccagaagcagcgattggtgtgacaaaacggccacctcctaagtgggtggatggagtggatgaaattcagtatgatgttggccggattaagcagaagatgaaagaattggccagccttcatgacaagcatttaaacagacccaccctggatgacagcagcgaagaggaacatgccattgagataactacccaagagatcactcagctcttccacaggtgccagcgtgccgtgcaggccctgccgagccgggcccgggcctgctccgagcaggaggggcggctgcttgggaacgtggtggcctcgctggcgcaggccctgcaggaactctccaccagcttccggcacgcacagtcaggctacctcaaacgcatgaagaatcgagaggaaagatcccagcattttttcgacacatcagtaccactaatggatgatggagacgataacactctttaccatcggggttttacagaggaccagttagttctggtggagcagaacacactgatggtggaagagcgggaacgagagattcgccagattgtacagtccatttctgacctgaatgaaatattcagggacttaggggcgatgattgtagaacagggtacagtccttgacagaattgactataacgttgaacagtcctgtatcaaaactgaagatggtttgaaacagcttcacaaggcagaacagtatcaaaagaagaatcggaagatgcttgtgattttaatattatttgtcatcatcattgtgctcattgttgtcctcgttggcgtgaagtctcgataagtggcattgggttttcgtgtgtgccgcgcgtgtggatctcccgggtgtgaggggcttggcctgcgccccgccagctgcccgcagaggtgcagcctcgaggaatctgagggcgtcggggcagcgaacctttgcatccacggactcctccttccctagtcctgctcaagcggtccggggaatgggtttttgtttttccttcattgttgagaatttaaggacctttgatactgctgcacaatagagattgagttctgggatcagttataatatatattttttttagaaagagaaaatgagctgagagtttacaggcactgcagaagctgttcagtattatatgtgtatatgctatttttttagcagccatgtctgagcagaatgttaacataatttttggaaaaattttctttaaaccatctggtttttaagaaatttggtaccaaaaattgatgagtagaggcaaaaatgccccttcatctttctctatatattttccagttgaaaacaaactaagaagtcctttaagaatttataatccgttccccattaacttaatttagcttttccatcactgttaatgatcagagtaacaaagtgtgaaaaataagaaaccatcattgatgttaattaacacatttagatgggccagttaaaacagcttcataagttttaaattaattgtaaatggaatattcctcatttaaaatttttgcactgcattttctactgtaaaccaaaagaggttactaagcaaaaccacctaaatttaagttggtgatttaaatgaatctcacattaaaagaaagcttgacagtgttatgaaagccaccagactcagccagtgtgtccccatgggtatccccagccatccttgctcaatccattacttatatactaactacataatgacctgttcaaaccagactctatttaatgaactgtgaatttacacagaggccattttaaatgggtcaccccatttaggattagtggatctcaaattattaaccaaacatcactccatttcaaagtaaaatattccaccagcgatttgatttattggctcttccattgccactgagcaatgcccaggaagcaggcacattgccaaggactgggggcatcttgactaggaagctcctcgtttgtgtgagcgtgggtcagaccgccaaagtaggacttcatcgtttacctacctattatcaatatggtgcttgaatatattcctataactgtagaacagtgtggaaagtgatggtaactttgaagttgttcatgttttattggctttgttttaattgacactagtagagttttaatggtctttgtgtaaattttaatggcttttccattgtttttgcttctcttaaaaagtttaagaagaatatgacctcattaaatgtgctgttttatttggaccagtcacacaaaatgtctctctagagttgactttaaagttgtttacagaaatttaaactcaattccagagattgaagttgtccaaacagctcatgggcttagtgtccaaacccctgcccagccttccctttccaagttggtgccacctccaggtagccattggtggttttcctattactgatgtggctgtggaatgataaggtcctagaggggccctggcatttcaggaagcggacctggtattccctgacaaacattgcttaggaaagagggccggagaataagaagccagcacctcatcagtcagccctgcaatgtgagacttccgtagctgttgagagtcactgcaggtgttctttcatcccatctgattttaacccatggttgagacgttccaagttagatctgctgctcttaggtgtggggctgtccacattagggaacttgcctcaaaaacagtccacagtggcaataccggacttctgttcaagctttttaaagtgctgagccttacaaacccctgaaggaaagtgaccctttaagagaggatcatctttttttatatttattttcaccaaatagggtgatgagggttggtttttgttccctcaacccatttgggtaaaataacggatctgattagaaactgttttaaggaggggctgggctcggtggctcacgcctgtaatcccagactttgagaggccaaggcggtcacgaggtcaggagttcgagaccagcctagccaacatggtgaaaccccgtctctacaaaaaatacaaaaattagccgggtgggacacgcctgtaatcccagctactcaagaggctgaggcaggagaatagcttgaacccgggaggcagaggttgcagtgagccgagatcacaccactgcactccagcctgggtgacagagcgaggctccgtctcaaaaaaaaaaaaaaaaaattgttttagcgctgggtttcccaaggtgggagagacagacccagcctggagctggcccctggcctgtgtgctgacttcttggggtcctcaaaccactgtatttttctgttgagcctgtacttggggagagatcagtagcatttgaggaagtaagagaaaagaatcatggtacctcagggtttctttccctttactcgctggcagccattgtctgtgggcacctcatgtttttccacactctactgggccgtggaggtaacgatcacccaggccagtctcctctgcctgggatgcgccctctgagaggaggcctagcagggcaggctccctctgggcatccctggatgcagcctctggacacatgcctcctttaaagtgtccgggtgcagctcaggttgagtggaggtagaaggagaaacagacatgtttaccacgcgttttccaaagctcctgatctttcccaagattgtaactgaaaactgctgtctcttgttttgttcgttttgggggtggtggtgctggctgggccatgcttgtgaagtgatgtgtgtctctgatttaacggattcactgttttctctgctaattgagagagcgttatttacattatttatttgttttgacacaagtgctttcagtgttttatcctagctaatggcttcttaaaggtaataaaacccttccaacgtaattggtcagataaaactttttttcttgtatgcttaaataaagcaattagtgaagcacttctatccaaaatgacttttttgtccttttttaaaaccaatttactgttactggaaactttttgtacaataaagcaatcacgcagattaaagaacatcctgcaatcctagtattaattttaa

SEQ ID NO: 49784 - DNA, 4897 bp, Artificial Sequence
  derived and/or modified sequence
gagctgcagtcagatccggggatggagggagccggagaagaggagtgagaaggccggggaggcaggccctgctgtcttcctgcaggccggcagcctgctggcagtggaggaccaggccgtccaggaaaggaaggggtcaggaggtcgggcagggcctcagcaggttcagacaagtccccagaagggagctgcaggcgccctcgagtccaggccccaagcctggctccggttgtccaaagagggcctaggccaggcctctggtgcggaaactgagtcacagccagacctcagggcacggcctagacgcttacgagccaaagttaggggtagagagcagagacctccggggggtctcagggagtagggggcttcagggcctcccagtctagagccggattggcgagttagacgcttgtagatccaaggttggattggggtggggtctctgggacgttggatcgctacgcaaggattggggggattcaagtgcttagagatcgaagtctgccctgggtagggggagtcagacaattggaaagcctaggtagttatttggggaggggtctctacgccttggcgaagcgcacagctgcatctttttggcttgaggcctgaggccttgtcgagaagcttccgtgaaagggtgggccagccgggccacgagaaagaaagtgaataaatcaggaatataagtgggcggggggcccctgagaggggggtcgcaaagggtgagacatggccaccaggcgtttaaccgacgctttcttgttgttgcggaataattccatccaaaaccggcagctgttagccgagcaacagttatcaaaacttgctgatgaccgtatggcactggtgtcaggcatcagcttagatccagaagcagcgattggtgtgacaaaacggccacctcctaagtgggtggatggagtggatgaaattcagtatgatgttggccggattaagcagaagatgaaagaattggccagccttcatgacaagcatttaaacagacccaccctggatgacagcagcgaagaggaacatgccattgagataactacccaagagatcactcagctcttccacaggtgccagcgtgccgtgcaggccctgccgagccgggcccgggcctgctccgagcaggaggggcggctgcttgggaacgtggtggcctcgctggcgcaggccctgcaggaactctccaccagcttccggcacgcacagtcaggctacctcaaacgcatgaagaatcgagaggaaagatcccagcattttttcgacacatcagtaccactaatggatgatggagacgataacactctttaccatcggggttttacagaggaccagttagttctggtggagcagaacacactgatggtggaagagcgggaacgagagattcgccagattgtacagtccatttctgacctgaatgaaatattcagggacttaggggcgatgattgtagaacagggtacagtccttgacagaattgactataacgttgaacagtcctgtatcaaaactgaagatggtttgaaacagcttcacaaggcagaacagtatcaaaagaagaatcggaagatgcttgtgattttaatattatttgtcatcatcattgtgctcattgttgtcctcgttggcgtgaagtctcgataagtggcattgggttttcgtgtgtgccgcgcgtgtggatctcccgggtgtgaggggcttggcctgcgccccgccagctgcccgcagaggtgcagcctcgaggaatctgagggcgtcggggcagcgaacctttgcatccacggactcctccttccctagtcctgctcaagcggtccggggaatgggtttttgtttttccttcattgttgagaatttaaggacctttgatactgctgcacaatagagattgagttctgggatcagttataatatatattttttttagaaagagaaaatgagctgagagtttacaggcactgcagaagctgttcagtattatatgtgtatatgctatttttttagcagccatgtctgagcagaatgttaacataatttttggaaaaattttctttaaaccatctggtttttaagaaatttggtaccaaaaattgatgagtagaggcaaaaatgccccttcatctttctctatatattttccagttgaaaacaaactaagaagtcctttaagaatttataatccgttccccattaacttaatttagcttttccatcactgttaatgatcagagtaacaaagtgtgaaaaataagaaaccatcattgatgttaattaacacatttagatgggccagttaaaacagcttcataagttttaaattaattgtaaatggaatattcctcatttaaaatttttgcactgcattttctactgtaaaccaaaagaggttactaagcaaaaccacctaaatttaagttggtgatttaaatgaatctcacattaaaagaaagcttgacagtgttatgaaagccaccagactcagccagtgtgtccccatgggtatccccagccatccttgctcaatccattacttatatactaactacataatgacctgttcaaaccagactctatttaatgaactgtgaatttacacagaggccattttaaatgggtcaccccatttaggattagtggatctcaaattattaaccaaacatcactccatttcaaagtaaaatattccaccagcgatttgatttattggctcttccattgccactgagcaatgcccaggaagcaggcacattgccaaggactgggggcatcttgactaggaagctcctcgtttgtgtgagcgtgggtcagaccgccaaagtaggacttcatcgtttacctacctattatcaatatggtgcttgaatatattcctataactgtagaacagtgtggaaagtgatggtaactttgaagttgttcatgttttattggctttgttttaattgacactagtagagttttaatggtctttgtgtaaattttaatggcttttccattgtttttgcttctcttaaaaagtttaagaagaatatgacctcattaaatgtgctgttttatttggaccagtcacacaaaatgtctctctagagttgactttaaagttgtttacagaaatttaaactcaattccagagattgaagttgtccaaacagctcatgggcttagtgtccaaacccctgcccagccttccctttccaagttggtgccacctccaggtagccattggtggttttcctattactgatgtggctgtggaatgataaggtcctagaggggccctggcatttcaggaagcggacctggtattccctgacaaacattgcttaggaaagagggccggagaataagaagccagcacctcatcagtcagccctgcaatgtgagacttccgtagctgttgagagtcactgcaggtgttctttcatcccatctgattttaacccatggttgagacgttccaagttagatctgctgctcttaggtgtggggctgtccacattagggaacttgcctcaaaaacagtccacagtggcaataccggacttctgttcaagctttttaaagtgctgagccttacaaacccctgaaggaaagtgaccctttaagagaggatcatctttttttatatttattttcaccaaatagggtgatgagggttggtttttgttccctcaacccatttgggtaaaataacggatctgattagaaactgttttaaggaggggctgggctcggtggctcacgcctgtaatcccagactttgagaggccaaggcggtcacgaggtcaggagttcgagaccagcctagccaacatggtgaaaccccgtctctacaaaaaatacaaaaattagccgggtgggacacgcctgtaatcccagctactcaagaggctgaggcaggagaatagcttgaacccgggaggcagaggttgcagtgagccgagatcacaccactgcactccagcctgggtgacagagcgaggctccgtctcaaaaaaaaaaaaaaaaaattgttttagcgctgggtttcccaaggtgggagagacagacccagcctggagctggcccctggcctgtgtgctgacttcttggggtcctcaaaccactgtatttttctgttgagcctgtacttggggagagatcagtagcatttgaggaagtaagagaaaagaatcatggtacctcagggtttctttccctttactcgctggcagccattgtctgtgggcacctcatgtttttccacactctactgggccgtggaggtaacgatcacccaggccagtctcctctgcctgggatgcgccctctgagaggaggcctagcagggcaggctccctctgggcatccctggatgcagcctctggacacatgcctcctttaaagtgtccgggtgcagctcaggttgagtggaggtagaaggagaaacagacatgtttaccacgcgttttccaaagctcctgatctttcccaagattgtaactgaaaactgctgtctcttgttttgttcgttttgggggtggtggtgctggctgggccatgcttgtgaagtgatgtgtgtctctgatttaacggattcactgttttctctgctaattgagagagcgttatttacattatttatttgttttgacacaagtgctttcagtgttttatcctagctaatggcttcttaaaggtaataaaacccttccaacgtaattggtcagataaaactttttttcttgtatgcttaaataaagcaattagtgaagcacttctatccaaaatgacttttttgtccttttttaaaaccaatttactgttactggaaactttttgtacaataaagcaatcacgcagattaaagaacatcctgcaatcctagtattaattttaa

SEQ ID NO: 49785 - DNA, 812 bp, Artificial Sequence
  derived and/or modified sequence
atggccaccaggcgtttaaccgacgctttcttgttgttgcggaataattccatccaaaaccggcagctgttagccgagcaagagctggacgagcttgctgatgaccgtatggcactggtgtcaggcatcagcttagatccagaagcagcgattggtgtgacaaaacggccacctcctaagtgggtggatggagtggatgaaattcagtatgatgttggccggattaagcagaagatgaaagaattggccagccttcatgacaagcatttaaacagacccaccctggatgacagcagcgaagaggaacatgccattgagataactacccaagagatcactcagctcttccacaggtgccagcgtgccgtgcaggccctgccgagccgggcccgggcctgctccgagcaggaggggcggctgcttgggaacgtggtggcctcgctggcgcaggccctgcaggaactctccaccagcttccggcacgcacagtcaggctacctcaaacgcatgaagaatcgagaggaaagatcccagcattttttcgacacatcagtaccactaatggatgatggagacgataacactctttaccatcggaggaccagttagttctggtggagcagaacacactgatggtggaagagcgggaacgagagattcgccagattgtacagtccatttctgacctgaatgaaatattcagggacttaggggcgatgattgtagaacagggtacagtccttgacagaattgactataacgttgaacagtcctgtatcaaaactgaagatggtttgaaacagcttcacaag

SEQ ID NO: 49786 - protein, 253 aa, Artificial Sequence
  derived and/or modified sequence
MNLLREQSRTRPISPKEIERMVGIIHRKFSSIQMQLKQSTCEAVMILRSRFLDARRKRRNFSKQATEILNEYFYSHLSNPYPSEEAKEELAKKCSITVSQVSNWFGNKRIRYKKNIGKFQEEANLYAAKTAVTAAHAVAAAVQNNQTNSPTTPNSGSSGSFNLPNSGDMFMNMQSLNGDSYQGSQVGANVQSQVDTLRHVINQTGGYSDGLGGNSLYSPHNLNANGGWQDATTPSSVTSPTEGPGSVHSDTSN

SEQ ID NO: 49787 - protein, 359 aa, Artificial Sequence
  derived and/or modified sequence
MKPALFSVLCEIKEKTGLSIRGAQEEDPPDPQLMRLDNMLLAEGVSGPEKGGGSAAAAAAAAASGGSSDNSIEHSDYRAKLTQIRQIYHTELEKYEQACNEFTTHVMNLLREQSRTRPISPKEIERMVGIIHRKFSSIQMQLKQSTCEAVMILRSRFLDARRKRRNFSKQATEILNEYFYSHLSNPYPSEEAKEELAKKCSITVSQVSNWFGNKRIRYKKNIGKFQEEANLYAAKTAVTAAHAVAAAVQNNQTNSPTTPNSGSSGSFNLPNSGDMFMNMQSLNGDSYQGSQVGANVQSQVDTLRHVINQTGGYSDGLGGNSLYSPHNLNANGGWQDATTPSSVTSPTEGPGSVHSDTSN

SEQ ID NO: 49788 - DNA, 762 bp, Artificial Sequence
  derived and/or modified sequence
atgaacctcctcagagaacagtctaggaccagacccatttcacccaaagagatcgagcggatggtcggcatcatacacaggaagttcagctccatccaaatgcagctaaagcaatccacttgtgaagccgtgatgatccttcggtccaggttcctcgacgctaggcggaagcggaggaacttcagtaagcaggccacagaaattctgaacgaatatttctattcccacttaagcaatccatacccttccgaggaagctaaggaggaactagccaaaaagtgtagcattaccgttagccaggtcagtaattggtttggcaataaacgtatacggtataagaagaatattggcaaatttcaggaagaggccaacttgtacgcagccaaaacagccgtgaccgctgcgcacgccgttgcggccgctgtgcaaaataatcagaccaattctcctactactccgaactcaggaagcagcggcagcttcaacctgcctaactcaggggacatgttcatgaacatgcaatctttgaatggagactcataccaggggtcgcaggtcggcgccaatgttcagtctcaggtggatacattgcggcatgtgattaaccaaaccggtggatacagtgatggactgggagggaatagcctttattctccacataacttaaatgcgaacgggggctggcaagacgctacaaccccttcatccgtgacttcccctaccgagggccctgggagcgtgcacagcgataccagtaattag

SEQ ID NO: 49789 - DNA, 1080 bp, Artificial Sequence
  derived and/or modified sequence
atgaaacctgccctgttctctgttctgtgtgagattaaagaaaagactgggctctccattcgcggagcacaagaagaggacccacctgatccacagcttatgagactggacaacatgttgctggctgaaggggtgagcgggcctgaaaagggcggcgggagcgctgccgcggctgccgctgctgccgctagcggcggctcatcggataatagcatcgaacacagtgactatcgcgcaaagctgacccagatcagacagatctatcacacagagttggaaaagtacgaacaggcatgcaatgagttcacaacacatgtgatgaacttgctgcgggagcagtcgaggacaaggccaatctcccccaaggagatcgaacggatggtgggcattattcaccgaaagtttagcagcatccagatgcagctgaagcaatcgacgtgtgaggcggtgatgatcctccgcagccggtttcttgatgctagacggaaaagaagaaatttctccaagcaagccacggaaatccttaatgagtacttctactctcatctgagcaatccatacccgagtgaggaggccaaggaggaactggctaaaaaatgctctataacagtgtcacaagtgagcaactggttcggcaacaaacgaattcgctacaagaaaaacatcggaaaatttcaggaggaggctaacctttacgccgccaagacagcagttacagcagcacacgctgtagccgccgcggtgcagaataatcagaccaatagtcccaccacacctaattctggctcatctgggagcttcaatctgcccaactcaggtgacatgtttatgaatatgcagtcactgaatggagatagctatcaagggtctcaggttggagcgaatgtgcagagccaagtcgacacacttaggcatgtgatcaaccagacaggtggctactccgacgggctcggggggaactctctgtactccccgcacaacctgaatgcaaacggtggctggcaggatgccactactccgtcttctgtaacaagcccgacagagggaccaggttctgttcatagcgatacaagcaactag

SEQ ID NO: 49790 - DNA, 762 bp, Artificial Sequence
  derived and/or modified sequence
atgaacctgctgcgggagcagagcaggacccggcccatcagccccaaggagattgaaagaatggtgggcatcatccacaggaagttcagcagcatccagatgcagctgaagcagagcacctgtgaggccgtgatgatcctgcggagccgcttcctggatgcccggaggaagagaagaaacttcagcaagcaggccacagagatcctgaatgagtacttctacagccacctgagcaacccctaccccagcgaggaggccaaggaggagctggccaagaagtgcagcatcaccgtgtcccaggtgagcaactggtttggaaacaagaggatccgctacaagaagaacatcggcaagttccaggaggaggccaacctgtatgctgccaagacagctgtgacagctgcccatgctgtggccgctgctgtgcagaacaaccagaccaacagccccaccacccccaacagcggcagcagcggcagcttcaacctgcccaacagcggggacatgttcatgaacatgcagagcctgaatggagacagctaccagggcagccaggtgggcgccaacgtgcagagccaggtggacaccctgcggcacgtgatcaaccagacaggaggctacagtgatggcctgggcggcaacagcctgtacagcccccacaacctgaatgccaatggaggctggcaggatgccaccacccccagctctgtgaccagccccacagagggccctggctctgtgcacagcgacaccagcaactag

SEQ ID NO: 49791 - DNA, 1080 bp, Artificial Sequence
  derived and/or modified sequence
atgaagccagccctcttctctgtgctgtgtgagatcaaggagaagacaggcctgagcatccggggggcccaggaggaggaccccccagacccccagctgatgaggctggacaacatgctgctggccgagggcgtgtctggccctgagaagggcggcggcagcgctgctgctgctgctgctgctgctgccagcggcggcagcagtgacaacagcattgagcacagcgactaccgggccaagctgacccagatccggcagatctaccacacagagctggagaagtatgagcaggcctgcaatgagttcaccacccacgtgatgaacctgctgcgggagcagagcaggacccggcccatcagccccaaggagattgaaagaatggtgggcatcatccacaggaagttcagcagcatccagatgcagctgaagcagagcacctgtgaggccgtgatgatcctgcggagccgcttcctggatgcccggaggaagagaagaaacttcagcaagcaggccacagagatcctgaatgagtacttctacagccacctgagcaacccctaccccagcgaggaggccaaggaggagctggccaagaagtgcagcatcaccgtgtcccaggtgagcaactggtttggaaacaagaggatccgctacaagaagaacatcggcaagttccaggaggaggccaacctgtatgctgccaagacagctgtgacagctgcccatgctgtggccgctgctgtgcagaacaaccagaccaacagccccaccacccccaacagcggcagcagcggcagcttcaacctgcccaacagcggggacatgttcatgaacatgcagagcctgaatggagacagctaccagggcagccaggtgggcgccaacgtgcagagccaggtggacaccctgcggcacgtgatcaaccagacaggaggctacagtgatggcctgggcggcaacagcctgtacagcccccacaacctgaatgccaatggaggctggcaggatgccaccacccccagctctgtgaccagccccacagagggccctggctctgtgcacagcgacaccagcaactag

SEQ ID NO: 49792 - DNA, 762 bp, Artificial Sequence
  derived and/or modified sequence
atgaacctgctgcgggagcagagccggacccggcccatcagccccaaagagatagagagaatggttggcattatccacagaaaattctccagtatccagatgcagttgaaacaatccacttgtgaagcagtgatgattctcagaagccgattcttagatgcccggcgcaagaggcgcaatttctcgaaacaggccactgagattctcaacgagtacttctactcccacctcagtaatccataccctagcgaagaggccaaggaggaactcgcgaagaagtgttccatcacagtcagccaggtgtctaattggtttggtaacaagaggattcgttacaagaagaacatcggaaaatttcaggaggaggccaatctttacgctgctaagacggccgtgaccgctgctcatgccgtcgctgcagccgtgcagaacaaccagacaaactccccgaccacccccaacagcggttcatcagggagcttcaacctgcccaacagcggcgatatgtttatgaatatgcaaagcctgaatggagattcatatcagggctcccaagtcggagctaatgtgcaaagccaggtggacactctgcggcacgtcatcaatcagaccggtggttactctgacggactgggtggcaattctttatattccccacacaatctcaatgctaacggggggtggcaggacgctaccactcccagctctgttacttcgcccactgaggggcctggtagcgtgcactcggacacctcaaattag

SEQ ID NO: 49793 - DNA, 1080 bp, Artificial Sequence
  derived and/or modified sequence
atgaagcccgccctgttcagcgtgctgtgcgagatcaaggagaagaccgggctctccatacgcggagcgcaggaggaagatccccctgatcctcagctaatgcgactggataacatgcttcttgctgagggagtgtcagggcccgagaaggggggcggcagcgcggcagctgcagcggcggccgcagcatctggcggctcctctgataacagtatcgagcattccgactaccgcgccaagttgacccagatccggcagatttatcacactgaattagaaaagtacgagcaggcttgtaatgagttcaccacacacgtgatgaacttgctgagagagcaatctcggacgagacccatctctcccaaagagatagagaggatggtgggcataatccatcggaagttctcctctatccagatgcaactcaagcaatccacctgcgaggccgtgatgattctgaggtctcggttccttgatgctagacggaagcgccgtaacttcagtaagcaggccactgagatcttaaacgagtatttttatagccatctatctaatccttatccatccgaagaggccaaagaggagctggctaaaaaatgctctataaccgtgtcacaggtttcaaactggttcggcaataagcgcattcgctacaagaaaaatatcggaaaatttcaggaggaagccaatttatacgctgccaagactgctgttaccgcagcccatgctgttgcagccgctgtgcagaacaatcagaccaactcacctactaccccaaacagtggcagctccggatcattcaacctgccaaactccggagacatgttcatgaatatgcaaagcctaaacggggacagttatcaaggttctcaggtcggtgcaaacgtgcagagtcaggttgacacacttaggcatgtgattaatcagactggaggatattcggatggattagggggtaactccctgtactcaccacacaatctaaatgccaacggtggctggcaagacgcaaccactccaagctctgtcacatcccccacagagggtccagggtccgtgcactctgacacttccaactag

SEQ ID NO: 49794 - DNA, 1063 bp, Artificial Sequence
  derived and/or modified sequence
atggacgatcaatccaggatgctgcagactctggccggggtgaacctggctggccactcggtgcaggggggcatggccctgccgcctcccccgcacggccacgaaggggcggacggcgacggcaggaagcaggacatcggcgacatcctccaccagatcatgaccatcaccgaccagagcttggacgaggcgcaagcaaagaaacatgccctgaactgtcacagaatgaaaccagcgctcttcagcgtcctgtgtgagatcaaagagaaaacaggcatgtaatgaatttactacacatgtgatgaaccttctccgagaacagagtagaacacgtcccatttctccaaaagagattgaaagaatggtgggcatcatccatcgaaaatttagttccattcagatgcagctcaaacaaagcacttgtgaagcagttatgattttaagatcaaggttccttgatgccagacggaaaaggcgtaacttcagtaaacaggccacagaaatcttgaatgaatatttttactcacacctcagcaacccctaccccagtgaagaagccaaagaggagctggccaagaaatgcagcatcacagtgtcacaggtatccaattggtttggcaacaaacgaatcaggtacaagaagaacattggcaagtttcaggaagaagccaacctctatgctgcaaagacggccgtgacagctgcacacgcagtagcagcagctgtgcagaacaaccagaccaattcgcccaccacaccaaattccggttcttctggttcttttaacctcccaaattctggggacatgttcatgaacatgcagagtctgaatggggattcttaccaagggtcccaagtcggagccaatgtgcaatcacaggtggataccctccgtcatgttatcaatcagacgggaggctacagtgatggccttggaggaaattcactgtacagtccacataatttaaatgctaatggaggctggcaggacgcaacaactccatcttctgtgacttctcctacagaaggcccaggaagtgtgcactcggatacctctaactaa

SEQ ID NO: 49795 - DNA, 762 bp, Artificial Sequence
  derived and/or modified sequence
atgaacctgctgagggagcagtccaggacccgacccatcagccctaaggaaatagagcgcatggttgggattattcatcggaagttctcatctatccagatgcagctgaagcaatcaacctgcgaggccgttatgatcctccgttccaggtttctggatgccagaaggaaacggcgaaattttagcaaacaagccaccgaaatcctcaacgagtatttctactcccatctgtccaacccctaccccagtgaggaggcaaaagaggagcttgctaagaaatgttccatcaccgtgtcacaggtgagcaactggttcggcaataaaaggattcggtataagaaaaatataggcaagtttcaggaagaggcaaacttatatgctgcgaaaaccgctgttaccgcagcccacgccgtggctgccgcagttcagaacaaccaaacaaacagtcccacaacaccgaattccgggtcatccggctcattcaatctaccaaactctggtgatatgttcatgaatatgcagtcgctgaacggtgatagctatcaaggcagtcaggtgggtgctaatgtgcagtctcaggtggatacattgagacacgttatcaaccagactgggggttattctgacgggctaggaggcaactctctgtatagccctcataatctgaacgcaaatggcggatggcaagacgccacaacaccgtccagcgttacatccccaactgagggaccagggtcagtgcattccgatacaagtaactag

SEQ ID NO: 49796 - DNA, 1080 bp, Artificial Sequence
  derived and/or modified sequence
atgaaacctgcgctgttttcggtgctgtgtgaaattaaagagaaaacggggttatcaatcagaggggctcaagaagaggacccacccgacccacaactgatgcgcctcgacaacatgctcttggccgagggagtctccggcccagagaaaggcggtggttcagccgcagccgctgcagccgctgccgctagcgggggttcatcagacaactctattgagcatagcgactaccgcgctaaactcacacaaattaggcaaatctatcacactgagcttgaaaaatatgagcaggcgtgcaacgagtttacaactcatgtcatgaaccttttaagggagcaatctcgcaccagacccatttcccccaaggaaatcgagcggatggtcggaattatccacagaaagtttagtagtattcaaatgcagctcaagcaatccacctgtgaggccgtgatgattctgagatcgcgctttttggacgcgaggcgtaaacgacggaatttcagcaaacaggctaccgagatactcaatgaatatttctactcacacctgagcaatccctacccctccgaagaggctaaggaagagctcgcaaagaaatgttccataactgtgtcacaagtcagcaattggttcggaaacaaacgaatcaggtacaagaaaaatattgggaaattccaggaggaggccaacctgtacgcagcaaagacggctgttaccgccgcacacgcagtggcagccgctgtacagaacaatcagaccaattcgcccaccactcctaattccggttcatctgggtcgtttaatctccctaattcaggagatatgtttatgaatatgcagtctttaaatggggattcctaccagggatcccaggtgggggcaaacgtccagtcacaggtcgatactcttcggcacgtcatcaaccaaacggggggatatagtgatgggttgggcggaaatagcctgtactctccccacaatctgaatgccaacggcggatggcaagacgccacaaccccttccagcgtgacatccccgactgaaggaccaggttctgtccactcagatacttctaactag

SEQ ID NO: 49797 - DNA, 762 bp, Artificial Sequence
  derived and/or modified sequence
atgaacctgctgagagagcagagcagaaccagacccatcagccccaaggagatcgagagaatggtgggcatcatccacagaaagttcagcagcatccagatgcagctgaagcagagcacctgcgaggccgtgatgatcctgagaagcagattcctggacgccagaagaaagagaagaaacttcagcaagcaggccaccgagatcctgaacgagtacttctacagccacctgagcaacccctaccccagcgaggaggccaaggaggagctggccaagaagtgcagcatcaccgtgagccaggtgagcaactggttcggcaacaagagaatcagatacaagaagaacatcggcaagttccaggaggaggccaacctgtacgccgccaagaccgccgtgaccgccgcccacgccgtggccgccgccgtgcagaacaaccagaccaacagccccaccacccccaacagcggcagcagcggcagcttcaacctgcccaacagcggcgacatgttcatgaacatgcagagcctgaacggcgacagctaccagggcagccaggtgggcgccaacgtgcagagccaggtggacaccctgagacacgtgatcaaccagaccggcggctacagcgacggcctgggcggcaacagcctgtacagcccccacaacctgaacgccaacggcggctggcaggacgccaccacccccagcagcgtgaccagccccaccgagggccccggcagcgtgcacagcgacaccagcaactag

SEQ ID NO: 49798 - DNA, 1080 bp, Artificial Sequence
  derived and/or modified sequence
atgaagcccgccctgttcagcgtgctgtgcgagatcaaggagaagaccggcctgagcatcagaggcgcccaggaggaggacccccccgacccccagctgatgagactggacaacatgctgctggccgagggcgtgagcggccccgagaagggcggcggcagcgccgccgccgccgccgccgccgccgccagcggcggcagcagcgacaacagcatcgagcacagcgactacagagccaagctgacccagatcagacagatctaccacaccgagctggagaagtacgagcaggcctgcaacgagttcaccacccacgtgatgaacctgctgagagagcagagcagaaccagacccatcagccccaaggagatcgagagaatggtgggcatcatccacagaaagttcagcagcatccagatgcagctgaagcagagcacctgcgaggccgtgatgatcctgagaagcagattcctggacgccagaagaaagagaagaaacttcagcaagcaggccaccgagatcctgaacgagtacttctacagccacctgagcaacccctaccccagcgaggaggccaaggaggagctggccaagaagtgcagcatcaccgtgagccaggtgagcaactggttcggcaacaagagaatcagatacaagaagaacatcggcaagttccaggaggaggccaacctgtacgccgccaagaccgccgtgaccgccgcccacgccgtggccgccgccgtgcagaacaaccagaccaacagccccaccacccccaacagcggcagcagcggcagcttcaacctgcccaacagcggcgacatgttcatgaacatgcagagcctgaacggcgacagctaccagggcagccaggtgggcgccaacgtgcagagccaggtggacaccctgagacacgtgatcaaccagaccggcggctacagcgacggcctgggcggcaacagcctgtacagcccccacaacctgaacgccaacggcggctggcaggacgccaccacccccagcagcgtgaccagccccaccgagggccccggcagcgtgcacagcgacaccagcaactag

SEQ ID NO: 49799 - protein, 975 aa, Artificial Sequence
  derived and/or modified sequence
MDLNSASTVVLQVLTQATSQDTAVLKPAEEQLKQWETQPGFYSVLLNIFTNHTLDINVRWLAVLYFKHGIDRYWRRVAPHALSEEEKTTLRAGLITNFNEPINQIATQIAVLIAKVARLDCPRQWPELIPTLIESVKVQDDLRQHRALLTFYHVTKTLASKRLAADRKLFYDLASGIYNFACSLWNHHTDTFLQEVSSGNEAAILSSLERTLLSLKVLRKLTVNGFVEPHKNMEVMGFLHGIFERLKQFLECSRSIGTDNVCRDRLEKTIILFTKVLLDFLDQHPFSFTPLIQRSLEFSVSYVFTEVGEGVTFERFIVQCMNLIKMIVKNYAYKPSKNFEDSSPETLEAHKIKMAFFTYPTLTEICRRLVSHYFLLTEEELTMWEEDPEGFTVEETGGDSWKYSLRPCTEVLFIDIFHEYNQTLTPVLLEMMQTLQGPTNVEDMNALLIKDAVYNAVGLAAYELFDSVDFDQWFKNQLLPELQVIHNRYKPLRRRVIWLIGQWISVKFKSDLRPMLYEAICNLLQDQDLVVRIETATTLKLTVDDFEFRTDQFLPYLETMFTLLFQLLQQVTECDTKMHVLHVLSCVIERVNMQIRPYVGCLVQYLPLLWKQSEEHNMLRCAILTTLIHLVQGLGADSKNLYPFLLPVIQLSTDVSQPPHVYLLEDGLELWLVTLENSPCITPELLRIFQNMSPLLELSSENLRTCFKIINGYIFLSSTEFLQTYAVGLCQSFCELLKEITTEGQVQVLKVVENALKVNPILGPQMFQPILPYVFKGIIEGERYPVVMSTYLGVMGRVLLQNTSFFSSLLNEMAHKFNQEMDQLLGNMIEMWVDRMDNITQPERRKLSALALLSLLPSDNSVIQDKFCGIINISVEGLHDVMTEDPETGTYKDCMLMSHLEEPKVTEDEEPPTEQDKRKKMLALKDPVHTVSLQQFIYEKLKAQQEMLGEQGFQSLMETVDTEIVTQLQEFLQGF

SEQ ID NO: 49800 - protein, 1015 aa, Artificial Sequence
  derived and/or modified sequence
MVQPIIHLGYVVYSLLYLGYKPVQHVTALNTVSSCHKMVSMDLNSASTVVLQVLTQATSQDTAVLKPAEEQLKQWETQPGFYSVLLNIFTNHTLDINVRWLAVLYFKHGIDRYWRRVAPHALSEEEKTTLRAGLITNFNEPINQIATQIAVLIAKVARLDCPRQWPELIPTLIESVKVQDDLRQHRALLTFYHVTKTLASKRLAADRKLFYDLASGIYNFACSLWNHHTDTFLQEVSSGNEAAILSSLERTLLSLKVLRKLTVNGFVEPHKNMEVMGFLHGIFERLKQFLECSRSIGTDNVCRDRLEKTIILFTKVLLDFLDQHPFSFTPLIQRSLEFSVSYVFTEVGEGVTFERFIVQCMNLIKMIVKNYAYKPSKNFEDSSPETLEAHKIKMAFFTYPTLTEICRRLVSHYFLLTEEELTMWEEDPEGFTVEETGGDSWKYSLRPCTEVLFIDIFHEYNQTLTPVLLEMMQTLQGPTNVEDMNALLIKDAVYNAVGLAAYELFDSVDFDQWFKNQLLPELQVIHNRYKPLRRRVIWLIGQWISVKFKSDLRPMLYEAICNLLQDQDLVVRIETATTLKLTVDDFEFRTDQFLPYLETMFTLLFQLLQQVTECDTKMHVLHVLSCVIERVNMQIRPYVGCLVQYLPLLWKQSEEHNMLRCAILTTLIHLVQGLGADSKNLYPFLLPVIQLSTDVSQPPHVYLLEDGLELWLVTLENSPCITPELLRIFQNMSPLLELSSENLRTCFKIINGYIFLSSTEFLQTYAVGLCQSFCELLKEITTEGQVQVLKVVENALKVNPILGPQMFQPILPYVFKGIIEGERYPVVMSTYLGVMGRVLLQNTSFFSSLLNEMAHKFNQEMDQLLGNMIEMWVDRMDNITQPERRKLSALALLSLLPSDNSVIQDKFCGIINISVEGLHDVMTEDPETGTYKDCMLMSHLEEPKVTEDEEPPTEQDKRKKMLALKDPVHTVSLQQFIYEKLKAQQEMLGEQGFQSLMETVDTEIVTQLQEFLQGF

SEQ ID NO: 49801 - protein, 64 aa, Artificial Sequence
  derived and/or modified sequence
MDLNSASTVVLQVLTQATSQDTAVLKPAEEQLKQWETQPGFYSVLLNIFTNHTLDINVRWLAVL

SEQ ID NO: 49802 - protein, 162 aa, Artificial Sequence
  derived and/or modified sequence
MDLNSASTVVLQVLTQATSQDTAVLKPAEEQLKQWETQPGFYSVLLNIFTNHTLDINVRWLAVLYFKHGIDRYWRRVAPHALSEEEKTTLRAGLITNFNEPINQIATQIAVLIAKVARLDCPRQWPELIPTLIESVKVQDDLRQHRALLTFYHVTKTLASKR

SEQ ID NO: 49803 - protein, 149 aa, Artificial Sequence
  derived and/or modified sequence
MDLNSASTVVLQVLTQATSQDTAVLKPAEEQLKQWETQPGFYSVLLNIFTNHTLDINVRWLAVLYFKHGIDRYWRRVAPHALSEEEKTTLRAGLITNFNEPINQIATQIAVLIAKVARLDCPRQWPELIPTLIESVKVQDDLRQHRALL

SEQ ID NO: 49804 - protein, 474 aa, Artificial Sequence
  derived and/or modified sequence
MMQTLQGPTNVEDMNALLIKDAVYNAVGLAAYELFDSVDFDQWFKNQLLPELQVIHNRYKPLRRRVIWLIGQWISVKFKSDLRPMLYEAICNLLQDQDLVVRIETATTLKLTVDDFEFRTDQFLPYLETMFTLLFQLLQQVTECDTKMHVLHVLSCVIERVNMQIRPYVGCLVQYLPLLWKQSEEHNMLRCAILTTLIHLVQGLGADSKNLYPFLLPVIQLSTDVSQPPHVYLLEDGLELWLVTLENSPCITPELLRIFQNMSPLLELSSENLRTCFKIINGYIFLSSTEFLQTYAVGLCQSFCELLKEITTEGQVQVLKVVENALKVNPILGPQMFQPILPYVFKGIIEGERYPVVMSTYLGVMGRVLLQNTSFFSSLLNEMAHKFNQEMDQLLGNMIEMWVDRMDNITQPERRKLSALALLSLLPSDNSVIQDKFCGIINISVEGLHDVMTEDPETGTYKDCMLMSHLEEPK

SEQ ID NO: 49805 - DNA, 3048 bp, Artificial Sequence
  derived and/or modified sequence
atggtgcagccaatcatacatctgggttacgtcgtgtactctctgctttacctgggctataaacccgtccagcacgtgacggccctgaacaccgtatccagctgccacaagatggtgtctatggatctgaactcggcttcaacagtggttctgcaggtcctcacacaagcaacctctcaagatacagctgtcttgaagccagccgaagagcaacttaagcagtgggaaacccagccaggattctatagtgtgctccttaatatctttacaaaccacaccctggacattaacgtgcggtggctggctgtcctgtatttcaaacacgggattgacagatactggagaagagttgcccctcatgcactgtctgaagaggagaagacaactctccgggccgggcttatcaccaattttaacgagccaatcaatcagatagccactcagatcgccgtactcatcgcaaaggttgcccgactcgactgccctcggcagtggcctgagctaattcccaccctcatcgaaagcgtgaaggtgcaggacgacctgcggcagcacagagccctgctcacattttatcacgttacgaaaacgctggctagcaagagacttgctgccgaccggaagcttttctacgaccttgcttcgggaatctacaatttcgcttgcagcctttggaatcaccacaccgatacatttctccaggaggtgagcagcggcaacgaagccgccatactgagctctctggaacggacattgttgtccctgaaagtccttcgaaagttaaccgtgaatggtttcgtcgagccgcacaaaaatatggaggtcatgggcttcctgcacggcatcttcgaaaggctgaagcaattcctagagtgtagtcggtctattggaaccgacaacgtctgtagggataggctcgagaaaaccattattctgtttacgaaggtcctgcttgatttcttagatcagcaccccttcagtttcacgcctctcattcagcgaagtctggagttcagtgtgagctatgttttcactgaagttggcgaaggggtcacattcgagcgcttcattgtgcagtgtatgaatttaattaagatgatcgtgaagaattatgcatataaaccaagtaaaaacttcgaagattcaagccccgagactctggaggcacataagatcaaaatggctttcttcacctatcctacactcacagagatctgcaggagattggtgtcacattatttcctgctcaccgaggaagagctgacgatgtgggaggaagatccagaggggttcactgtcgaagaaacggggggagactcctggaagtatagcctgcgcccctgcaccgaggtgctcttcattgacattttccatgaatacaatcaaaccttgacacccgttctgctggagatgatgcaaacccttcaggggcctaccaacgtggaggatatgaacgccctcctcataaaagatgctgtgtataatgctgtggggctggctgcctatgaactcttcgactcagtcgatttcgatcagtggtttaagaaccaattactcccggagctgcaggttattcataatcgctacaagcccttacgacggcgggtcatatggctgatcgggcagtggatatcagtaaagtttaaatccgacctccgacctatgctctacgaggcaatctgtaacctgttgcaggaccaggatcttgtggttcgcatcgagacggctaccacgctcaagctgacggtggacgattttgagttcaggacggatcagtttttgccgtacctagaaaccatgtttaccctactttttcagttgctgcaacaagtgacagaatgtgacacaaagatgcacgtgctgcacgtgctctcatgcgtgatagagagggtgaacatgcagatccgcccctacgtcggatgtttagttcagtatttacctttgttgtggaagcaaagtgaagagcataacatgcttcgttgcgccatcctgacgaccctcatccatctggtgcaaggactgggggctgattctaagaatctgtatccatttcttctgcccgtcatccagttatcaactgatgtgtcgcagccaccccacgtctacttgctggaggacgggctggaattgtggctcgtcactctggagaacagcccttgcataacccccgagttgctgagaatatttcagaatatgtctcccttgctggagctctccagtgagaacttgcgaacctgtttcaagataatcaacgggtacatctttctgtcctccacagagtttcttcagacttacgcagtggggctgtgccaatcattttgtgaactactcaaagagataactaccgaagggcaggtgcaagtgctcaaggtggtagagaatgccctgaaggtgaatccaattttggggccccagatgttccagccgattctaccctacgtttttaagggtatcatcgagggcgaacggtatcccgtagtcatgtcaacctacctcggcgtgatgggcagggtcctccttcaaaatacctccttcttcagctcactgctcaacgaaatggctcataaatttaaccaggaaatggaccagctactcggcaacatgatcgaaatgtgggtcgaccggatggacaatatcacgcagccagaaaggcgcaagctgagcgcccttgcactgctttctctcctaccatctgataacagcgtgatccaagacaaattctgcgggatcatcaatatttcagttgaaggtctgcacgacgtcatgacagaagaccccgaaactgggacttacaaggactgtatgcttatgtctcacctcgaggagcccaaagtgacggaggatgaagaaccgcctacagagcaagacaagaggaagaagatgttagcccttaaggatcccgtgcacaccgtatcactgcagcagtttatttatgaaaaactcaaggcccaacaagaaatgctgggagaacaggggtttcaatcccttatggagacggtggacaccgagattgtgacccagctgcaagaattcctgcagggattttag

SEQ ID NO: 49806 - DNA, 4356 bp, Artificial Sequence
  derived and/or modified sequence
tttggagctgcgacgccaaacatggcgtgttcctagaagccgctttcggcatcagtaggcggcggcgtggggtctggcagcgtggggagagggaccaaccgacgccacttcgtgttgggaagtgggagcgggagggccgggcaattcccgaccgaaccaaacggtttccatggatctcaatagtgccagcactgttgttcttcaggtgttaacacaggccaccagtcaggatactgctgtgttaaaaccagctgaggagcagttgaagcagtgggagacacagccaggtttctattcagtgttgctgaatattttcaccaaccacactttggatataaatgtaaggtggcttgctgtactgtattttaaacatggaattgatcgctactggagacgtgtagcacctcatgctctctcagaggaggagaaaactactctgcgtgcagggctcatcaccaacttcaatgaaccaataaaccagattgcaactcagattgcagtgctcattgcaaaagttgctagattggattgtcccagacagtggcctgaactaattcccactcttatagagtctgttaaagtccaggatgatcttcgacagcacagagcattacttaccttctatcatgttaccaagacactggcatctaaacgacttgctgctgatagaaaactattttatgatttagcttctggaatttataattttgcctgctctctgtggaatcaccacacagacacattcctgcaagaagtttcttctggcaatgaagctgcaattttgagttcactagaacgaacactgctatcattgaaagtgctgcgtaagttaactgttaatggatttgtggaacctcataagaatatggaggtgatgggttttttacatggaatatttgaacgtctaaaacagtttctggaatgcagtagaagtataggtacagataatgtgtgtagagatagactggaaaagaccatcattctttttactaaagtgcttttggacttcttggatcagcatcctttttcatttactcctctaattcagagatcactggaattttctgtaagctatgtttttacagaagttggtgaaggcgttacatttgaacgattcattgtccaatgtatgaatcttattaagatgattgtcaaaaattatgcttataagccatccaaaaattttgaagatagcagccctgaaactcttgaagcccataagattaagatggcattcttcacatatcctactttgacagagatatgtagaagattagtctctcattatttcctattaactgaagaagaactgacaatgtgggaagaagacccagaaggctttacagtggaagaaacaggaggagattcttggaaatatagtttgaggccatgcactgaagtattatttatagatatattccatgaatataatcagactcttactcctgtacttctagaaatgatgcaaacacttcaaggacccacaaatgtggaagatatgaatgcactgttaatcaaagatgctgtgtataatgctgttggattagctgcttatgagctctttgacagtgttgattttgatcagtggtttaaaaaccagcttcttccagaattacaagtcattcacaataggtataagccattgcgacgcagggtgatttggctcatcggtcagtggatttctgtgaaattcaagtctgacttaagacccatgctttatgaagcaatctgtaacttgcttcaagatcaagatttagtggtccgtattgaaacagctacaactttgaagttaactgttgatgattttgaatttagaacagatcagtttctaccgtatttggaaaccatgttcacactactttttcagttactgcagcaagttacagaatgtgacacaaagatgcatgttttgcatgtcctttcttgtgtgatcgaaagagtcaacatgcagatacgaccatatgtgggatgtttggtacaatatttgcccctcctttggaagcagagtgaagaacacaatatgttgagatgtgctattttgacaacacttattcatcttgttcagggattaggagcagacagcaagaacctgtaccctttcctgctcccagttattcaactgagtacagatgtttcacagcctccacatgtttatcttctggaagatggtttagaattatggttagtaactttggaaaacagtccatgtattacaccagagttgcttcgtatatttcagaatatgtcaccacttcttgaactaagttcagaaaatcttagaacttgctttaagatcatcaatggttatatctttttatcatcaacagaatttttacagacatacgcagtaggtctatgccagtccttttgtgaacttttaaaggaaattactacagaaggtcaagttcaggtgctcaaggttgtggaaaatgcccttaaagtgaacccaatactaggtccacaaatgtttcaaccgattttaccctatgttttcaagggtattatagaaggggagaggtatcctgtagtgatgtccacgtatcttggagttatgggtcgagttctactacaaaacactagttttttttcttcactacttaatgagatggcccataaatttaatcaggagatggaccagcttttgggaaatatgattgaaatgtgggttgatcgaatggacaacattacccagcctgaaagaagaaaactttcagctttggctttgctctctcttctgccatctgataatagtgttatccaagataaattctgtgggattataaacatttcagtagaaggcctgcatgatgtcatgacggaagatcctgaaacaggaacttataaagactgtatgttgatgtctcatcttgaggaaccaaaagtaacagaagatgaagaaccacccacagaacaagataagaggaaaaagatgctggccctgaaggaccctgttcatacagtgtcactgcagcagttcatctacgagaagctcaaggcacagcaggagatgctaggagaacaaggtttccagtccctcatggaaacagtggatacggagattgtcacccagctacaggagtttttgcaaggattctaagagcacatgacatgtggctgcctcccctttcagaaacaagctgagtaacccagcctgccgtttgtatgtgagagcctgctgagatgaagaaatcacttcatgaaaataagcaaagaccacacattttttactacaaaatgtaaaggataaatgtaaatcctgcataactaaaatcacaaacctattcctcaaaagaatttaattttatatttatgagggggcccttcactaaaaagtacatgtaaaagtacatttgatgacaatagctgcttagtttcctgttaagagaagaaactttatcttttaattatgtgctcttaatatttgaagatgagagttaatacctgagatgtttttctgcaaccaaaattcattaaatttggctgccttatcctttttttaagctaatgaaactacaggtttgaaaaatgacaaagctgttcagatgatgctattaaagaaatgtgtgtactaagcaaaaatatataaatagtgacaaatacacattaccaagcttatcttgcaagggagttattttcatctaacatagaaagtgtgttttatcagacaaatgcttttattttcattctaataatttgatacagaaattagtaaaggcatttttttctttttttttccagtaaatacattgggtctataaatgtgcatttgtaagggccacaaaagtgaacgtgtggtactgtagtaccacgtgggagacctctggttatggtttagtcctagttcctttgttactcctgtgagcaccgagaagaactgggcgactcccagtcccacctgtgctgtgacagtcccacgtggctatgacagactgtttagtacttacccttctcaggttcctcagtgcaggggtgcatcagggcctcaataataggggtatacctgggaggatccagcagtaatccccagggtactaggattactagtactctgatggaactagtcttccttccttattcctcgaacatgcagtacataaaaaggggaaaaggagaaaaaaaaagccttactttgttttacttgccatttattgtaaggaaactttaaagcattttttaggaaatactcaaaagcaaggttggaaaatgttttatctttctatagaaagttgggtacagtatgtaactgcgggaaacccactgcccctttgtaagctgtggaacccaaactgtatggggatatttgatgttttcagaaagaggaagaaaatatggtccaaattaaattttccaaagata

SEQ ID NO: 49807 - DNA, 3564 bp, Artificial Sequence
  derived and/or modified sequence
atagcaccaggtgtgaaactgctgggtcatagaagatacagtcacgagttgcttaaggctgggatacatcctgagaaatgggtcgttaggcaattttgttgttctatgaacatcatatgaacaaacctagatggtacagcctattatacacttgggctatgtggtatatagcttattgtatctaggctataagcctgtacagcatgttactgcactgaatactgtaagcagttgtcacaaaatggtttccatggatctcaatagtgccagcactgttgttcttcaggtgttaacacaggccaccagtcaggatactgctgtgttaaaaccagctgaggagcagttgaagcagtgggagacacagccaggtttctattcagtgttgctgaatattttcaccaaccacactttggatataaatgtaaggtggcttgctgtactgtattttaaacatggaattgatcgctactggagacgtgtagcacctcatgctctctcagaggaggagaaaactactctgcgtgcagggctcatcaccaacttcaatgaaccaataaaccagattgcaactcagattgcagtgctcattgcaaaagttgctagattggattgtcccagacagtggcctgaactaattcccactcttatagagtctgttaaagtccaggatgatcttcgacagcacagagcattacttaccttctatcatgttaccaagacactggcatctaaacgacttgctgctgatagaaaactattttatgatttagcttctggaatttataattttgcctgctctctgtggaatcaccacacagacacattcctgcaagaagtttcttctggcaatgaagctgcaattttgagttcactagaacgaacactgctatcattgaaagtgctgcgtaagttaactgttaatggatttgtggaacctcataagaatatggaggtgatgggttttttacatggaatatttgaacgtctaaaacagtttctggaatgcagtagaagtataggtacagataatgtgtgtagagatagactggaaaagaccatcattctttttactaaagtgcttttggacttcttggatcagcatcctttttcatttactcctctaattcagagatcactggaattttctgtaagctatgtttttacagaagttggtgaaggcgttacatttgaacgattcattgtccaatgtatgaatcttattaagatgattgtcaaaaattatgcttataagccatccaaaaattttgaagatagcagccctgaaactcttgaagcccataagattaagatggcattcttcacatatcctactttgacagagatatgtagaagattagtctctcattatttcctattaactgaagaagaactgacaatgtgggaagaagacccagaaggctttacagtggaagaaacaggaggagattcttggaaatatagtttgaggccatgcactgaagtattatttatagatatattccatgaatataatcagactcttactcctgtacttctagaaatgatgcaaacacttcaaggacccacaaatgtggaagatatgaatgcactgttaatcaaagatgctgtgtataatgctgttggattagctgcttatgagctctttgacagtgttgattttgatcagtggtttaaaaaccagcttcttccagaattacaagtcattcacaataggtataagccattgcgacgcagggtgatttggctcatcggtcagtggatttctgtgaaattcaagtctgacttaagacccatgctttatgaagcaatctgtaacttgcttcaagatcaagatttagtggtccgtattgaaacagctacaactttgaagttaactgttgatgattttgaatttagaacagatcagtttctaccgtatttggaaaccatgttcacactactttttcagttactgcagcaagttacagaatgtgacacaaagatgcatgttttgcatgtcctttcttgtgtgatcgaaagagtcaacatgcagatacgaccatatgtgggatgtttggtacaatatttgcccctcctttggaagcagagtgaagaacacaatatgttgagatgtgctattttgacaacacttattcatcttgttcagggattaggagcagacagcaagaacctgtaccctttcctgctcccagttattcaactgagtacagatgtttcacagcctccacatgtttatcttctggaagatggtttagaattatggttagtaactttggaaaacagtccatgtattacaccagagttgcttcgtatatttcagaatatgtcaccacttcttgaactaagttcagaaaatcttagaacttgctttaagatcatcaatggttatatctttttatcatcaacagaatttttacagacatacgcagtaggtctatgccagtccttttgtgaacttttaaaggaaattactacagaaggtcaagttcaggtgctcaaggttgtggaaaatgcccttaaagtgaacccaatactaggtccacaaatgtttcaaccgattttaccctatgttttcaagggtattatagaaggggagaggtatcctgtagtgatgtccacgtatcttggagttatgggtcgagttctactacaaaacactagttttttttcttcactacttaatgagatggcccataaatttaatcaggagatggaccagcttttgggaaatatgattgaaatgtgggttgatcgaatggacaacattacccagcctgaaagaagaaaactttcagctttggctttgctctctcttctgccatctgataatagtgttatccaagataaattctgtgggattataaacatttcagtagaaggcctgcatgatgtcatgacggaagatcctgaaacaggaacttataaagactgtatgttgatgtctcatcttgaggaaccaaaagtaacagaagatgaagaaccacccacagaacaagataagaggaaaaagatgctggccctgaaggaccctgttcatacagtgtcactgcagcagttcatctacgagaagctcaaggcacagcaggagatgctaggagaacaaggtttccagtccctcatggaaacagtggatacggagattgtcacccagctacaggagtttttgcaaggattctaagagcacatgacatgtggctgcctcccctttcagaaacaagctgagtaacccagcctgccgtttgtatgtgagagcctgctgagatgaagaaatcacttcatgaaaataagcaaagaccacacattttttactacaaaatgtaaaggataaatgtaaatcctgcataactaaaatcacaaacctattcctcaaaagaatttaattttatatttatgagggggcccttcactaaaaagtacatgtaaaagtacatttgatgacaatagctgcttagtttcctgttaagagaagaaactttatcttttaattatgtgctcttaatatttgaagatgagagttaatacctgagatgtttttctgcaaccaaaattcattaaatttggctg

SEQ ID NO: 49808 - DNA, 530 bp, Artificial Sequence
  derived and/or modified sequence
gacaaagcccctccttccccttcccgccgttcgcctatcgccttctctctctgccggtcgcatgcgcgctggtctcctgtgacgtagttttcgcgcgtccgcgtcgtttggagctgcgacgccaaacatggcgtgttcctagaagccgctttcggcatcagtaggcggcggcgtggggtctggcagcgtggggagagggaccaaccgacgccacttcgtgttgggaagtgggagcgggagggccgggcaattcccgaccgaaccaaacgctaaggagacaccagagggtgatggttgacagtagttggtacctcacagctgggcactgatcaggtttccatggatctcaatagtgccagcactgttgttcttcaggtgttaacacaggccaccagtcaggatactgctgtgttaaaaccagctgaggagcagttgaagcagtgggagacacagccaggtttctattcagtgttgctgaatattttcaccaaccacactttggatataaatgtaaggtggcttgctgtact

SEQ ID NO: 49809 - DNA, 554 bp, Artificial Sequence
  derived and/or modified sequence
acatgcttttaatgaaaaagtgaaggtagttgtccgtttatagagaggagcttcatggagaggtttccatggatctcaatagtgccagcactgttgttcttcaggtgttaacacaggccaccagtcaggatactgctgtgttaaaaccagctgaggagcagttgaagcagtgggagacacagccaggtttctattcagtgttgctgaatattttcaccaaccacactttggatataaatgtaaggtggcttgctgtactgtattttaaacatggaattgatcgctactggagacgtgtagcacctcatgctctctcagaggaggagaaaactactctgcgtgcagggctcatcaccaacttcaatgaaccaataaaccagattgcaactcagattgcagtgctcattgcaaaagttgctagattggattgtcccagacagtggcctgaactaattcccactcttatagagtctgttaaagtccaggatgatcttcgacagcacagagcattacttaccttctatcatgttaccaagacactggcatctaaacga

SEQ ID NO: 49810 - DNA, 584 bp, Artificial Sequence
  derived and/or modified sequence
actgccgggaattggagtcacagagggaggaaggccgaaccgcgggagcctacagatcccagaagacaccgcgctaccgaggactgcagtctggagttggagcccttgtcccaaccagggctggataagaaggtttccatggatctcaatagtgccagcactgttgttcttcaggtgttaacacaggccaccagtcaggatactgctgtgttaaaaccagctgaggagcagttgaagcagtgggagacacagccaggtttctattcagtgttgctgaatattttcaccaaccacactttggatataaatgtaaggtggcttgctgtactgtattttaaacatggaattgatcgctactggagacgtgtagcacctcatgctctctcagaggaggagaaaactactctgcgtgcagggctcatcaccaacttcaatgaaccaataaaccagattgcaactcagattgcagtgctcattgcaaaagttgctagattggattgtcccagacagtggcctgaactaattcccactcttatagagtctgttaaagtccaggatgatcttcgacagcacagagcattact

SEQ ID NO: 49811 - DNA, 3048 bp, Artificial Sequence
  derived and/or modified sequence
atggtgcagcccatcatccacctgggctacgtggtgtacagcctgctgtacctgggctacaagcctgtgcagcacgtgacagccctgaacacagtgagcagctgccacaagatggtgtccatggacctgaacagcgccagcacagtggtgctgcaggtgctgacccaggccaccagccaggacacagctgtgctgaagccagctgaggagcagctgaagcagtgggagacccagcccggcttctacagcgtgctgctgaacatcttcaccaaccacaccctggacatcaacgtgcgctggctggccgtgctgtacttcaagcacggcatcgaccgctactggaggagagtggccccccacgccctgtctgaggaggagaagaccaccctgcgggccggcctcatcaccaacttcaatgagcccatcaaccagatcgccacccagattgctgtgctgattgccaaggtggcccggctggactgcccccggcagtggccagagctgatccccaccctgattgaatctgtgaaggtgcaggatgacctgcggcagcaccgggccctgctgaccttctaccacgtgaccaagaccctggccagcaagaggctggccgctgacaggaagctgttctatgacctggccagcggcatctacaactttgcctgcagcctgtggaaccaccacacagacaccttcctgcaggaggtgtcctctggaaatgaggccgccatcctgagcagcctggagaggaccctgctgagcctgaaggtgctgaggaagctgactgtgaatggatttgtggagccccacaagaacatggaggtgatgggcttcctgcacggcatctttgagcggctgaagcagttcctggagtgcagccgcagcatcggcacagacaacgtgtgccgggaccggctggagaagaccatcatcctcttcaccaaggtgctgctggacttcctggaccagcaccccttctccttcacccccctcatccagaggagcctggagttctctgtgtcctatgtgttcacagaggtgggggagggcgtgacctttgagcgcttcatcgtgcagtgcatgaacctgatcaagatgattgtgaagaactatgcctacaagcccagcaagaactttgaggacagcagccctgagaccctggaggcccacaagatcaagatggccttcttcacctaccccaccctgacagagatctgccggcggctggtgagccactacttcctgctgacagaggaggagctgaccatgtgggaggaggaccctgagggcttcaccgtggaggagaccggcggggacagctggaagtacagcctgcggccctgcacagaggtgctcttcatcgacatcttccacgagtacaaccagaccctgacccctgtgctgctggagatgatgcagaccctgcagggccccaccaacgtggaggacatgaatgccctgctgatcaaggatgctgtgtacaatgctgtgggcctggccgcctatgagctgtttgattctgtggactttgaccagtggttcaagaaccagctgctgcctgagctgcaggtgatccacaaccgctacaagcccctgcggcggcgggtcatctggctgattggccagtggatctctgtgaagttcaagagtgacctgcggcccatgctgtatgaggccatctgcaacctgctgcaggaccaggacctggtggtgagaattgaaacagccaccaccctgaagctgactgtggatgactttgagttcagaacagaccagttcctgccctacctggagaccatgttcaccctgctcttccagctgctgcagcaggtgacagaatgtgacaccaagatgcacgtgctgcacgtgctgagctgtgtgattgaaagagtgaacatgcagatccggccctacgtgggctgcctggtgcagtacctgcccctgctgtggaagcagagcgaggagcacaacatgctgcgctgtgccatcctgaccaccctcatccacctggtgcagggcctgggcgctgacagcaagaacctgtaccccttcctgctgcctgtgatccagctgagcacagatgtgtcccagcccccccacgtgtacctgctggaggatggcctggagctgtggctggtgaccctggagaacagcccctgcatcaccccagagctgctgcgcatcttccagaacatgagccccctgctggagctgagcagcgagaacctgcggacctgcttcaagatcatcaatggctacatcttcctgagcagcacagagttcctgcagacctatgctgtgggcctgtgccagagcttctgtgagctgctgaaggagatcaccacagagggccaggtgcaggtgctgaaggtggtggagaatgccctgaaggtgaaccccatcctgggcccccagatgttccagcccatcctgccctacgtgttcaagggcatcattgaaggagagcgctaccctgtggtgatgagcacctacctgggcgtgatgggccgggtgctgctgcagaacaccagcttcttcagcagcctgctgaatgagatggcccacaagttcaaccaggagatggaccagctgctgggcaacatgattgagatgtgggtggacaggatggacaacatcacccagcctgagaggaggaagctgagcgccctggccctgctgagcctgctgcccagcgacaacagcgtcatccaggacaagttctgtggcatcatcaacatctctgtggagggcctgcatgatgtgatgacagaggaccctgagaccggcacctacaaggactgcatgctgatgagccacctggaggagcccaaggtgacagaagatgaggagcccccaacagagcaggacaagaggaagaagatgctggccctgaaggaccctgtgcacacagtgtccctgcagcagttcatctatgagaagctgaaggcccagcaggagatgctgggggagcagggcttccagagcctgatggagaccgtggacacagagatcgtgacccagctgcaggagttcctgcagggcttctag

SEQ ID NO: 49812 - DNA, 3048 bp, Artificial Sequence
  derived and/or modified sequence
atggtgcagcccatcatccacctgggctacgtggtgtacagcctgctgtacctgggctacaaacctgtacagcacgtaactgctttgaacactgtgtctagttgtcataagatggtctctatggacttgaattcagcatccaccgtggttctccaagtgttgacacaggcgacttcccaggatactgcggtgctcaaacccgccgaggaacagctgaagcagtgggagactcagcccggtttctacagtgtattgctcaatattttcacaaatcacacactggacatcaacgtgagatggctcgccgttctctattttaagcatggtatcgatcgatactggcgtcgggttgctcctcatgcgctgtccgaagaggagaagaccaccctaagagcggggttaataactaattttaacgagcccattaatcagattgccacgcaaatcgcggtgctgattgcaaaagttgcgcgcctcgattgcccccgccagtggcctgagctcatcccaaccctgatcgagagcgtgaaagtacaggacgatttacgccagcatcgcgcactgctaacgttctatcatgtcactaaaacgttagcgagcaagagactcgccgccgatagaaaactgttctatgatctcgcctctggaatttacaacttcgcatgtagtctctggaatcaccatacagatacgttccttcaggaagtctcctctgggaatgaggccgccatactgtcttccctggagagaactctactgtctctgaaagtgctgcgtaaactcaccgtcaatggtttcgtggaaccacacaagaatatggaggtcatgggctttttgcatgggatctttgagagactcaagcagttccttgagtgctctcggtccatcggtaccgacaacgtctgcagagaccggctggaaaagactattatcctgtttaccaaggtgctgttggactttttggaccaacacccatttagtttcacacctctcatccagagatctcttgaatttagtgtttcctatgtgtttactgaggtgggggaaggggtcacttttgaacggtttatcgtgcaatgcatgaatctcatcaaaatgatagtaaaaaactacgcctacaagccatcgaagaacttcgaggacagctcacctgaaaccctcgaagctcacaagattaaaatggccttctttacgtaccccactctgactgagatctgtaggcggttggtgtcccactacttcctcctgaccgaggaagagttgaccatgtgggaagaagaccctgagggattcaccgttgaggagaccggaggagactcatggaaatatagtctccgcccctgcacggaggtgcttttcatcgatatttttcacgaatataaccaaacgctcacaccagtcctgctcgagatgatgcagacacttcaaggccccaccaacgtggaagacatgaacgcactgcttattaaggatgcggtttataacgcagtcggattggctgcttatgagctgtttgattccgtggactttgaccagtggtttaaaaaccagctgctgccggaactgcaggtcattcacaaccgatacaagccccttcggcgcagggtgatttggctgattggccagtggatctcagtgaagtttaaaagcgacctacgcccgatgctatacgaggccatctgcaacttgcttcaggaccaggatttggttgtgagaattgagaccgcaactactctcaagctgaccgtggatgacttcgaatttcggacagaccagttcctgccttaccttgagacaatgttcacactactgttccaactactccagcaagtcacagaatgtgacaccaaaatgcacgtcctgcacgtgctcagctgtgtgattgagagagtaaacatgcagatccgtccttatgtcggatgcctggtacagtacctgcccctgctgtggaagcaaagcgaggagcacaacatgttgcgctgcgctattctgacaaccctcattcacctggtgcagggtctgggggccgattctaaaaatctgtatccttttctgctgcccgtgattcaattaagtacagacgtcagccagcccccccacgtgtaccttttggaggacggactagaactgtggctagtgaccctagaaaactcaccctgcattactcccgaactgctacggatattccagaatatgtcaccactacttgaactgtcgtccgaaaatctgaggacttgcttcaagattataaatgggtatattttcctgagcagcacagagtttctgcagacttacgctgttggcttatgccaatctttctgtgagctgctcaaagaaattacaaccgagggtcaggtccaggtgctaaaggtcgtcgagaatgcccttaaggtaaatcccatcctaggccctcaaatgtttcaaccaatcctgccgtacgtttttaaaggtatcatcgagggggagcgataccctgtggttatgagcacctatcttggtgttatgggcagagtactgctgcaaaataccagctttttcagtagcctgctcaacgagatggcacataagtttaaccaggagatggatcagcttctcggcaacatgatagaaatgtgggttgatcggatggacaacatcacccagccagaacgtagaaaacttagcgccctggcactcttaagtctgctgccgagcgacaactccgtgatccaagataagttttgcggcataatcaatatcagtgtggaaggactgcacgatgttatgactgaagaccctgagactggaacttacaaagattgtatgcttatgtcgcacttagaagaacctaaagttacggaggatgaggaaccccccacagaacaggacaagcggaaaaaaatgctggccctgaaagatcccgtgcatacagtgtccttgcagcagtttatatacgagaagctgaaagctcagcaggagatgctgggggaacaaggatttcagagtctgatggagactgtcgataccgagatcgtcacacagttgcaggaattcctgcagggtttttag

SEQ ID NO: 49813 - DNA, 3048 bp, Artificial Sequence
  derived and/or modified sequence
atggtgcagcctatcattcatcttggctacgttgtctactctcttctatacttgggctacaagccggttcagcatgtcaccgctctcaacacggtgtcctcatgccacaagatggtttccatggatttgaactctgcctcaactgtggtgttgcaggttctgactcaggctacctcccaggacactgcagttctcaagcccgctgaggagcagttgaaacagtgggaaactcagcccggattctattccgtgcttctgaacatattcactaaccacactttagatatcaatgtccgctggttggccgtcctctacttcaagcacggaatagatagatactggagacgggtggcccctcacgctttgtcagaggaggaaaagaccactctgcgtgccggtttaatcactaacttcaatgagcctataaatcagattgccacacaaattgccgtgcttatcgccaaagtggcccgattagattgcccgagacaatggcccgagctgatcccaactctcatcgagagcgtgaaagtacaggatgatctgcgccagcacagggcacttcttactttctaccatgtcaccaaaacgctggctagtaaacgtcttgccgctgaccgaaagctgttttatgacctggccagcgggatctacaacttcgcatgttccctgtggaatcaccacacagacacattcttgcaggaggtatcgtctggtaacgaggcggctatcctgagcagtttggaacggactctgctaagcttgaaagtactgaggaaattaacagtgaacggcttcgtggagccgcacaagaatatggaagtgatggggtttctccacggcatttttgagagactgaaacagttcctggagtgctcccgaagcataggcacggataatgtatgtcgcgaccgtttagagaaaacaatcatcctgttcacaaaggtgttgttggatttccttgatcagcatcctttctcttttactcccctcatacagcggagtcttgaattcagtgtgagctacgtattcactgaagtgggcgagggagtcacattcgagcgttttattgtacagtgcatgaacttaataaaaatgatcgttaagaattacgcctataagcctagcaagaatttcgaggatagttccccagagacgctcgaggctcataagataaaaatggcatttttcacctatccaacattgacagaaatctgccgcagactagtatcacattactttttactgacagaggaagagcttaccatgtgggaagaagatccggaaggattcactgtcgaggagacgggcggagactcctggaaatattctctgcggccttgcacggaagtgcttttcattgatatctttcacgaatataaccagactcttactcccgtgctgttggagatgatgcaaaccctccagggccctacaaatgtggaggatatgaacgctttactcataaaagacgccgtgtataacgcggtcgggctggctgcttacgagctattcgatagcgtagactttgatcaatggttcaagaatcaattactccccgagctccaggtgatccacaaccggtataaaccactgcgccgaagagttatatggctaataggacagtggatctcagtcaagttcaaaagcgacctgcgaccaatgttatacgaagcaatctgcaacctgctgcaagaccaagacttagtagttagaatcgagacagctaccacgctgaagctgacagtggacgatttcgaattccgaaccgatcagtttctcccctatctcgaaacaatgttcacattgctctttcagctccttcaacaagtgacagagtgcgacactaagatgcacgttcttcatgtgctctcgtgcgtcatagaaagagtgaacatgcagattcgcccttatgtaggttgtcttgtccagtatttgccactcctgtggaaacagagcgaggaacataacatgctgaggtgtgccatcttgaccaccctgatccacttagttcagggtctcggagcagattccaagaatctgtacccttttctgctcccggtcatacagctctcaactgatgttagccagcctcctcatgtgtatctgctggaggatgggcttgagctctggctcgtgaccttagagaatagcccctgcatcacacctgaactgttgagaatcttccaaaatatgtctccgttgctggaactcagttcggaaaatttgcgcacctgcttcaagattatcaacgggtatatattcttatcatccaccgagttcctgcagacatacgcagtgggcctgtgccagagcttctgcgaattgctgaaggagataaccactgagggccaagttcaggtccttaaagtggttgagaacgctctcaaagttaatccgatcctgggaccccagatgttccaacctattctgccctacgtcttcaaaggcattatagagggggagcgctaccctgtcgtaatgagcacatatctgggagttatggggagggttttattacagaatacctccttttttagcagcctgcttaatgaaatggctcacaagttcaaccaggagatggatcagctgctgggcaatatgattgaaatgtgggttgaccgcatggacaacattactcagccggaacggcgaaagctcagcgccttggccttgttgtcactgctgccttctgacaactccgtcattcaggacaagttctgtggcattatcaacatttcagtggagggactgcatgacgttatgactgaagatccagaaactggaacgtacaaagactgcatgctcatgagccacctggaggaaccaaaagtgacggaggacgaggaaccacctaccgagcaggacaagagaaagaagatgttggcccttaaggacccagtccataccgtgagcctccagcagttcatctacgagaaactcaaggcccagcaagaaatgctgggcgaacagggcttccagtctttaatggagaccgtcgacactgagattgtgacccagttgcaggagtttctgcaagggttttag

SEQ ID NO: 49814 - DNA, 3048 bp, Artificial Sequence
  derived and/or modified sequence
atggtgcagcccatcatccacctgggctacgtggtgtacagcctgctgtacctgggctacaagcccgtgcagcacgtgaccgccctgaacaccgtgagcagctgccacaagatggtgagcatggacctgaacagcgccagcaccgtggtgctgcaggtgctgacccaggccaccagccaggacaccgccgtgctgaagcccgccgaggagcagctgaagcagtgggagacccagcccggcttctacagcgtgctgctgaacatcttcaccaaccacaccctggacatcaacgtgagatggctggccgtgctgtacttcaagcacggcatcgacagatactggagaagagtggccccccacgccctgagcgaggaggagaagaccaccctgagagccggcctgatcaccaacttcaacgagcccatcaaccagatcgccacccagatcgccgtgctgatcgccaaggtggccagactggactgccccagacagtggcccgagctgatccccaccctgatcgagagcgtgaaggtgcaggacgacctgagacagcacagagccctgctgaccttctaccacgtgaccaagaccctggccagcaagagactggccgccgacagaaagctgttctacgacctggccagcggcatctacaacttcgcctgcagcctgtggaaccaccacaccgacaccttcctgcaggaggtgagcagcggcaacgaggccgccatcctgagcagcctggagagaaccctgctgagcctgaaggtgctgagaaagctgaccgtgaacggcttcgtggagccccacaagaacatggaggtgatgggcttcctgcacggcatcttcgagagactgaagcagttcctggagtgcagcagaagcatcggcaccgacaacgtgtgcagagacagactggagaagaccatcatcctgttcaccaaggtgctgctggacttcctggaccagcaccccttcagcttcacccccctgatccagagaagcctggagttcagcgtgagctacgtgttcaccgaggtgggcgagggcgtgaccttcgagagattcatcgtgcagtgcatgaacctgatcaagatgatcgtgaagaactacgcctacaagcccagcaagaacttcgaggacagcagccccgagaccctggaggcccacaagatcaagatggccttcttcacctaccccaccctgaccgagatctgcagaagactggtgagccactacttcctgctgaccgaggaggagctgaccatgtgggaggaggaccccgagggcttcaccgtggaggagaccggcggcgacagctggaagtacagcctgagaccctgcaccgaggtgctgttcatcgacatcttccacgagtacaaccagaccctgacccccgtgctgctggagatgatgcagaccctgcagggccccaccaacgtggaggacatgaacgccctgctgatcaaggacgccgtgtacaacgccgtgggcctggccgcctacgagctgttcgacagcgtggacttcgaccagtggttcaagaaccagctgctgcccgagctgcaggtgatccacaacagatacaagcccctgagaagaagagtgatctggctgatcggccagtggatcagcgtgaagttcaagagcgacctgagacccatgctgtacgaggccatctgcaacctgctgcaggaccaggacctggtggtgagaatcgagaccgccaccaccctgaagctgaccgtggacgacttcgagttcagaaccgaccagttcctgccctacctggagaccatgttcaccctgctgttccagctgctgcagcaggtgaccgagtgcgacaccaagatgcacgtgctgcacgtgctgagctgcgtgatcgagagagtgaacatgcagatcagaccctacgtgggctgcctggtgcagtacctgcccctgctgtggaagcagagcgaggagcacaacatgctgagatgcgccatcctgaccaccctgatccacctggtgcagggcctgggcgccgacagcaagaacctgtaccccttcctgctgcccgtgatccagctgagcaccgacgtgagccagcccccccacgtgtacctgctggaggacggcctggagctgtggctggtgaccctggagaacagcccctgcatcacccccgagctgctgagaatcttccagaacatgagccccctgctggagctgagcagcgagaacctgagaacctgcttcaagatcatcaacggctacatcttcctgagcagcaccgagttcctgcagacctacgccgtgggcctgtgccagagcttctgcgagctgctgaaggagatcaccaccgagggccaggtgcaggtgctgaaggtggtggagaacgccctgaaggtgaaccccatcctgggcccccagatgttccagcccatcctgccctacgtgttcaagggcatcatcgagggcgagagataccccgtggtgatgagcacctacctgggcgtgatgggcagagtgctgctgcagaacaccagcttcttcagcagcctgctgaacgagatggcccacaagttcaaccaggagatggaccagctgctgggcaacatgatcgagatgtgggtggacagaatggacaacatcacccagcccgagagaagaaagctgagcgccctggccctgctgagcctgctgcccagcgacaacagcgtgatccaggacaagttctgcggcatcatcaacatcagcgtggagggcctgcacgacgtgatgaccgaggaccccgagaccggcacctacaaggactgcatgctgatgagccacctggaggagcccaaggtgaccgaggacgaggagccccccaccgagcaggacaagagaaagaagatgctggccctgaaggaccccgtgcacaccgtgagcctgcagcagttcatctacgagaagctgaaggcccagcaggagatgctgggcgagcagggcttccagagcctgatggagaccgtggacaccgagatcgtgacccagctgcaggagttcctgcagggcttctag

SEQ ID NO: 49815 - protein, 1053 aa, Artificial Sequence
  derived and/or modified sequence
MPTAESEAKVKTKVRFEELLKTHSDLMREKKKLKKKLVRSEENISPDTIRSNLHYMKETTSDDPDTIRSNLPHIKETTSDDVSAANTNNLKKSTRVTKNKLRNTQLATENPNGDASVEEDKQGKPNKKVIKTVPQLTTQDLKPETPENKVDSTHQKTHTKPQPGVDHQKSEKANEGREETDLEEDEELMQAYQCHVTEEMAKEIKRKIRKKLKEQLTYFPSDTLFHDDKLSSEKRKKKKEVPVFSKAETSTLTISGDTVEGEQKKESSVRSVSSDSHQDDEISSMEQSTEDSMQDDTKPKPKKTKKKTKAVADNNEDVDGDGVHEITSRDSPVYPKCLLDDDLVLGVYIHRTDRLKSDFMISHPMVKIHVVDEHTGQYVKKDDSGRPVSSYYEKENVDYILPIMTQPYDFKQLKSRLPEWEEQIVFNENFPYLLRGSDESPKVILFFEILDFLSVDEIKNNSEVQNQECGFRKIAWAFLKLLGANGNANINSKLRLQLYYPPTKPRSPLSVVEAFEWWSKCPRNHYPSTLYVTVRGLKVPDCIKPSYRSMMALQEEKGKPVHCERHHESSSVDTEPGLEESKEVIKWKRLPGQACRIPNKHLFSLNAGERGCFCLDFSHNGRILAAACASRDGYPIILYEIPSGRFMRELCGHLNIIYDLSWSKDDHYILTSSSDGTARIWKNEINNTNTFRVLPHPSFVYTAKFHPAVRELVVTGCYDSMIRIWKVEMREDSAILVRQFDVHKSFINSLCFDTEGHHMYSGDCTGVIVVWNTYVKINDLEHSVHHWTINKEIKETEFKGIPISYLEIHPNGKRLLIHTKDSTLRIMDLRILVARKFVGAANYREKIHSTLTPCGTFLFAGSEDGIVYVWNPETGEQVAMYSDLPFKSPIRDISYHPFENMVAFCAFGQNEPILLYIYDFHVAQQEAEMFKRYNGTFPLPGIHQSQDALCTCPKLPHQGSFQIDEFVHTESSSTKMQLVKQRLETVTEVIRSCAAKVNKNLSFTSPPAVSSQQSKLKQSNMLTAQEILHQFGFTQTDSHFAEFNTCILWWKKH

SEQ ID NO: 49816 - protein, 1053 aa, Artificial Sequence
  derived and/or modified sequence
MPTTESEAKVKTKVRFEELLKTHSDLMREKKKLKKKLVRSEENISPDTIRSNLHYMKETTSDDPDTIRSNLPHIKETTSDDVSAANTNNLKKSTRVTKNKLRNTQLATENPNGDASVEEDKQGKPNKKVIKTVPQLTTQDLKPETPENKVDSTHQKTHTKPQPGVDHQKSEKANEGREETDLEEDEELMQAYQCHVTEEMAKEIKRKIRKKLKEQLTYFPSDTLFHDDKLSSEKRKKKKEVPVFSKAETSTLTISGDTVEGEQKKESSVRSVSSDSHQDDEISSMEQSTEDSMQDDTKPKPKKTKKKTKAVADNNEDVDGDGVHEITSRDSPVYPKCLLDDDLVLGVYIHRTDRLKSDFMISHPMVKIHVVDEHTGQYVKKDDSGRPVSSYYEKENVDYILPIMTQPYDFKQLKSRLPEWEEQIVFNENFPYLLRGSDESPKVILFFEILDFLSVDEIKNNSEVQNQECGFRKIAWAFLKLLGANGNANINSKLRLQLYYPPTKPRSPLSVVEAFEWWSKCPRNHYPSTLYVTVRGLKVPDCIKPSYRSMMALQEEKGKPVHCERHHESSSVDTEPGLEESKEVIKWKRLPGQACRIPNKHLFSLNAGERGCFCLDFSHNGRILAAACASRDGYPIILYEIPSGRFMRELCGHLNIIYDLSWSKDDHYILTSSSDGTARIWKNEINNTNTFRVLPHPSFVYTAKFHPAVRELVVTGCYDSMIRIWKVEMREDSAILVRQFDVHKSFINSLCFDTEGHHMYSGDCTGVIVVWNTYVKINDLEHSVHHWTINKEIKETEFKGIPISYLEIHPNGKRLLIHTKDSTLRIMDLRILVARKFVGAANYREKIHSTLTPCGTFLFAGSEDGIVYVWNPETGEQVAMYSDLPFKSPIRDISYHPFENMVAFCAFGQNEPILLYIYDFHVAQQEAEMFKRYNGTFPLPGIHQSQDALCTCPKLPHQGSFQIDEFVHTESSSTKMQLVKQRLETVTEVIRSCAAKVNKNLSFTSPPAVSSQQSKLKQSNMLTAQEILHQFGFTQTDSHFAEFNTCILWWKKH

SEQ ID NO: 49817 - DNA, 3162 bp, Artificial Sequence
  derived and/or modified sequence
atgcctaccgcagagtctgaggccaaggtcaagaccaaggtgcgctttgaagaattactgaagacccactctgatttaatgagagagaagaaaaagttgaaaaagaaactggtgcgcagcgaggagaatatttcgcccgacacgatccggtccaaccttcactatatgaaggaaacaacctctgacgaccccgatacaatccgttcaaatctgccccacattaaagagacgacatcagacgacgtcagcgctgcaaataccaataatctgaaaaaaagcactagggtgacgaagaacaaactgcgcaacactcaactagccacagagaaccccaacggggacgctagtgtggaagaagataaacagggcaagcctaataagaaggtcattaaaaccgtcccacagttgaccacccaagacctcaaacccgagaccccggaaaacaaggtagacagcacacatcaaaagacacacacgaagccgcagcccggtgtcgatcaccagaaaagcgaaaaggccaacgaaggccgtgaagaaacagacttggaggaggatgaagaactcatgcaggcataccagtgccatgtcactgaggagatggcgaaagaaatcaaacgcaagatccggaagaagctaaaggaacaactgacatatttccctagcgacactctgttccacgatgataaactctcaagcgaaaaaagaaagaaaaagaaggaggtcccagttttcagtaaggcggagactagtaccctgactatttcaggcgatactgtcgaaggcgaacagaagaaagagtcatccgtccgcagcgtaagcagcgactcccaccaagatgatgaaataagctcaatggaacagtcaactgaggactcaatgcaggatgataccaagcctaagcctaagaagacgaagaagaagacaaaagccgtggccgataacaacgaggatgtggacggcgatggagtgcacgagatcacttcacgagactctcccgtgtacccaaaatgcctcctagatgatgacctggtgctcggagtttacatccataggaccgatagattgaaatctgatttcatgatcagtcacccaatggtgaaaattcacgttgtggacgagcataccggacagtatgtcaagaaagacgactccggtcgcccagtctcctcctattatgaaaaagagaacgtggattacatcctacccatcatgacccagccatacgattttaagcagctaaagagtagacttcctgagtgggaagaacaaatagtctttaatgaaaacttcccgtacctgttgcgtggctcagatgagtccccgaaggtgatcctgttttttgaaattttggatttcctgtctgtggacgaaattaaaaacaattctgaggtgcagaatcaagaatgcggcttcagaaaaatcgcttgggcctttttaaaactattgggtgccaacggaaacgctaacatcaactctaagctgagattacagctgtattaccccccaaccaaaccaagatcgcccctttccgtggttgaggcatttgagtggtggtctaaatgtccccggaaccactacccgtcaactttgtatgtcacagtccggggcctgaaggtccctgattgtataaagcctagttaccggtctatgatggcgttacaggaagagaagggtaaacccgtgcattgcgagcggcaccacgaatctagttcagtcgacacagagcccggcttagaggagtccaaggaggtgatcaagtggaaaaggttacccgggcaggcatgtcgaataccaaataaacacctgttcagcctgaatgctggagagcggggctgtttctgtctcgacttctcacacaatgggaggatattggccgcagcttgcgcgagtcgagacgggtaccccattatactgtacgagatcccatctgggcgctttatgcgtgagctgtgtgggcacttaaatatcatctacgatctttcttggagcaaggacgatcattacatcctcacctcttcaagcgacggaaccgctaggatttggaagaatgagattaacaacaccaacacattccgggtcttgccacacccgtcctttgtgtatacagcaaaattccatcccgcagtgcgcgaactcgtggtgacggggtgctacgatagcatgatccgaatttggaaagtcgaaatgcgagaggactcagcaatcttggtccggcagttcgatgttcataagagttttattaatagcctgtgcttcgacacggagggccatcacatgtacagcggggactgtaccggagtgatagtggtgtggaacacctatgtcaagatcaatgatctcgagcacagcgttcatcactggacaataaacaaggagattaaggagactgaattcaagggtatcccaatttcctatcttgaaatccaccctaatgggaaaagactgctgattcacaccaaagattcaacactacgcatcatggacctacgcatactggtggcgcgcaaatttgtaggcgccgccaactatcgcgaaaagattcatagtacattaaccccatgtgggacctttctgtttgctggtagcgaggatgggatcgtgtacgtgtggaatccggaaacaggagagcaggttgccatgtactcggacctgcccttcaagtcccctatcagggatatttcataccaccctttcgaaaatatggttgctttctgcgcctttgggcaaaatgagccaatcctactctacatttacgatttccacgtggcacagcaggaagccgaaatgttcaagcgatataacggcacgttcccattacccggtatacatcagagccaggatgctctgtgcacgtgtcccaaactgccccaccaggggtctttccagatcgacgaattcgtgcataccgaatcaagttcaaccaagatgcaattggtaaagcagagacttgagacggtaacagaagttattcgctcttgtgctgccaaagtgaacaagaatttgagttttacgtcccctccagcagtgtcctctcagcagagcaagctcaagcagtctaacatgctcactgctcaggagatactacatcaattcgggtttacccagactgactctcactttgcggaattcaacacgtgcatcctgtggtggaagaagcattag

SEQ ID NO: 49818 - DNA, 165 bp, Artificial Sequence
  derived and/or modified sequence
atgcctaccgccgagtcggaagctaaggtcaaaacgaaggtgcgctttgaggaactgctaaaaacacacagtgatttgatgcgggaaaagaaaaaactgaaaaaaaaactggttaggtccgaagagaatatttctaaccaggaaaaatcaatggccgtctggtag

SEQ ID NO: 49819 - DNA, 3162 bp, Artificial Sequence
  derived and/or modified sequence
atgccgaccaccgagtcagaagcaaaagttaagacgaaggtgcgcttcgaagagttactgaaaacccactccgaccttatgagggaaaagaagaagttaaaaaagaaattggtgcgatcggaggaaaatattagccccgacaccattagatctaacctgcactacatgaaagagacaacctctgatgacccagatactatcagaagcaacctgccacatattaaagagacaacgtccgacgacgtgtctgctgcaaacaccaacaacctgaaaaagtctacacgggtaaccaagaacaagttgcgtaacacgcagctggccaccgagaatcccaacggcgacgcgtccgtggaagaggacaagcagggcaaaccaaataaaaaggtgattaagacggtgccccaactgactactcaggatctgaaaccagagactcctgagaacaaagtcgattccacccatcagaaaacccacacaaaaccccaacctggggttgatcaccagaaatctgagaaagccaatgagggacgagaagagaccgatctggaagaagatgaagagctgatgcaggcatatcaatgtcacgttaccgaagagatggccaaagaaattaaaagaaaaatcagaaaaaaattgaaagaacagcttacgtattttccctcggatactctgttccatgacgacaaactgagctctgaaaaacgaaagaagaagaaagaggtgccagtcttctcaaaggcggaaacctctacactgacaatctctggggataccgtcgagggggagcagaagaaggaaagtagcgtgagatccgtctcctcagactcccaccaggacgatgagataagttctatggaacagtccacagaggatagtatgcaagacgatactaagccaaaaccaaagaaaaccaagaagaagaccaaagcggtcgccgacaacaatgaggacgtggacggggacggtgtgcatgaaattacatcgcgcgatagccccgtttaccccaagtgtctcctagacgacgatctggtcctgggggtgtatattcatcgaactgaccgcttgaagtccgacttcatgatttcacaccctatggtgaaaatacacgtagtagacgagcacaccggtcagtacgtcaaaaaggatgattccggccggcctgtaagctcatactatgagaaagagaacgtggattatatccttccaatcatgactcagccctatgatttcaaacagctgaagtccaggctgcccgaatgggaggagcagattgtcttcaacgaaaatttcccatacttgctccgcggcagcgatgagagcccaaaagtgattctgttcttcgagattctcgacttcctctccgtggacgaaatcaaaaataacagtgaagtccagaaccaggagtgcggatttcgtaaaatcgcctgggcctttttgaaactattgggcgccaatgggaacgccaacatcaacagcaagcttcggcttcaattatactatccccccaccaaaccgcggagccccctgagtgtggtggaagcgtttgagtggtggtcaaagtgccctaggaatcactatccgtctacactctacgtgacggttcgcgggctgaaggtgcccgactgcatcaagccttcctacagatctatgatggcattgcaagaggagaagggcaaacccgttcactgtgagagacaccacgagtcatcctcggtggataccgagcccggcctcgaagagtcaaaggaggttattaaatggaaacggcttcctggacaggcgtgtcgaattcctaacaagcacctgtttagcttaaatgcgggcgaaaggggatgcttttgcctggacttttcacataacggacgcatcctagccgctgcctgtgcgagcagagatggctacccaatcatactgtacgaaatccctagcggacgcttcatgcgagaattgtgtgggcacctgaatattatatatgatctgtcatggagcaaagacgaccattacatactcacatcaagttccgacggaacagcaaggatctggaagaatgaaattaacaacacaaacaccttcagggtgttgccacatccatcttttgtttataccgctaagtttcacccagcagtacgggagcttgttgttaccggctgttacgactcaatgattcgaatttggaaagtggaaatgcgggaggatagtgctattttagttcgacagttcgatgtccacaaatcctttattaactcgttgtgcttcgacactgaaggtcaccatatgtatagcggtgattgtaccggcgtgatcgtcgtgtggaatacatacgtgaagatcaacgacctcgaacactctgtccatcactggacaatcaacaaagagatcaaggagaccgaattcaagggcattcccatcagctacctggagatccatcctaacgggaagagattgctcattcacactaaagactcaaccttacgcatcatggatctcaggattttagtggcaagaaagtttgtcggagcggctaattatcgggaaaagatccactcaacattgaccccctgcggtacctttttgttcgctggctctgaagatgggattgtgtacgtttggaatcccgagaccggggaacaagtcgctatgtattccgacttgccttttaagagccctatccgtgacatttcctatcatccctttgaaaatatggtcgccttctgcgcgtttgggcaaaacgagcccattcttctttatatctatgactttcatgtggcccagcaggaggccgaaatgtttaagagatataatggtacttttcctctgcccgggatccatcagtcgcaggacgctctgtgcacgtgccctaagttgccacaccagggatcctttcagattgatgagttcgtccatacagagtcctcatctaccaagatgcaactggtgaaacagcggttagagaccgtaacagaggtgataaggtcgtgcgctgcaaaggttaacaaaaacctcagcttcacatctccaccagccgtttcctcacagcaatccaagctgaagcagtccaatatgcttactgcccaggagattttgcaccagtttggctttacgcagacagatagccatttcgccgagttcaacacatgtattctttggtggaaaaaacattag

SEQ ID NO: 49820 - DNA, 3162 bp, Artificial Sequence
  derived and/or modified sequence
atgcccacagctgagagcgaggccaaggtgaagaccaaggtgcgctttgaggagctgctgaagacccacagcgacctgatgagggagaagaagaagctgaagaagaagctggtgcgctctgaggagaacatcagcccagacaccatccgcagcaacctgcactacatgaaggagaccaccagtgatgatcctgacaccatccgcagcaacctgccccacatcaaggagaccaccagtgatgatgtgtctgctgccaacaccaacaacctgaagaagagcaccagggtgaccaagaacaagctgaggaacacccagctggccacagagaaccccaatggagatgcctctgtggaggaggacaagcagggcaagcccaacaagaaggtgatcaagacagtgccccagctgaccacccaggacctgaagccagagaccccagagaacaaggtggacagcacccaccagaagacccacaccaagccccagcccggggtggaccaccagaagtctgagaaggccaatgaaggccgggaggagacagacctggaggaggatgaggagctgatgcaggcctaccagtgccacgtgacagaggagatggccaaggagatcaagaggaagatcaggaagaagctgaaggagcagctgacctacttccccagcgacaccctcttccatgatgacaagctgagcagcgagaagaggaagaagaagaaggaggtgcctgtgttcagcaaggccgagaccagcaccctgaccatcagcggggacacagtggagggggagcagaagaaggagagctctgtgcgctctgtgtccagtgacagccaccaggatgatgagatcagctccatggagcagagcacagaggacagcatgcaggatgacaccaagcccaagcccaagaagaccaagaagaagaccaaggctgtggccgacaacaatgaagatgtggatggagatggagtgcatgagatcaccagccgggacagccctgtgtaccccaagtgcctgctggatgatgacctggtgctgggcgtgtacatccacaggacagaccggctgaagagtgacttcatgatcagccaccccatggtgaagatccacgtggtggatgagcacacaggccagtatgtgaagaaggatgacagcggccggcctgtgagcagctactatgagaaggaaaatgtggactacatcctgcccatcatgacccagccctatgacttcaagcagctgaagagccggctgcctgagtgggaggagcagatcgtgttcaatgaaaacttcccctacctgctgcggggcagtgatgagagccccaaggtgatcctcttctttgagatcctggacttcctgtctgtggatgagatcaagaacaacagcgaggtgcagaaccaggagtgtggcttcaggaagatcgcctgggccttcctgaagctgctgggcgccaatggaaatgccaacatcaacagcaagctgcggctgcagctgtactacccacccaccaagcccaggagccccctgtctgtggtggaggcctttgagtggtggagcaagtgccccaggaaccactaccccagcaccctgtatgtgacagtgcggggcctgaaggtgcctgactgcatcaagcccagctaccgctccatgatggccctgcaggaggagaagggcaagcctgtgcactgtgagcggcaccacgagagcagctctgtggacacagagcccggcctggaggagagcaaggaggtgatcaagtggaagaggctgcccggccaggcctgccgcatccccaacaagcacctgttcagcctgaatgctggggagcggggctgcttctgcctggacttcagccacaacggccgcatcctggccgccgcctgtgccagcagagatggctaccccatcatcctgtatgagatccccagcggccgcttcatgagggagctgtgtggccacctgaacatcatctatgacctgtcctggagcaaggatgaccactacatcctgaccagcagcagtgatggaacagcccgcatctggaagaatgagatcaacaacaccaacaccttccgggtgctgccccaccccagctttgtgtacacagccaagttccaccctgctgtgcgggagctggtggtgacaggctgctatgacagcatgatccgcatctggaaggtggagatgagagaagattctgccatcctggtgcggcagtttgatgtgcacaagagcttcatcaacagcctgtgctttgacacagagggccaccacatgtacagcggggactgcacaggagtcatcgtggtgtggaacacctacgtgaagatcaatgacctggagcacagcgtgcaccactggaccatcaacaaggagatcaaggagacagagttcaagggcatccccatctcctacctggagatccaccccaacgggaagaggctgctgatccacaccaaggacagcaccctgcgcatcatggacctgcgcatcctggtggccaggaagtttgtgggcgccgccaactaccgggagaagatccacagcaccctgaccccctgtggcaccttcctgtttgctggctctgaagatggcatcgtgtatgtgtggaaccctgagaccggggagcaggtggccatgtacagcgacctgcccttcaagagccccatccgggacatctcctaccacccctttgagaacatggtggccttctgtgccttcggccagaatgagcccatcctgctgtacatctatgacttccacgtggcccagcaggaggccgagatgttcaagcgctacaacggcaccttccccctgcccggcatccaccagagccaggatgccctgtgcacctgccccaagctgccccaccagggcagcttccagattgatgaatttgtgcacacagagagcagcagcaccaagatgcagctggtgaagcagaggctggagaccgtgacagaggtgatccgcagctgtgccgccaaggtgaacaagaacctgtccttcaccagccccccagctgtgagcagccagcagagcaagctgaagcagagcaacatgctgacagcccaggagatcctgcaccagtttggcttcacccagacagacagccactttgctgagttcaacacctgcatcctgtggtggaagaagcactag

SEQ ID NO: 49821 - DNA, 165 bp, Artificial Sequence
  derived and/or modified sequence
atgcccacagctgagagcgaggccaaggtgaagaccaaggtgcgctttgaggagctgctgaagacccacagcgacctgatgagggagaagaagaagctgaagaagaagctggtgcgctctgaggagaacatcagcaaccaggagaagtccatggctgtgtggtag

SEQ ID NO: 49822 - DNA, 3162 bp, Artificial Sequence
  derived and/or modified sequence
atgcccaccacagagagcgaggccaaggtgaagaccaaggtgcgctttgaggagctgctgaagacccacagcgacctgatgagggagaagaagaagctgaagaagaagctggtgcgctctgaggagaacatcagcccagacaccatccgcagcaacctgcactacatgaaggagaccaccagtgatgatcctgacaccatccgcagcaacctgccccacatcaaggagaccaccagtgatgatgtgtctgctgccaacaccaacaacctgaagaagagcaccagggtgaccaagaacaagctgaggaacacccagctggccacagagaaccccaatggagatgcctctgtggaggaggacaagcagggcaagcccaacaagaaggtgatcaagacagtgccccagctgaccacccaggacctgaagccagagaccccagagaacaaggtggacagcacccaccagaagacccacaccaagccccagcccggggtggaccaccagaagtctgagaaggccaatgaaggccgggaggagacagacctggaggaggatgaggagctgatgcaggcctaccagtgccacgtgacagaggagatggccaaggagatcaagaggaagatcaggaagaagctgaaggagcagctgacctacttccccagcgacaccctcttccatgatgacaagctgagcagcgagaagaggaagaagaagaaggaggtgcctgtgttcagcaaggccgagaccagcaccctgaccatcagcggggacacagtggagggggagcagaagaaggagagctctgtgcgctctgtgtccagtgacagccaccaggatgatgagatcagctccatggagcagagcacagaggacagcatgcaggatgacaccaagcccaagcccaagaagaccaagaagaagaccaaggctgtggccgacaacaatgaagatgtggatggagatggagtgcatgagatcaccagccgggacagccctgtgtaccccaagtgcctgctggatgatgacctggtgctgggcgtgtacatccacaggacagaccggctgaagagtgacttcatgatcagccaccccatggtgaagatccacgtggtggatgagcacacaggccagtatgtgaagaaggatgacagcggccggcctgtgagcagctactatgagaaggaaaatgtggactacatcctgcccatcatgacccagccctatgacttcaagcagctgaagagccggctgcctgagtgggaggagcagatcgtgttcaatgaaaacttcccctacctgctgcggggcagtgatgagagccccaaggtgatcctcttctttgagatcctggacttcctgtctgtggatgagatcaagaacaacagcgaggtgcagaaccaggagtgtggcttcaggaagatcgcctgggccttcctgaagctgctgggcgccaatggaaatgccaacatcaacagcaagctgcggctgcagctgtactacccacccaccaagcccaggagccccctgtctgtggtggaggcctttgagtggtggagcaagtgccccaggaaccactaccccagcaccctgtatgtgacagtgcggggcctgaaggtgcctgactgcatcaagcccagctaccgctccatgatggccctgcaggaggagaagggcaagcctgtgcactgtgagcggcaccacgagagcagctctgtggacacagagcccggcctggaggagagcaaggaggtgatcaagtggaagaggctgcccggccaggcctgccgcatccccaacaagcacctgttcagcctgaatgctggggagcggggctgcttctgcctggacttcagccacaacggccgcatcctggccgccgcctgtgccagcagagatggctaccccatcatcctgtatgagatccccagcggccgcttcatgagggagctgtgtggccacctgaacatcatctatgacctgtcctggagcaaggatgaccactacatcctgaccagcagcagtgatggaacagcccgcatctggaagaatgagatcaacaacaccaacaccttccgggtgctgccccaccccagctttgtgtacacagccaagttccaccctgctgtgcgggagctggtggtgacaggctgctatgacagcatgatccgcatctggaaggtggagatgagagaagattctgccatcctggtgcggcagtttgatgtgcacaagagcttcatcaacagcctgtgctttgacacagagggccaccacatgtacagcggggactgcacaggagtcatcgtggtgtggaacacctacgtgaagatcaatgacctggagcacagcgtgcaccactggaccatcaacaaggagatcaaggagacagagttcaagggcatccccatctcctacctggagatccaccccaacgggaagaggctgctgatccacaccaaggacagcaccctgcgcatcatggacctgcgcatcctggtggccaggaagtttgtgggcgccgccaactaccgggagaagatccacagcaccctgaccccctgtggcaccttcctgtttgctggctctgaagatggcatcgtgtatgtgtggaaccctgagaccggggagcaggtggccatgtacagcgacctgcccttcaagagccccatccgggacatctcctaccacccctttgagaacatggtggccttctgtgccttcggccagaatgagcccatcctgctgtacatctatgacttccacgtggcccagcaggaggccgagatgttcaagcgctacaacggcaccttccccctgcccggcatccaccagagccaggatgccctgtgcacctgccccaagctgccccaccagggcagcttccagattgatgaatttgtgcacacagagagcagcagcaccaagatgcagctggtgaagcagaggctggagaccgtgacagaggtgatccgcagctgtgccgccaaggtgaacaagaacctgtccttcaccagccccccagctgtgagcagccagcagagcaagctgaagcagagcaacatgctgacagcccaggagatcctgcaccagtttggcttcacccagacagacagccactttgctgagttcaacacctgcatcctgtggtggaagaagcactag

SEQ ID NO: 49823 - DNA, 3162 bp, Artificial Sequence
  derived and/or modified sequence
atgcccaccgccgagagcgaggccaaggtgaagaccaaggtgcggtttgaggagttgcttaagactcactcagacctgatgcgcgagaaaaaaaagttaaagaaaaagttggtgagatctgaagaaaatatctccccagacacgataagatctaatctgcattatatgaaggaaaccacgagtgatgacccggatacaatccgctctaacctgccccatattaaggagacgacatcggacgacgtctccgctgctaatacaaacaatctgaagaagagtacaagggtgaccaagaataagctcaggaacactcagttggctactgagaatccaaacggcgacgcctctgtggaggaagacaagcagggtaagccgaacaagaaggttattaaaacggtgccacaacttactacccaggatttgaagccagagacccctgagaacaaagtcgattctacccaccagaagacacacaccaaacctcagcctggggttgatcatcagaagagcgagaaggccaacgagggccgagaagagacggacctggaggaagatgaagagctcatgcaggcgtaccagtgccacgtgacggaggaaatggccaaggaaattaaacgtaagattagaaaaaaactgaaggagcagctaacctacttcccttctgacaccctatttcacgacgacaagttaagctccgagaaaagaaagaaaaaaaaggaggtccccgtgttcagcaaagctgagactagcacactgacaatcagcggggatacagtagagggagagcagaagaaggagtctagtgtgaggagcgtgtcatctgactcccaccaagacgacgaaatcagttccatggaacagtcaactgaagattctatgcaagatgatactaagcctaagccgaaaaagacaaagaaaaaaacgaaagccgttgctgacaataacgaagacgtggacggtgacggagtgcacgaaattacttccagagacagcccggtataccctaaatgccttctggacgatgacttggttctgggtgtctacatccatcgcaccgataggcttaaatcggattttatgatctcccatcccatggtcaagatccatgtggtggatgaacacaccggccaatatgtcaagaaggatgactcgggacgacctgtatctagttactacgaaaaggagaacgtagactacatcctgcctattatgactcagccttacgacttcaagcagctgaaatcgcggctaccggagtgggaggagcaaatcgtgttcaacgagaactttccttacctgctgcgtgggtccgatgaaagtcccaaggtcatcttgttctttgaaatacttgacttcctgtctgttgacgagattaaaaacaattctgaagtccagaatcaagagtgtggtttcaggaagattgcctgggcctttctcaaactcctaggtgccaatggaaacgccaatatcaattctaaactgcgcttgcagttgtattatccaccaacaaaacctcggagtcccctctctgtggtagaagcatttgagtggtggagcaaatgccctaggaatcattatcctagcacgttatacgtgacggtccgcggtctcaaggtgcccgattgcattaagccatcatataggtccatgatggcactgcaagaggagaagggcaagccagtgcattgtgagcggcatcacgaaagcagctcagtggataccgagcccggcctggaggagtcaaaagaagtcataaaatggaagagattgccaggccaggcatgtcgaatacctaacaaacaccttttctcgctgaacgcaggggagcggggatgcttttgtctcgacttctcacataacggcagaatccttgccgccgcttgcgccagccgggacgggtaccctatcatcctatacgagatccctagcggcagatttatgagagagttgtgcggccacctaaacattatctacgacctgagctggtctaaagatgatcactatatcttgacctcgtcctcagacggtactgcgcgcatctggaagaacgagattaataacacgaacacattccgggtgctgccacaccctagctttgtgtacacagccaagttccatcccgccgtcagggaactcgttgtaaccggctgctacgacagcatgattagaatttggaaagttgagatgagggaggattctgctatattggtgagacagtttgatgttcataagtcttttattaactccctgtgtttcgatactgaaggccaccatatgtatagcggcgattgtacaggagttatcgtggtgtggaatacctacgtgaaaattaacgacctggaacactctgtccaccattggaccatcaacaaagagattaaagagaccgagtttaaaggaatcccaatttcctatcttgagattcacccaaatggcaagagattgttgattcacaccaaagattcaactctgcgcataatggacctccgcattctagttgcacgtaaattcgtaggggcagccaattatcgcgaaaagattcatagtaccctgacaccctgtggcactttcctgttcgccggctccgaagacggaattgtttacgtttggaatccggagaccggcgagcaggtggccatgtactccgacctccctttcaagtctcctatcagggacatttcttatcatccttttgagaacatggtagcgttctgcgcattcgggcagaatgaaccaatcctcttgtatatttacgactttcatgtggcccagcaggaggccgagatgttcaagagatataatgggaccttcccgctgcccgggatccatcagagtcaggacgccctgtgtacctgccccaaactcccccaccagggctcttttcaaattgatgaatttgtccacaccgaaagctcaagtactaaaatgcaactcgtcaaacagagactggaaacggtgactgaggtgattcggagttgcgcagccaaagtcaacaaaaatttgagcttcacgagtccccctgccgtgtcatcacagcagtcaaagttaaagcaaagtaacatgctcaccgcccaggagattctgcaccagttcggcttcactcagacggactcacattttgcagagttcaacacgtgcattctctggtggaaaaagcattag

SEQ ID NO: 49824 - DNA, 165 bp, Artificial Sequence
  derived and/or modified sequence
atgcccaccgccgagagcgaggccaaggtgaagaccaaggtgcggttcgaggaacttctcaagactcattcagacttgatgcgcgagaagaagaaacttaagaaaaagcttgttaggtccgaagagaacatttccaatcaggagaaaagcatggctgtgtggtag

SEQ ID NO: 49825 - DNA, 3162 bp, Artificial Sequence
  derived and/or modified sequence
atgcccaccaccgagagcgaggccaaggtgaagaccaaggtgcggtttgaagaacttctgaaaactcactctgatctcatgcgagagaaaaaaaaactaaagaaaaagctcgtgcggtccgaggagaacatatcccccgacactatacggagcaacctccactatatgaaggaaactacatccgacgatccagacactattcgctcaaacctcccacatataaaagagacaactagcgatgacgtctctgctgcaaatactaataatctgaagaagtcaaccagagtcacaaagaacaaattgcggaatacccagctggctaccgagaacccaaatggggacgcttcggtcgaggaagacaagcaaggaaagcctaataagaaagttattaaaaccgtccctcaactcaccactcaggacttgaagcccgagacacctgaaaacaaagtggatagcactcatcaaaagacccataccaaacctcagccgggggtggaccatcagaagtcggagaaggctaatgagggaagggaggaaacagatctggaggaagatgaagagttaatgcaggcgtaccagtgtcacgtgactgaagagatggccaaggagattaagagaaaaatacgcaaaaagcttaaggagcagctgacatacttccctagtgacacattgtttcacgacgataagctctcatccgaaaaaagaaagaaaaagaaggaggtacctgtatttagtaaagcagaaacatccacactgactatcagcggggacacagtggagggtgaacagaagaaggagtcctccgttcgctcagtctcaagcgatagtcatcaggatgacgagatcagttcaatggaacagtccaccgaagattctatgcaggacgatacaaagcctaaacctaagaaaactaaaaagaagacaaaggccgtcgcggacaataacgaagatgtcgacggggatggtgtgcacgagatcacctctcgagacagtcccgtgtatcctaagtgtcttttggacgacgatctggtgctgggggtgtacatccatcggaccgatcgcctgaagagcgactttatgatcagccacccgatggtgaagatccatgtcgtcgatgaacatacgggtcagtacgtgaaaaaagacgactctggacgtcctgtgagctcctattacgaaaaagaaaatgtggactatatcctgcctattatgactcaaccttacgactttaagcagctaaagagccgcctgccagagtgggaggagcaaattgtgtttaacgaaaacttcccttatctgctgcggggcagcgatgagagcccaaaggtcatcctcttcttcgagattctggactttctgtccgttgacgagatcaagaacaactcagaagtgcagaatcaggagtgtgggtttcgcaaaatagcctgggccttcctgaagctgctcggagcaaacggcaacgctaacattaacagtaaactccgtctgcagctttactacccacccaccaagccccgctcccccctgtcggtagtcgaagccttcgaatggtggtccaagtgtccaaggaatcattacccctccactctatacgtgaccgtgcgtggcctgaaggttcccgactgcataaaaccgagctaccggagtatgatggcattacaggaagaaaaggggaaacctgttcactgcgagcgccaccatgaatcttcaagtgtagatacagagcccggcctcgaggagagcaaggaagtgattaaatggaaacgccttcccgggcaggcctgtaggattccgaacaagcatcttttctccctcaatgctggagaaaggggttgtttttgtctggatttcagtcacaacggcagaatcttggccgcagcatgcgcaagtcgtgatggataccctataattttgtacgaaattccatcgggccggttcatgcgggagttgtgcggccatctgaacatcatctatgatttgagctggagcaaggacgaccactacattctaacatcgagctccgacggaacagccaggatttggaaaaatgaaatcaataatacaaacacttttcgcgtactgccccacccaagttttgtctatacggctaagttccaccccgccgtccgcgaactggttgtgaccggctgctacgattctatgatccgtatttggaaggtggagatgagagaagattccgctatacttgtccgacagttcgatgtacataagtctttcatcaatagcttatgttttgacacagagggccaccacatgtattccggagattgtaccggagttatcgttgtgtggaatacctatgtgaaaattaacgatctcgagcacagcgtccaccactggactatcaacaaagaaatcaaagagactgagtttaagggtattccaatatcttacctggaaatccacccaaacggcaaacgccttctgattcacacgaaggacagtacgctgcgcataatggacctgagaattttggtggctcgcaaattcgtcggcgccgctaactatagagaaaagattcatagtacactcacaccttgtggaacttttctcttcgctggtagcgaagacgggattgtatatgtttggaaccctgaaacaggcgagcaagtcgccatgtactcggatctcccgtttaagtcccccatcagggatatttcatatcaccctttcgagaacatggttgcattctgcgctttcggacaaaatgagcccatccttctttacatctatgatttccacgtggctcagcaagaggcagagatgtttaagcgatacaatggtacattccccctccccggcattcatcagagccaagacgccctttgcacctgccctaagctcccccaccaaggatccttccaaatcgatgagtttgtacataccgagtcatccagtacaaagatgcagttagtcaaacagcggctggaaacagtcaccgaggttatccggagctgcgccgccaaggttaataagaatctctcctttacctctccacccgcggtgtcaagccagcagtccaagctgaagcaaagcaatatgctgactgcacaagagatcttgcaccagtttggattcacacagacagactcccattttgcagaatttaatacttgcatcctgtggtggaagaaacattag

SEQ ID NO: 49826 - DNA, 3162 bp, Artificial Sequence
  derived and/or modified sequence
atgcccaccgcggaaagcgaagcaaaggttaaaactaaagtaaggtttgaagaacttctgaagacacattctgatctcatgcgcgagaaaaagaagctcaaaaaaaaattagtcagaagtgaagagaacattagtcctgataccatccggagtaacctccactacatgaaggagaccacgagcgacgacccagacacaatcagaagtaacctacctcatattaaggaaaccaccagcgatgacgtgtccgcggctaataccaataatttgaaaaaaagtacgcgtgtgaccaaaaataaactgcgtaatactcagttggccaccgaaaatcccaatggggatgcttctgtcgaagaagataaacaaggcaaacccaataagaaagtgataaagaccgtgccccaattgacaacccaggatctgaagccagagaccccagagaataaggtagacagcacacaccaaaagacacacacaaaaccccagccaggggtggatcaccagaagtcagaaaaagctaacgaaggaagggaagagacagatctggaggaggatgaagagctgatgcaagcctatcagtgccacgtaaccgaggagatggcaaaggagataaagcggaagatcagaaagaagttaaaagagcagctcacctatttcccgagcgatactttgttccatgatgacaaacttagtagcgaaaaacgcaaaaagaaaaaggaggtgcctgtcttttcgaaagccgaaacttctacactcaccatcagtggagataccgtcgagggtgaacagaagaaggaatcttccgtgcgaagtgtgagttcggattctcaccaagacgatgaaatcagttctatggagcagagcacagaagacagcatgcaggacgatacaaagcccaagcctaaaaaaacgaagaagaagacaaaggccgttgccgacaacaacgaggacgtcgatggcgacggagttcatgagataaccagtcgcgattcccccgtgtacccaaaatgtcttctagacgacgatctggtcctgggagtgtacatccaccgcacggataggctgaagtcagatttcatgatctcccacccaatggttaagattcatgtagtggatgagcacactggacagtatgtgaaaaaggacgattccggacgtcctgtaagctcctactatgaaaaagagaacgtggattacatccttccaattatgacacagccttacgatttcaagcagttgaagtcaagactgcccgagtgggaagagcagattgtgttcaatgaaaacttcccctacttgcttcgaggttctgacgaaagcccaaaggtcattcttttcttcgagatcctcgattttctttcagtcgacgaaattaaaaataatagcgaggtgcagaaccaggagtgcggttttcggaagatcgcatgggcctttctgaaactactgggcgctaatggtaacgccaacatcaactccaagcttagattgcagctatactaccccccaactaagccccgttcgcctttgtccgtcgttgaagcctttgagtggtggtcaaaatgtcccaggaatcattacccttccacgctgtatgttacggtcagggggctgaaagtgccagactgcatcaagcccagttaccggtccatgatggcattgcaggaggaaaagggcaagcctgtccattgcgaaaggcaccacgagtcttctagtgtcgacacagagccaggtctcgaagaatccaaggaagttatcaagtggaagcggctgccgggacaggcatgccggattcccaataagcatcttttctccctcaacgccggagagcgagggtgtttttgcctcgattttagtcataacggaaggatcttggctgcggcttgcgcttcccgcgatggataccccatcattttgtacgaaatcccctccggcagattcatgcgcgaactgtgtggacacttaaatattatttatgacctatcttggtccaaagatgaccactacatcctcacgagcagtagtgatggaacggcacgtatttggaaaaatgagataaacaatacaaacacatttcgagtactgccgcacccaagctttgtgtacaccgctaagtttcaccctgcagtgagagagctggtcgtgactggatgttacgattcaatgatccggatttggaaagtggagatgagagaagatagtgctatcctagttcggcagtttgacgttcataaatcatttattaactcactgtgcttcgatacagaaggccaccatatgtattccggggactgtaccggggtcattgtagtgtggaacacctacgtcaagattaacgacctggaacacagcgtccatcactggaccattaacaaagagataaaggagaccgagttcaaagggattcccatttcctacctagagatccaccctaacggcaaacgcctgctcatccatacaaaggattcaacccttagaattatggacctgaggatcctggtagcccgtaagttcgtaggagcagctaactaccgcgagaagatacattccacactcacaccctgtgggacgttcttattcgcaggtagcgaggatggaattgtctatgtatggaaccccgagaccggagaacaggtcgcgatgtattccgatttacctttcaaatctcctataagggatattagctaccaccccttcgaaaacatggttgctttttgcgcttttggacagaatgagcctattctcttgtatatctatgacttccacgtggcgcagcaggaagccgaaatgttcaaacgctataatggaaccttcccactgcccggaattcatcaatctcaggacgctctatgtacctgtccaaaattgccacaccaggggtcctttcagatagacgagtttgttcacacagaatccagcagcacaaagatgcaactggtaaagcagcggctggagaccgtgacagaagtcatccgatcatgcgccgcaaaggtgaataagaatctgagctttaccagcccacctgccgtgtcatcccaacagagtaaactgaagcagtctaatatgcttacagcccaggaaatattgcatcagtttggcttcacccagacggattcccacttcgccgagttcaatacgtgtatcctatggtggaagaagcattag

SEQ ID NO: 49827 - DNA, 165 bp, Artificial Sequence
  derived and/or modified sequence
atgcccactgctgaaagcgaggcgaaggtcaagacaaaagtccgcttcgaagagctgctgaagacccactcagacttaatgagggaaaaaaaaaagctgaagaaaaagcttgtgaggtctgaggaaaacatttcaaaccaggagaaatctatggcagtctggtag

SEQ ID NO: 49828 - DNA, 3162 bp, Artificial Sequence
  derived and/or modified sequence
atgcctacaacagagtctgaggctaaagtaaaaaccaaagtgaggttcgaagaactcctgaagactcacagtgacctgatgagagagaaaaagaaactgaagaagaagctcgttagatcagaggaaaatatctcccctgacaccattcggtctaacctgcattacatgaaagagacaacaagtgacgaccccgacaccatcagaagtaacctgccccatattaaagaaactacgagtgacgacgttagcgctgcaaacactaacaatcttaagaaaagcactagagttaccaagaacaagttgcgtaacacacaattggccacagaaaatcctaacggagatgcttcagtcgaggaggataagcagggcaagccaaataagaaagtgatcaagacggtgccacagctaactacacaggacctaaagcctgagacccctgagaataaggtggattccacacatcagaagacgcataccaaaccgcaaccgggagtggaccaccagaagtctgaaaaggctaacgagggcagagaagagacggatctcgaagaggatgaagagctgatgcaggcttaccaatgtcacgtcacagaagaaatggcgaaggagattaaacgtaagattaggaagaagttaaaagaacaactgacctattttccatctgatacccttttccacgacgataagctgtcctccgaaaagaggaagaaaaaaaaagaggtacctgtgttttctaaagcagaaacttccactctgacaataagtggcgacacagtcgaaggagagcagaagaaagaatcatcagtgcgctcagttagttcagactcacaccaggacgacgaaatttccagtatggaacagtccacagaggattcaatgcaggacgacaccaagccaaaaccaaagaagactaagaaaaagaccaaggcggtggctgacaataacgaggatgtggacggcgacggagtccatgagataaccagccgagacagcccggtttatccaaaatgtctgctggatgatgacctagtgctaggggtctacatccataggacggataggctgaagtcagacttcatgatttctcaccccatggtcaagatccatgtcgtggacgagcatacggggcaatatgtgaaaaaagatgattctggaaggccagtttccagttactatgagaaggaaaatgtggattatatactgccaattatgacccagccgtacgatttcaagcagttgaaaagcagactgccagaatgggaagagcagatcgtcttcaacgagaacttcccttatctgctgcgcggtagcgatgaatccccgaaggttatattgtttttcgaaatcctggacttcctttccgttgacgagatcaaaaataatagcgaggtgcaaaaccaggagtgcggattcagaaaaattgcctgggcgttcctcaaactcctgggggctaacggcaatgcaaacattaactcgaagctgcgacttcagttgtactacccgccaacaaagccccgtagtcccctgtctgtcgtggaagcttttgaatggtggagcaagtgcccaaggaatcattatccatcaacactctatgtaaccgtccgaggactcaaagtccctgactgcatcaaaccaagctatagatccatgatggctcttcaggaggaaaagggcaaacctgttcactgcgagcgtcatcacgagtcttcatccgtcgatacggaacctggactggaagagtctaaggaggttattaagtggaagcgtctgcctggacaggcatgtaggattcccaacaaacacctgtttagccttaacgctggagagagaggttgcttctgtcttgatttctctcataacggacgtattttggcagccgcttgtgcttccagggacggatatcctatcattctgtacgaaataccaagcgggaggttcatgcgggagctgtgtgggcatctcaacatcatttacgacttatcctggagtaaagatgaccactatattctgactagtagcagtgacggcacagcacgcatttggaagaatgagataaataacactaacacttttcgtgtcttaccgcacccctctttcgtatataccgccaagtttcaccctgctgtacgcgagctcgtggtcaccggatgctatgattctatgattcggatatggaaggtggagatgcgcgaagattcagccattctggtccgtcaatttgatgtccacaagtccttcataaattctctgtgttttgatacagaaggacatcacatgtactccggggattgcactggggtaatagtggtctggaatacttacgtcaaaatcaatgatttggagcactcagtccaccattggacaatcaataaagagatcaaggaaaccgaattcaaagggatcccaatttcttacctggagatacacccaaatgggaagcggttattgattcacaccaaggattctaccctgcgcattatggaccttcgtatacttgtcgccagaaagttcgtgggagcggcaaattatcgcgaaaagatacactctacattaacaccctgcggaacattcctcttcgccggttccgaagatgggatagtgtacgtgtggaacccagaaactggagagcaggtggccatgtatagtgacttgcctttcaaatcaccaattagagatattagttatcaccctttcgagaacatggtggcattctgtgccttcggtcagaacgagcccattttgctttatatctacgacttccacgtagcccagcaggaagccgaaatgtttaaaagatataatggaacctttcccctgcctgggattcaccagtcacaggatgccctttgcacctgcccgaagctgccgcaccagggttcgttccaaattgatgagttcgtgcatactgagagtagctccaccaagatgcagttggtgaaacagcgtctggaaactgtgaccgaagtgatcagatcctgcgctgcaaaagtgaataaaaacctttcattcacatctccgccagccgtgagctcacagcaaagcaaactgaagcagagcaacatgctgactgcccaggagatcctacatcaatttggcttcactcagaccgactcgcacttcgcagaatttaatacatgcatattgtggtggaaaaagcactag

SEQ ID NO: 49829 - DNA, 3638 bp, Artificial Sequence
  derived and/or modified sequence
gcggcacagagccgcggcttgctttcaggacacgggtcgctggcgggttaggtggctgcgtggccgcctcacttcgcgcacgcgccgctaggctgggggagttgatttgcactgctccgggtgtcggctccggcgggacgggcggttctgcgtacccctctccagtgtcaacctggggctgaatcttcaacctgtcaaagccttcttaattatgtctgagaaaaggatcctgattgagtcaatgctttgcattctcagtcctctgcataaagctgagagatgcctacagctgagagtgaagcaaaagtaaaaaccaaagttcgctttgaagaattgcttaagacccacagtgatctaatgcgtgaaaagaaaaaactgaagaaaaaacttgtcaggtctgaagaaaacatctcacctgacactattagaagcaatcttcactatatgaaagaaactacaagtgatgatcccgacactattagaagcaatcttccccatattaaagaaactacaagtgatgatgtaagtgctgctaacactaacaacctgaagaagagcacgagagtcactaaaaacaaattgaggaacacacagttagcaactgaaaatcctaatggtgatgctagtgtagaggaagacaaacaaggaaagccaaataaaaaggtgataaagacggtgccccagttgactacacaagacctgaaaccggaaactcctgagaataaggttgattctacacaccagaaaacacatacaaagccacagccaggcgttgatcatcagaaaagtgagaaggcaaatgagggaagagaagagactgatttagaagaggatgaagaattgatgcaagcatatcagtgccatgtaactgaagaaatggcaaaggagattaagaggaaaataagaaagaaactgaaagaacagttgacttactttccctcagatactttattccatgatgacaaactaagcagtgaaaaaaggaaaaagaaaaaggaagttccagtcttctctaaagctgaaacaagtacattgaccatctctggtgacacagttgaaggtgaacaaaagaaagaatcttcagttagatcagtttcttcagattctcatcaagatgatgaaataagctcaatggaacaaagcacagaagacagcatgcaagatgatacaaaacctaaaccaaaaaaaacaaaaaagaagactaaagcagttgcagataataatgaagatgttgatggtgatggtgttcatgaaataacaagccgagatagcccggtttatcccaaatgtttgcttgatgatgaccttgtcttgggagtttacattcaccgaactgatagacttaagtcagattttatgatttctcacccaatggtaaaaattcatgtggttgatgagcatactggtcaatatgtcaagaaagatgatagtggacggcctgtttcatcttactatgaaaaagagaatgtggattatattcttcctattatgacccagccatatgattttaaacagttaaaatcaagacttccagagtgggaagaacaaattgtatttaatgaaaattttccctatttgcttcgaggctctgatgagagtcctaaagtcatcctgttctttgagattcttgatttcttaagcgtggatgaaattaagaataattctgaggttcaaaaccaagaatgtggctttcggaaaattgcctgggcatttcttaagcttctgggagccaatggaaatgcaaacatcaactcaaaacttcgcttgcagctatattacccacctactaagcctcgatccccattaagtgttgttgaggcatttgaatggtggtcaaaatgtccaagaaatcattacccatcaacactgtacgtaactgtaagaggactgaaagttccagactgtataaagccatcttaccgctctatgatggctcttcaggaggaaaaaggtaaaccagtgcattgtgaacgtcaccatgagtcaagctcagtagacacagaacctggattagaagagtcaaaggaagtaataaagtggaaacgactccctgggcaggcttgccgtatcccaaacaaacacctcttctcactaaatgcaggagaacgaggatgtttttgtcttgatttctcccacaatggaagaatattagcagcagcttgtgccagccgggatggatatccaattattttatatgaaattccttctggacgtttcatgagagaattgtgtggccacctcaatatcatttatgatctttcctggtcaaaagatgatcactacatccttacttcatcatctgatggcactgccaggatatggaaaaatgaaataaacaatacaaatactttcagagttttacctcatccttcttttgtttacacggctaaattccatccagctgtaagagagctagtagttacaggatgctatgattccatgatacggatatggaaagttgagatgagagaagattctgccatattggtccgacagtttgatgttcacaaaagttttatcaactcactttgttttgatactgaaggtcatcatatgtattcaggagattgtacaggggtgattgttgtttggaatacctatgtcaagattaatgatttggaacattcagtgcaccactggactataaataaggaaattaaagaaactgagtttaagggaattccaataagttatttggagattcatcccaatggaaaacgtttgttaatccataccaaagacagtactttgagaattatggatctccggatattagtagcaaggaagtttgtaggagcagcaaattatcgggagaagattcatagtactttgactccatgtgggacttttctgtttgctggaagtgaggatggtatagtgtatgtttggaacccagaaacaggagaacaagtagccatgtattctgacttgccattcaagtcacccattcgagacatttcttatcatccatttgaaaatatggttgcattctgtgcatttgggcaaaatgagccaattcttctgtatatttacgatttccatgttgcccagcaggaggctgaaatgttcaaacgctacaatggaacatttccattacctggaatacaccaaagtcaagatgccctatgtacctgtccaaaactaccccatcaaggctcttttcagattgatgaatttgtccacactgaaagttcttcaacgaagatgcagctagtaaaacagaggcttgaaactgtcacagaggtgatacgttcctgtgctgcaaaagtcaacaaaaatctctcatttacttcaccaccagcagtttcctcacaacagtctaagttaaagcagtcaaacatgctgaccgctcaagagattctacatcagtttggtttcactcagaccgacagtcactttgctgaattcaacacatgtatattatggtggaaaaagcactagactcagggtcagccagccagaagaactgagccgacctgggatcccaccacttcctaactgttttgttaggtagttcactttctctcttcggataaatgtctccacatttcctacttcatagaattgtcagaatcaacacaatacatttaatactttgaaactcataaaatattgggagaataaacagtatgaggtta

SEQ ID NO: 49830 - DNA, 365 bp, Artificial Sequence
  derived and/or modified sequence
gtgtcaacctggggctgaatcttcaacctgtcaaagccttcttaattatgtctgagaaaagtactaaaataggtgccattttaaattcccagacaaggaaaaaccaaggattagaaattaagtagcttgcccaaggccacacatcagatcctgattgagtcaatgctttgcattctcagtcctctgcataaagctgagagatgcctacagctgagagtgaagcaaaagtaaaaaccaaagttcgctttgaagaattgcttaagacccacagtgatctaatgcgtgaaaagaaaaaactgaagaaaaaacttgtcaggtctgaagaaaacatctcaaaccaggagaaatcaatggccgtatggtaa

SEQ ID NO: 49831 - DNA, 3358 bp, Artificial Sequence
  derived and/or modified sequence
atgccaacaactgagagtgaagcaaaagtaaaaaccaaagttcgctttgaagaattgcttaagacccacagtgatctaatgcgtgaaaagaaaaaactgaagaaaaaacttgtcaggtctgaagaaaacatctcacctgacactattagaagcaatcttcactatatgaaagaaactacaagtgatgatcccgacactattagaagcaatcttccccatattaaagaaactacaagtgatgatgtaagtgctgctaacactaacaacctgaagaagagcacgagagtcactaaaaacaaattgaggaacacacagttagcaactgaaaatcctaatggtgatgctagtgtagaggaagacaaacaaggaaagccaaataaaaaggtgataaagacggtgccccagttgactacacaagacctgaaaccggaaactcctgagaataaggttgattctacacaccagaaaacacatacaaagccacagccaggcgttgatcatcagaaaagtgagaaggcaaatgagggaagagaagagactgatttagaagaggatgaagaattgatgcaagcatatcagtgccatgtaactgaagaaatggcaaaggagattaagaggaaaataagaaagaaactgaaagaacagttgacttactttccctcagatactttattccatgatgacaaactaagcagtgaaaaaaggaaaaagaaaaaggaagttccagtcttctctaaagctgaaacaagtacattgaccatctctggtgacacagttgaaggtgaacaaaagaaagaatcttcagttagatcagtttcttcagattctcatcaagatgatgaaataagctcaatggaacaaagcacagaagacagcatgcaagatgatacaaaacctaaaccaaaaaaaacaaaaaagaagactaaagcagttgcagataataatgaagatgttgatggtgatggtgttcatgaaataacaagccgagatagcccggtttatcccaaatgtttgcttgatgatgaccttgtcttgggagtttacattcaccgaactgatagacttaagtcagattttatgatttctcacccaatggtaaaaattcatgtggttgatgagcatactggtcaatatgtcaagaaagatgatagtggacggcctgtttcatcttactatgaaaaagagaatgtggattatattcttcctattatgacccagccatatgattttaaacagttaaaatcaagacttccagagtgggaagaacaaattgtatttaatgaaaattttccctatttgcttcgaggctctgatgagagtcctaaagtcatcctgttctttgagattcttgatttcttaagcgtggatgaaattaagaataattctgaggttcaaaaccaagaatgtggctttcggaaaattgcctgggcatttcttaagcttctgggagccaatggaaatgcaaacatcaactcaaaacttcgcttgcagctatattacccacctactaagcctcgatccccattaagtgttgttgaggcatttgaatggtggtcaaaatgtccaagaaatcattacccatcaacactgtacgtaactgtaagaggactgaaagttccagactgtataaagccatcttaccgctctatgatggctcttcaggaggaaaaaggtaaaccagtgcattgtgaacgtcaccatgagtcaagctcagtagacacagaacctggattagaagagtcaaaggaagtaataaagtggaaacgactccctgggcaggcttgccgtatcccaaacaaacacctcttctcactaaatgcaggagaacgaggatgtttttgtcttgatttctcccacaatggaagaatattagcagcagcttgtgccagccgggatggatatccaattattttatatgaaattccttctggacgtttcatgagagaattgtgtggccacctcaatatcatttatgatctttcctggtcaaaagatgatcactacatccttacttcatcatctgatggcactgccaggatatggaaaaatgaaataaacaatacaaatactttcagagttttacctcatccttcttttgtttacacggctaaattccatccagctgtaagagagctagtagttacaggatgctatgattccatgatacggatatggaaagttgagatgagagaagattctgccatattggtccgacagtttgatgttcacaaaagttttatcaactcactttgttttgatactgaaggtcatcatatgtattcaggagattgtacaggggtgattgttgtttggaatacctatgtcaagattaatgatttggaacattcagtgcaccactggactataaataaggaaattaaagaaactgagtttaagggaattccaataagttatttggagattcatcccaatggaaaacgtttgttaatccataccaaagacagtactttgagaattatggatctccggatattagtagcaaggaagtttgtaggagcagcaaattatcgggagaagattcatagtactttgactccatgtgggacttttctgtttgctggaagtgaggatggtatagtgtatgtttggaacccagaaacaggagaacaagtagccatgtattctgacttgccattcaagtcacccattcgagacatttcttatcatccatttgaaaatatggttgcattctgtgcatttgggcaaaatgagccaattcttctgtatatttacgatttccatgttgcccagcaggaggctgaaatgttcaaacgctacaatggaacatttccattacctggaatacaccaaagtcaagatgccctatgtacctgtccaaaactaccccatcaaggctcttttcagattgatgaatttgtccacactgaaagttcttcaacgaagatgcagctagtaaaacagaggcttgaaactgtcacagaggtgatacgttcctgtgctgcaaaagtcaacaaaaatctctcatttacttcaccaccagcagtttcctcacaacagtctaagttaaagcagtcaaacatgctgaccgctcaagagattctacatcagtttggtttcactcagaccgacagtcactttgctgaattcaacacatgtatattatggtggaaaaagcactagactcagggtcagccagccagaagaactgagccgacctgggatcccaccacttcctaactgttttgttaggtagttcactttctctcttcggataaatgtctccacatttcctacttcatagaattgtcagaatcaacacaatacatttaatactttgaaactcataaaatattgggagaataaacagtatgaggtt

SEQ ID NO: 49832 - DNA, 3162 bp, Artificial Sequence
  derived and/or modified sequence
atgcccaccgccgagagcgaggccaaggtgaagaccaaggtgagattcgaggagctgctgaagacccacagcgacctgatgagagagaagaagaagctgaagaagaagctggtgagaagcgaggagaacatcagccccgacaccatcagaagcaacctgcactacatgaaggagaccaccagcgacgaccccgacaccatcagaagcaacctgccccacatcaaggagaccaccagcgacgacgtgagcgccgccaacaccaacaacctgaagaagagcaccagagtgaccaagaacaagctgagaaacacccagctggccaccgagaaccccaacggcgacgccagcgtggaggaggacaagcagggcaagcccaacaagaaggtgatcaagaccgtgccccagctgaccacccaggacctgaagcccgagacccccgagaacaaggtggacagcacccaccagaagacccacaccaagccccagcccggcgtggaccaccagaagagcgagaaggccaacgagggcagagaggagaccgacctggaggaggacgaggagctgatgcaggcctaccagtgccacgtgaccgaggagatggccaaggagatcaagagaaagatcagaaagaagctgaaggagcagctgacctacttccccagcgacaccctgttccacgacgacaagctgagcagcgagaagagaaagaagaagaaggaggtgcccgtgttcagcaaggccgagaccagcaccctgaccatcagcggcgacaccgtggagggcgagcagaagaaggagagcagcgtgagaagcgtgagcagcgacagccaccaggacgacgagatcagcagcatggagcagagcaccgaggacagcatgcaggacgacaccaagcccaagcccaagaagaccaagaagaagaccaaggccgtggccgacaacaacgaggacgtggacggcgacggcgtgcacgagatcaccagcagagacagccccgtgtaccccaagtgcctgctggacgacgacctggtgctgggcgtgtacatccacagaaccgacagactgaagagcgacttcatgatcagccaccccatggtgaagatccacgtggtggacgagcacaccggccagtacgtgaagaaggacgacagcggcagacccgtgagcagctactacgagaaggagaacgtggactacatcctgcccatcatgacccagccctacgacttcaagcagctgaagagcagactgcccgagtgggaggagcagatcgtgttcaacgagaacttcccctacctgctgagaggcagcgacgagagccccaaggtgatcctgttcttcgagatcctggacttcctgagcgtggacgagatcaagaacaacagcgaggtgcagaaccaggagtgcggcttcagaaagatcgcctgggccttcctgaagctgctgggcgccaacggcaacgccaacatcaacagcaagctgagactgcagctgtactacccccccaccaagcccagaagccccctgagcgtggtggaggccttcgagtggtggagcaagtgccccagaaaccactaccccagcaccctgtacgtgaccgtgagaggcctgaaggtgcccgactgcatcaagcccagctacagaagcatgatggccctgcaggaggagaagggcaagcccgtgcactgcgagagacaccacgagagcagcagcgtggacaccgagcccggcctggaggagagcaaggaggtgatcaagtggaagagactgcccggccaggcctgcagaatccccaacaagcacctgttcagcctgaacgccggcgagagaggctgcttctgcctggacttcagccacaacggcagaatcctggccgccgcctgcgccagcagagacggctaccccatcatcctgtacgagatccccagcggcagattcatgagagagctgtgcggccacctgaacatcatctacgacctgagctggagcaaggacgaccactacatcctgaccagcagcagcgacggcaccgccagaatctggaagaacgagatcaacaacaccaacaccttcagagtgctgccccaccccagcttcgtgtacaccgccaagttccaccccgccgtgagagagctggtggtgaccggctgctacgacagcatgatcagaatctggaaggtggagatgagagaggacagcgccatcctggtgagacagttcgacgtgcacaagagcttcatcaacagcctgtgcttcgacaccgagggccaccacatgtacagcggcgactgcaccggcgtgatcgtggtgtggaacacctacgtgaagatcaacgacctggagcacagcgtgcaccactggaccatcaacaaggagatcaaggagaccgagttcaagggcatccccatcagctacctggagatccaccccaacggcaagagactgctgatccacaccaaggacagcaccctgagaatcatggacctgagaatcctggtggccagaaagttcgtgggcgccgccaactacagagagaagatccacagcaccctgaccccctgcggcaccttcctgttcgccggcagcgaggacggcatcgtgtacgtgtggaaccccgagaccggcgagcaggtggccatgtacagcgacctgcccttcaagagccccatcagagacatcagctaccaccccttcgagaacatggtggccttctgcgccttcggccagaacgagcccatcctgctgtacatctacgacttccacgtggcccagcaggaggccgagatgttcaagagatacaacggcaccttccccctgcccggcatccaccagagccaggacgccctgtgcacctgccccaagctgccccaccagggcagcttccagatcgacgagttcgtgcacaccgagagcagcagcaccaagatgcagctggtgaagcagagactggagaccgtgaccgaggtgatcagaagctgcgccgccaaggtgaacaagaacctgagcttcaccagcccccccgccgtgagcagccagcagagcaagctgaagcagagcaacatgctgaccgcccaggagatcctgcaccagttcggcttcacccagaccgacagccacttcgccgagttcaacacctgcatcctgtggtggaagaagcactag

SEQ ID NO: 49833 - DNA, 165 bp, Artificial Sequence
  derived and/or modified sequence
atgcccaccgccgagagcgaggccaaggtgaagaccaaggtgagattcgaggagctgctgaagacccacagcgacctgatgagagagaagaagaagctgaagaagaagctggtgagaagcgaggagaacatcagcaaccaggagaagagcatggccgtgtggtag

SEQ ID NO: 49834 - DNA, 3162 bp, Artificial Sequence
  derived and/or modified sequence
atgcccaccaccgagagcgaggccaaggtgaagaccaaggtgagattcgaggagctgctgaagacccacagcgacctgatgagagagaagaagaagctgaagaagaagctggtgagaagcgaggagaacatcagccccgacaccatcagaagcaacctgcactacatgaaggagaccaccagcgacgaccccgacaccatcagaagcaacctgccccacatcaaggagaccaccagcgacgacgtgagcgccgccaacaccaacaacctgaagaagagcaccagagtgaccaagaacaagctgagaaacacccagctggccaccgagaaccccaacggcgacgccagcgtggaggaggacaagcagggcaagcccaacaagaaggtgatcaagaccgtgccccagctgaccacccaggacctgaagcccgagacccccgagaacaaggtggacagcacccaccagaagacccacaccaagccccagcccggcgtggaccaccagaagagcgagaaggccaacgagggcagagaggagaccgacctggaggaggacgaggagctgatgcaggcctaccagtgccacgtgaccgaggagatggccaaggagatcaagagaaagatcagaaagaagctgaaggagcagctgacctacttccccagcgacaccctgttccacgacgacaagctgagcagcgagaagagaaagaagaagaaggaggtgcccgtgttcagcaaggccgagaccagcaccctgaccatcagcggcgacaccgtggagggcgagcagaagaaggagagcagcgtgagaagcgtgagcagcgacagccaccaggacgacgagatcagcagcatggagcagagcaccgaggacagcatgcaggacgacaccaagcccaagcccaagaagaccaagaagaagaccaaggccgtggccgacaacaacgaggacgtggacggcgacggcgtgcacgagatcaccagcagagacagccccgtgtaccccaagtgcctgctggacgacgacctggtgctgggcgtgtacatccacagaaccgacagactgaagagcgacttcatgatcagccaccccatggtgaagatccacgtggtggacgagcacaccggccagtacgtgaagaaggacgacagcggcagacccgtgagcagctactacgagaaggagaacgtggactacatcctgcccatcatgacccagccctacgacttcaagcagctgaagagcagactgcccgagtgggaggagcagatcgtgttcaacgagaacttcccctacctgctgagaggcagcgacgagagccccaaggtgatcctgttcttcgagatcctggacttcctgagcgtggacgagatcaagaacaacagcgaggtgcagaaccaggagtgcggcttcagaaagatcgcctgggccttcctgaagctgctgggcgccaacggcaacgccaacatcaacagcaagctgagactgcagctgtactacccccccaccaagcccagaagccccctgagcgtggtggaggccttcgagtggtggagcaagtgccccagaaaccactaccccagcaccctgtacgtgaccgtgagaggcctgaaggtgcccgactgcatcaagcccagctacagaagcatgatggccctgcaggaggagaagggcaagcccgtgcactgcgagagacaccacgagagcagcagcgtggacaccgagcccggcctggaggagagcaaggaggtgatcaagtggaagagactgcccggccaggcctgcagaatccccaacaagcacctgttcagcctgaacgccggcgagagaggctgcttctgcctggacttcagccacaacggcagaatcctggccgccgcctgcgccagcagagacggctaccccatcatcctgtacgagatccccagcggcagattcatgagagagctgtgcggccacctgaacatcatctacgacctgagctggagcaaggacgaccactacatcctgaccagcagcagcgacggcaccgccagaatctggaagaacgagatcaacaacaccaacaccttcagagtgctgccccaccccagcttcgtgtacaccgccaagttccaccccgccgtgagagagctggtggtgaccggctgctacgacagcatgatcagaatctggaaggtggagatgagagaggacagcgccatcctggtgagacagttcgacgtgcacaagagcttcatcaacagcctgtgcttcgacaccgagggccaccacatgtacagcggcgactgcaccggcgtgatcgtggtgtggaacacctacgtgaagatcaacgacctggagcacagcgtgcaccactggaccatcaacaaggagatcaaggagaccgagttcaagggcatccccatcagctacctggagatccaccccaacggcaagagactgctgatccacaccaaggacagcaccctgagaatcatggacctgagaatcctggtggccagaaagttcgtgggcgccgccaactacagagagaagatccacagcaccctgaccccctgcggcaccttcctgttcgccggcagcgaggacggcatcgtgtacgtgtggaaccccgagaccggcgagcaggtggccatgtacagcgacctgcccttcaagagccccatcagagacatcagctaccaccccttcgagaacatggtggccttctgcgccttcggccagaacgagcccatcctgctgtacatctacgacttccacgtggcccagcaggaggccgagatgttcaagagatacaacggcaccttccccctgcccggcatccaccagagccaggacgccctgtgcacctgccccaagctgccccaccagggcagcttccagatcgacgagttcgtgcacaccgagagcagcagcaccaagatgcagctggtgaagcagagactggagaccgtgaccgaggtgatcagaagctgcgccgccaaggtgaacaagaacctgagcttcaccagcccccccgccgtgagcagccagcagagcaagctgaagcagagcaacatgctgaccgcccaggagatcctgcaccagttcggcttcacccagaccgacagccacttcgccgagttcaacacctgcatcctgtggtggaagaagcactag

SEQ ID NO: 49835 - protein, 269 aa, Artificial Sequence
  derived and/or modified sequence
MYKETVYSAFNLLMHYPPPSGAGQHPQPQPPLHKANQPPHGVPQLSLYEHFNSPHPTPAPADISQKQVHRPLQTPDLSGFYSLTSGSMGQLPHTVSWFTHPSLMLGSGVPGHPAAIPHPAIVPPSGKQELQPFDRNLKTQAESKAEKEAKKPTIKKPLNAFMLYMKEMRAKVIAECTLKESAAINQILGRRWHALSREEQAKYYELARKERQLHMQLYPGWSARDNYGKKKRRSREKHQESTTETNWPRELKDGNGQESLSMSSSSSPA

SEQ ID NO: 49836 - DNA, 810 bp, Artificial Sequence
  derived and/or modified sequence
atgtacaaagagactgtgtacagcgccttcaacctgctcatgcactacccaccaccgtccggcgcaggccaacaccctcagccgcagcctccactgcataaagcgaatcagccgcctcacggagtgccacagctctcgctgtatgaacactttaactcaccccacccgacacctgctccagccgacatctcccaaaagcaagtccatcgaccattgcagactccagacctgtccggcttttactcactgacctcaggaagtatggggcagttgcctcacacagtatcttggtttacccaccccagcctcatgcttgggtccggagtcccaggacaccctgctgccattccccatccagccattgtgcctcctagtggcaagcaagaactgcaaccattcgacagaaacttgaaaacacaggccgagtccaaagcagagaaagaggctaagaagcccacaatcaagaaaccccttaacgctttcatgttgtacatgaaggaaatgagagctaaagtcatcgctgagtgtaccctgaaggaaagtgctgctatcaaccagatccttggccggcgctggcacgcattgagccgtgaggagcaagctaaatactacgaactcgcacgaaaagagagacaactgcatatgcaactgtatcccgggtggagtgcgcgggataattatgggaaaaagaaacgccggtctcgtgagaaacaccaggagtctacaaccgagacaaattggccacgagaactgaaggatgggaatggccaagaaagccttagcatgagtagctcctcttcacccgcatag

SEQ ID NO: 49837 - DNA, 810 bp, Artificial Sequence
  derived and/or modified sequence
atgtacaaggagaccgtgtacagcgccttcaacctgctgatgcactaccccccacccagcggggccggccagcacccccagccccagccccccctgcacaaggccaaccagcccccccacggcgtgccccagctgagcctgtatgagcacttcaacagcccccaccccaccccagccccagctgacatcagccagaagcaggtgcaccggcccctgcagaccccagacctgagcggcttctacagcctgaccagcggctccatgggccagctgccccacacagtgtcctggttcacccaccccagcctgatgctgggcagcggcgtgcccggccaccctgctgccatcccccacccagccatcgtgcccccatctgggaagcaggagctgcagccctttgacaggaacctgaagacccaggccgagagcaaggccgagaaggaggccaagaagcccaccatcaagaagcccctgaatgccttcatgctgtacatgaaggagatgagggccaaggtgattgctgaatgtaccctgaaggagagcgctgccatcaaccagatcctgggccgccgctggcacgccctgagccgggaggagcaggccaagtactatgagctggccaggaaggagcggcagctgcacatgcagctgtacccaggctggagcgcccgggacaactacggcaagaagaagaggaggagccgggagaagcaccaggagagcaccacagagaccaactggccccgggagctgaaggatggaaatggccaggagagcctgtccatgagcagcagcagcagccctgcctag

SEQ ID NO: 49838 - DNA, 810 bp, Artificial Sequence
  derived and/or modified sequence
atgtacaaggagaccgtgtacagcgccttcaacctgctgatgcactaccccccccctagtggcgcgggacagcaccctcaaccacagccgcccctgcataaagccaaccagccccctcatggagtaccgcaactttcactgtatgagcatttcaactccccccaccctacaccagctcccgccgacatttcacagaagcaagttcaccgccctctgcagaccccagatttatccgggttttacagcttgaccagcggcagcatgggtcagttgccacatacagtttcttggtttacacacccctccctaatgctaggctcaggagttcctgggcatcccgctgctataccacaccccgcaatcgtcccgcctagcggtaaacaggaactccagcctttcgaccgaaaccttaagacccaggcagaaagcaaagccgagaaggaggcgaaaaaacccactataaagaagccgttaaacgctttcatgctgtacatgaaggaaatgcgtgcgaaagtgatcgctgagtgtaccctgaaggagtctgccgccatcaatcagattctgggcaggagatggcatgctctgagcagggaagagcaggcaaagtattatgagctggccagaaaggaacgacagctgcatatgcaactgtatccaggatggtctgcgcgcgataattacggcaaaaaaaaacgtcgttctcgagagaaacatcaagagagtaccacggaaactaattggcccagggagctcaaagacggtaacggccaggagagcttgtcgatgtcaagtagctccagtcctgcctag

SEQ ID NO: 49839 - DNA, 810 bp, Artificial Sequence
  derived and/or modified sequence
atgtacaaagaaaccgtctatagcgcctttaacctactgatgcattatccacctccttctggcgcaggacagcatccacagcctcagccacccctccataaagccaaccagccaccccacggtgtcccccaactgtcattgtatgaacattttaatagtccccaccccacgcccgctccagcagatatttcccagaaacaggttcaccggccactgcaaacccctgatttaagcggcttctactcattaacatcaggctctatggggcagcttccacatacagtttcttggtttactcaccccagcctaatgctcgggtcaggcgtgcccggtcaccccgctgcgatacctcatcccgctatagtgccaccgagcggaaagcaagagctgcagcccttcgacagaaatttgaaaacgcaggccgagagcaaggccgaaaaagaggctaagaagccaacaattaaaaagcctctaaatgcctttatgttgtacatgaaggagatgcgggcaaaagtgatcgctgagtgtacgctaaaagaaagtgcggctataaatcaaattctgggtagaaggtggcacgctctgagccgggaagagcaggccaagtactacgaactagcccgaaaggaacgacagctacatatgcaattgtatccgggttggtctgccagggacaactatggtaaaaaaaagcgcaggagcagagaaaagcaccaggagtccaccactgaaaccaactggccgagagagttgaaagatgggaatgggcaggagtctctgagcatgagctcaagttcctccccagcatag

SEQ ID NO: 49840 - DNA, 1254 bp, Artificial Sequence
  derived and/or modified sequence
gcccaggtgactgactaatccgccgccttcaggagacagaattggccaaggcctgaaggccccggagtgcaccagcggcatgtacaaagagaccgtctactccgccttcaatctgctcatgcattacccacccccctcgggagcagggcagcacccccagccgcagcccccgctgcacaaggccaatcagcccccccacggtgtcccccaactctctctctacgaacatttcaacagcccacatcccacccctgcacctgcggacatcagccagaagcaagttcacaggcctctgcagacccctgacctctctggcttctactccctgacctcaggcagcatggggcagctcccccacactgtgagctggttcacccacccatccttgatgctaggttctggtgtacctggtcacccagcagccatcccccacccggccattgtgcccccctcagggaagcaggagctgcagcccttcgaccgcaacctgaagacacaagcagagtccaaggcagagaaggaggccaagaagccaaccatcaagaagcccctcaatgccttcatgctgtacatgaaggagatgagagccaaggtcattgcagagtgcacacttaaggagagcgctgccatcaaccagatcctgggccgcaggtggcacgcgctgtcgcgagaagagcaggccaagtactatgagctggcccgcaaggagaggcagctgcacatgcagctatacccaggctggtcagcgcgggacaactacgggaagaagaagaggcggtcgagggaaaagcaccaagaatccaccacagagacaaactggcccagagaactcaaggatggtaatggacaagagtcactgtccatgtcttcttcctctagcccagcttgaggactgggatggctgggcaaggaagccataggcattgcggccccttgccttggtgcagatgtgagtcccacaaacacatctggagaagctcaaaggccgggactgggagatgactcccttggaagacaggagagatgactcccttggaagacagatgacagcccataggcctagtgacaaaaggcccctttgccaccttgtggctgttctgggaactgcacctgtcctaggtctgggccagaccaagcagaatggcagtctgaggacactgacttaccacccaagtcccaggaagagaggacaaggaatcagccaggcctgtgcaaaggcagcattttttggttgtggtgtatgactatgaattc

SEQ ID NO: 49841 - DNA, 810 bp, Artificial Sequence
  derived and/or modified sequence
atgtacaaggagaccgtgtacagcgccttcaacctgctgatgcactaccccccccccagcggcgccggccagcacccccagccccagccccccctgcacaaggccaaccagcccccccacggcgtgccccagctgagcctgtacgagcacttcaacagcccccaccccacccccgcccccgccgacatcagccagaagcaggtgcacagacccctgcagacccccgacctgagcggcttctacagcctgaccagcggcagcatgggccagctgccccacaccgtgagctggttcacccaccccagcctgatgctgggcagcggcgtgcccggccaccccgccgccatcccccaccccgccatcgtgccccccagcggcaagcaggagctgcagcccttcgacagaaacctgaagacccaggccgagagcaaggccgagaaggaggccaagaagcccaccatcaagaagcccctgaacgccttcatgctgtacatgaaggagatgagagccaaggtgatcgccgagtgcaccctgaaggagagcgccgccatcaaccagatcctgggcagaagatggcacgccctgagcagagaggagcaggccaagtactacgagctggccagaaaggagagacagctgcacatgcagctgtaccccggctggagcgccagagacaactacggcaagaagaagagaagaagcagagagaagcaccaggagagcaccaccgagaccaactggcccagagagctgaaggacggcaacggccaggagagcctgagcatgagcagcagcagcagccccgcctag

SEQ ID NO: 49842 - protein, 343 aa, Artificial Sequence
  derived and/or modified sequence
MEAVELARKLQEEATCSICLDYFTDPVMTTCGHNFCRACIQLSWEKARGKKGRRKRKGSFPCPECREMSPQRNLLPNRLLTKVAEMAQQHPGLQKQDLCQEHHEPLKLFCQKDQSPICVVCRESREHRLHRVLPAEEAVQGYKLKLEEDMEYLREQITRTGNLQAREEQSLAEWQGKVKERRERIVLEFEKMNLYLVEEEQRLLQALETEEEETASRLRESVACLDRQGHSLELLLLQLEERSTQGPLQMLQDMKEPLSRKNNVSVQCPEVAPPTRPRTVCRVPGQIEVLRGFLGKWAPRARTSDPGSLGDAPLYPLASEATNGGGSTSALPGDGHWLFTVPS

SEQ ID NO: 49843 - protein, 50 aa, Artificial Sequence
  derived and/or modified sequence
MEAVELARKLQEEATCSICLDYFTDPVMTTCGHNFCRACIQLSWEKARGK

SEQ ID NO: 49844 - DNA, 528 bp, Artificial Sequence
  derived and/or modified sequence
atggaggccgtggagctggccagaaagctgcaggaggaggccacctgcagcatctgcctggactacttcaccgaccccgtgatgaccacctgcggccacaacttctgcagagcctgcatccagctgagctgggagaaggccagaggcaagaagggcagaagaaagagaaagggcagcttcccctgccccgagtgcagagagatgagcccccagagaaacctgctgcccaacagactgctgaccaaggtggccgagatggcccagcagcaccccggcctgcagaagcaggacctgtgccaggagcaccacgagcccctgaagctgttctgccagaaggaccagagccccatctgcgtggtgtgcagagagagcagagagcacagactgcacagagtgctgcccgccgaggaggccgtgcagggctacaagctgaagctggaggaggacatggagtacctgagagagcagatcaccagaaccggcaacctgcaggccagagaggagcagagcctggccgagtggcagtag

SEQ ID NO: 49845 - DNA, 1032 bp, Artificial Sequence
  derived and/or modified sequence
atggaggccgtggagctggccagaaagctgcaggaggaggccacctgcagcatctgcctggactacttcaccgaccccgtgatgaccacctgcggccacaacttctgcagagcctgcatccagctgagctgggagaaggccagaggcaagaagggcagaagaaagagaaagggcagcttcccctgccccgagtgcagagagatgagcccccagagaaacctgctgcccaacagactgctgaccaaggtggccgagatggcccagcagcaccccggcctgcagaagcaggacctgtgccaggagcaccacgagcccctgaagctgttctgccagaaggaccagagccccatctgcgtggtgtgcagagagagcagagagcacagactgcacagagtgctgcccgccgaggaggccgtgcagggctacaagctgaagctggaggaggacatggagtacctgagagagcagatcaccagaaccggcaacctgcaggccagagaggagcagagcctggccgagtggcagggcaaggtgaaggagagaagagagagaatcgtgctggagttcgagaagatgaacctgtacctggtggaggaggagcagagactgctgcaggccctggagaccgaggaggaggagaccgccagcagactgagagagagcgtggcctgcctggacagacagggccacagcctggagctgctgctgctgcagctggaggagagaagcacccagggccccctgcagatgctgcaggacatgaaggagcccctgagcagaaagaacaacgtgagcgtgcagtgccccgaggtggccccccccaccagacccagaaccgtgtgcagagtgcccggccagatcgaggtgctgagaggcttcctgggcaagtgggcccccagagccagaaccagcgaccccggcagcctgggcgacgcccccctgtaccccctggccagcgaggccaccaacggcggcggcagcaccagcgccctgcccggcgacggccactggctgttcaccgtgcccagctag

SEQ ID NO: 49846 - DNA, 153 bp, Artificial Sequence
  derived and/or modified sequence
atggaggccgtggagctggccagaaagctgcaggaggaggccacctgcagcatctgcctggactacttcaccgaccccgtgatgaccacctgcggccacaacttctgcagagcctgcatccagctgagctgggagaaggccagaggcaagtag

SEQ ID NO: 49847 - DNA, 528 bp, Artificial Sequence
  derived and/or modified sequence
atggaagcagttgagctggctagaaaattgcaggaggaagcgacgtgcagcatatgcctggattattttaccgatcctgtgatgactacttgcggtcataacttctgccgcgcatgtattcagttgtcatgggaaaaggccaggggcaaaaaggggcggcgaaagaggaagggatctttcccttgtccagagtgcagagagatgtcaccacagcgaaatctcctgccgaatagattattaacaaaggtggccgagatggctcaacagcacccaggtctccagaagcaggatctctgccaggaacaccacgagcccctgaagctgttttgccagaaagaccagagccctatatgtgtagtgtgcagagagtctcgggaacaccggctccatagagtgttgcctgcagaagaagccgtacaaggctacaagctgaagcttgaggaagacatggaatatcttcgggaacagattacccgcacaggcaatctgcaagccagggaggagcagtcactcgcagaatggcaatag

SEQ ID NO: 49848 - DNA, 1032 bp, Artificial Sequence
  derived and/or modified sequence
atggaagctgtggagctggctcggaaactacaggaggaggctacctgctccatctgtttggattactttaccgaccccgtcatgaccacctgtggacacaatttctgccgcgcatgcatccagctgagttgggaaaaggccagggggaagaaaggcagacgcaaacggaagggatcgtttccgtgtccagaatgccgagagatgtccccacagaggaatctgctgcccaaccgtctcctgaccaaggtcgcagaaatggcacagcagcatccaggccttcagaagcaggacctttgccaagagcaccacgagcccttgaagctgttttgccagaaagatcaaagccccatttgtgtggtctgccgagagtctcgagagcaccgacttcatagagtgctgccagctgaagaggctgtacaaggctataagctcaagcttgaagaggacatggaatacctgcgcgaacagatcactcgtacagggaatctgcaagcacgggaggagcagtccctggctgaatggcagggtaaagttaaggagagacgagagcgcatcgtgcttgaattcgaaaagatgaacctctatctcgtcgaggaagagcagagactgctgcaggcactggaaaccgaggaagaagagaccgcaagtcggctgagggagagtgtagcttgtttagacagacaaggacactctctcgagctgctactgttacaactggaggaaaggagcacacaaggacctcttcaaatgttacaagacatgaaagaacctctaagcagaaagaacaatgtctcagtgcaatgcccagaagtggcacctccaaccaggcctcgcaccgtctgtagagttcctggacagatcgaggtcctcagaggctttctgggcaaatgggcacctagggcccgtacaagtgatccaggaagtctcggggacgcaccgctttacccactggcatccgaagccaccaacggaggcggcagcacctccgccttacctggcgacggccactggctgttcacagtcccttcttag

SEQ ID NO: 49849 - DNA, 153 bp, Artificial Sequence
  derived and/or modified sequence
atggaagcagtggagttggctaggaaacttcaagaggaggctacctgttcgatttgtctggactattttaccgacccagttatgaccacgtgcggccacaatttttgtagagcttgtattcaactgtcatgggagaaagcacgaggaaagtag

SEQ ID NO: 49850 - DNA, 528 bp, Artificial Sequence
  derived and/or modified sequence
atggaggccgtggagctggccaggaagctgcaggaggaggccacctgcagcatctgcctggactacttcacagatcctgtgatgaccacctgtggccacaacttctgccgggcctgcatccagctgtcctgggagaaggcccggggcaagaagggccgcaggaagaggaagggcagcttcccctgcccagagtgccgggagatgagcccccagaggaacctgctgcccaaccggctgctgaccaaggtggccgagatggcccagcagcaccctggcctgcagaagcaggacctgtgccaggagcaccacgagcccctgaagctgttctgccagaaggaccagagccccatctgtgtggtgtgccgggagagccgggagcaccggctgcaccgggtgctgcctgctgaggaggccgtgcagggctacaagctgaagctggaggaggacatggagtacctgcgggagcagatcaccaggacaggcaacctgcaggcccgggaggagcagagcctggccgagtggcagtag

SEQ ID NO: 49851 - DNA, 1032 bp, Artificial Sequence
  derived and/or modified sequence
atggaggccgtggagctggccaggaagctgcaggaggaggccacctgcagcatctgcctggactacttcacagatcctgtgatgaccacctgtggccacaacttctgccgggcctgcatccagctgtcctgggagaaggcccggggcaagaagggccgcaggaagaggaagggcagcttcccctgcccagagtgccgggagatgagcccccagaggaacctgctgcccaaccggctgctgaccaaggtggccgagatggcccagcagcaccctggcctgcagaagcaggacctgtgccaggagcaccacgagcccctgaagctgttctgccagaaggaccagagccccatctgtgtggtgtgccgggagagccgggagcaccggctgcaccgggtgctgcctgctgaggaggccgtgcagggctacaagctgaagctggaggaggacatggagtacctgcgggagcagatcaccaggacaggcaacctgcaggcccgggaggagcagagcctggccgagtggcagggcaaggtgaaggagcggcgggagagaattgtgctggagtttgagaagatgaacctgtacctggtggaggaggagcagaggctgctgcaggccctggagacagaggaggaggagacagccagccggctgcgggagagcgtggcctgcctggaccggcagggccacagcctggagctgctgctgctgcagctggaggagaggagcacccagggccccctgcagatgctgcaggacatgaaggagcccctgagcaggaagaacaacgtgtctgtgcagtgcccagaggtggccccacccacccggcccaggacagtgtgccgggtgcccggccagatcgaggtgctgcggggcttcctgggcaagtgggccccccgggcccggaccagtgaccccggcagcctgggagatgcccccctgtaccccctggccagcgaggccaccaatggaggcggcagcaccagcgccctgcctggagatggccactggctgttcaccgtgcccagctag

SEQ ID NO: 49852 - DNA, 153 bp, Artificial Sequence
  derived and/or modified sequence
atggaggccgtggagctggccaggaagctgcaggaggaggccacctgcagcatctgcctggactacttcacagatcctgtgatgaccacctgtggccacaacttctgccgggcctgcatccagctgtcctgggagaaggcccggggcaagtag

SEQ ID NO: 49853 - DNA, 528 bp, Artificial Sequence
  derived and/or modified sequence
atggaggccgtggagctggcccggaagctgcaggaggaggccacctgctctatttgtctggactattttacagaccccgtgatgacaacttgtgggcataacttttgtcgggcatgcattcagctcagctgggaaaaggcccggggcaagaagggccgacgcaagcgcaagggatcttttccctgtcctgagtgccgtgaaatgtcacctcaacggaacctgctacccaatcggctgcttaccaaagtggccgagatggcgcagcagcacccagggctgcagaaacaggacctctgtcaggaacaccacgaacctttgaaactgttttgtcagaaggatcagagccctatctgcgtggtctgtcgcgaatcccgcgagcatcgcctccatcgggtgctgcccgcagaagaggccgtccaaggctacaaattaaagcttgaagaggatatggaatatctgcgcgagcagataacaaggaccggaaatctccaggcacgcgaggaacagtcccttgcagaatggcaatag

SEQ ID NO: 49854 - DNA, 1032 bp, Artificial Sequence
  derived and/or modified sequence
atggaggccgtggagctggcccggaagctgcaggaggaggccacctgctccatttgcctggattacttcacagacccggtgatgacgacatgcgggcataatttctgtagggcttgcattcagttgagctgggagaaggcccggggcaagaaaggacgtaggaagcgaaaggggagtttcccctgcccagaatgcagagagatgagtccacaaagaaatctcctgcctaatcggcttctgacgaaagtagccgagatggcgcaacagcatccagggttgcagaaacaggatttgtgtcaggagcaccacgagccactgaagctgttctgtcagaaagatcaaagccccatttgtgttgtctgtcgcgagtcgcgcgagcataggttgcacagagtgcttccggcagaagaggccgtccaggggtataaactgaagctggaggaagacatggaatacctgagagaacaaataacccggactggcaacttgcaagcccgcgaggagcaatcactggccgaatggcaggggaaggtgaaagaacggcgggaaaggatcgtgctcgagtttgaaaaaatgaatctgtatttagtggaagaggagcagcgtctgttgcaggcactcgagaccgaagaagaagagaccgcgagtcggcttagggagtcggtggcctgcctcgataggcaggggcatagtctggagctgttgctgctgcagctggaagaacggagtacccagggtccactgcaaatgctacaggacatgaaggaaccactgagtagaaagaataacgtgtcggtccagtgcccagaagtggcaccaccaacacggcctagaacggtctgcagagtacctggccagatcgaggtactgagaggctttctggggaagtgggctcccagagcaaggacctccgatcccgggtccctgggcgacgcgccgttataccccctggccagtgaggcgactaatggaggcggatcaacgagcgccctgccgggcgatggtcactggctgttcacagtccctagttag

SEQ ID NO: 49855 - DNA, 153 bp, Artificial Sequence
  derived and/or modified sequence
atggaggccgtggagctggcccggaagctgcaggaggaggccacctgttccatttgcctcgactactttactgatccagttatgacaacctgtggacacaatttttgcagggcttgcatccagctgtcctgggaaaaagccagagggaagtag

SEQ ID NO: 49856 - DNA, 528 bp, Artificial Sequence
  derived and/or modified sequence
atggaggctgttgagctcgctcggaagttacaggaggaagccacctgcagtatttgtctcgattactttacggatcctgtcatgactacatgcggccacaacttctgcagggcatgcattcagctctcatgggagaaagcgcgaggaaagaagggacgacgaaaaaggaaaggatctttcccatgcccagaatgccgcgaaatgtctcctcagcgcaatctcctgcctaatcgcctcctgaccaaggtggccgagatggcccaacaacatcccggtttacagaaacaagacctttgtcaggagcatcatgaacctctcaaactcttctgccagaaggatcagtcccccatctgcgtggtgtgccgagaaagcagagagcacaggctgcacagagtcctgcccgctgaggaggcagtgcagggctacaagttgaagttagaggaagacatggagtatctccgggagcagataactcggactggtaaccttcaggccagggaagagcagtctctggcagaatggcagtag

SEQ ID NO: 49857 - DNA, 1032 bp, Artificial Sequence
  derived and/or modified sequence
atggaggccgttgagctggcacggaagctgcaggaggaagctacctgtagtatctgtctggattacttcactgacccagtgatgaccacctgtggacataacttttgtagggcttgcatccagctatcctgggagaaagcccgaggaaaaaagggcaggaggaagcgtaaggggtctttcccctgtcccgagtgcagagaaatgtctcctcagcggaatcttttacccaaccggctcctgacaaaggtggctgagatggcacagcagcaccccggactccaaaagcaggatctatgccaggagcatcatgaacccctgaaactcttctgccagaaggaccagagcccgatttgtgtggtctgtagagagagcagggaacacagactgcacagggtgctccctgctgaagaggccgtgcaggggtataagctcaagctggaggaagacatggaatatctaagggaacagattacacggacaggtaacttacaggcgagggaagagcagagtctggcagagtggcaagggaaagtgaaggaaaggagggagagaattgtgttagagtttgaaaagatgaatctgtacctggtcgaagaggagcagagactcttacaggcattagaaactgaggaagaggaaaccgcctccaggctgcgtgagtcagtggcatgcctcgacagacagggccactctctcgagctgttgcttctccagctggaggaacgtagtacgcaaggccctctccagatgctacaggatatgaaagaaccgctgagcagaaaaaacaacgtgtcagtccaatgccctgaggtggcaccccctacccgtcctaggaccgtatgtagggttccgggacagatcgaagtgcttcgcggttttctgggcaagtgggctcccagggcaagaaccagtgatcccggttccctgggagacgctcccctctatcctctcgcttcggaggccacgaatggcggaggcagtaccagcgcccttcctggcgacggtcactggctgttcacggtgcctagctag

SEQ ID NO: 49858 - DNA, 153 bp, Artificial Sequence
  derived and/or modified sequence
atggaagctgtggagctggccaggaagctccaggaggaagccacctgttctatctgcttagattattttactgacccggtgatgactacttgcgggcataatttttgtcgtgcttgcattcagctgagttgggagaaggcaaggggcaagtag

SEQ ID NO: 49859 - DNA, 808 bp, Artificial Sequence
  derived and/or modified sequence
ctgggcttcgtgggggcagacccagcctttcccggcagcgagcgctcggccaggtgcactaggcgctgtgcgggccccccttccccgcggtgagtagcccccaccccgccgcctaggctaccctcctgtggcgcctgggccacgacctaagcctaacccggtcctcctcgccctccaacgcccggccttcccgcctccgccggccgccgcgtccctggaggggctagcgcgcttcaacaagagtccctcaagcgggaacctgcctcgtgtctcccaggagccatggaggctgtggaactcgccagaaaactgcaggaggaagctacgtgctccatctgtctggattacttcacagaccctgtgatgaccacctgtggccacaacttctgccgagcctgcatccagctgagctgggaaaaggcgaggggcaagaaggggaggcggaagcggaagggctccttcccctgccccgagtgcagagagatgtccccgcagaggaacctgctgcccaaccggctgctgaccaaggtggccgagatggcgcagcagcatcctggtctgcagaagcaagacctgtgccaggagcaccacgagcccctcaagcttttctgccagaaggaccagagccccatctgtgtggtgtgcagggagtcccgggagcaccggctgcacagggtgctgcccgccgaggaggcagtgcaggggtacaagttgaagctggaggaggacatggagtaccttcgggagcagatcaccaggacagggaatctgcaggccagggaggagcagagcttagccgagtggcagg

SEQ ID NO: 49860 - DNA, 1731 bp, Artificial Sequence
  derived and/or modified sequence
agtcccggccgccgaacactccctcgcccagcattcccctcccccgccgccccccagcccccgctgacgccacaaagtccctaggcctcccgaccccaggtccccacgccccgggccgggccgcagcctcctgggcttcgtgggggcagacccagcctttcccggcagcgagcgctcggccaggtgcactaggcgctgtgcgggccccccttccccgcggtgagtagcccccaccccgccgcctaggctaccctcctgtggcgcctgggccacgacctaagcctaacccggtcctcctcgccctccaacgcccggccttcccgcctccgccggccgccgcgtccctggaggggctagcgcgcttcaacaaggagccatggaggctgtggaactcgccagaaaactgcaggaggaagctacgtgctccatctgtctggattacttcacagaccctgtgatgaccacctgtggccacaacttctgccgagcctgcatccagctgagctgggaaaaggcgaggggcaagaaggggaggcggaagcggaagggctccttcccctgccccgagtgcagagagatgtccccgcagaggaacctgctgcccaaccggctgctgaccaaggtggccgagatggcgcagcagcatcctggtctgcagaagcaagacctgtgccaggagcaccacgagcccctcaagcttttctgccagaaggaccagagccccatctgtgtggtgtgcagggagtcccgggagcaccggctgcacagggtgctgcccgccgaggaggcagtgcaggggtacaagttgaagctggaggaggacatggagtaccttcgggagcagatcaccaggacagggaatctgcaggccagggaggagcagagcttagccgagtggcagggcaaggtgaaggagcggagagaacgcattgtgctggagtttgagaagatgaacctctacctggtggaagaagagcagaggctcctccaggctctggagacggaagaagaggagactgccagcaggctccgggagagcgtggcctgcctggaccggcagggtcactctctggagctgctgctgctgcagctggaggagcggagcacacaggggcccctccagatgctgcaggacatgaaggaacccctgagcaggaagaacaacgtgagtgtgcagtgcccagaggttgcccccccaaccagacccaggactgtgtgcagagttcccggacagattgaagtgctaagaggctttctaggtaagtgggcacccagggccaggacctctgacccaggatctcttggcgatgccccactgtaccccctagcctcggaagccaccaatggggggggttctacaagtgcactgcctggtgacggtcactggctattcactgtgccttcgtagggcggcgttactggtggttctaattcatgggatgaatcttgttgagttcccagtggtctctctgcccagccccctgtaccttattgccaccaaggcccacacacaattggtgtgtggaagcatcaagtaaccccagattcacagcaggggaggcctctgcggagttaggggaccattggccacatccaccactagggcccggggactcccacctttgaccctgaatgccccacacctctccccatctctccaccaccacgcccatctacagaggatgtggtgcctgatgccacctccgcgtacccctacctcctcctgtatga

SEQ ID NO: 49861 - DNA, 551 bp, Artificial Sequence
  derived and/or modified sequence
acgccccgggccgggccgcagcctcctgggcttcgtgggggcagacccagcctttcccggcagcgagcgctcggccaggtgcactaggcgctgtgcgggccccccttccccgcggtgagtagcccccaccccgccgcctaggctaccctcctgtggcgcctgggccacgacctaagcctaacccggtcctcctcgccctccaacgcccggccttcccgcctccgccggccgccgcgtccctggaggggctagcgcgcttcaacaagtcctagccctcctctgtaaagggaggctgtacaggacggttgcacactgccggcgcccagatcatcgggctgctccctccaactctctccagagtccctcaagcgggaacctgcctcgtgtctcccaggagccatggaggctgtggaactcgccagaaaactgcaggaggaagctacgtgctccatctgtctggattacttcacagaccctgtgatgaccacctgtggccacaacttctgccgagcctgcatccagctgagctgggaaaaggcgaggggcaagaa

SEQ ID NO: 49862 - protein, 613 aa, Artificial Sequence
  derived and/or modified sequence
MATIPDWKLQLLARRRQEEASVRGREKAERERLSQMPAWKRGLLERRRAKLGLSPGEPSPVLGTVEAGPPDPDESAVLLEAIGPVHQNRFIRQERQQQQQQQQRSEELLAERKPGPLEARERRPSPGEMRDQSPKGRESREERLSPRETRERRLGIGGAQELSLRPLEARDWRQSPGEVGDRSSRLSEAWKWRLSPGETPERSLRLAESREQSPRRKEVESRLSPGESAYQKLGLTEAHKWRPDSRESQEQSLVQLEATEWRLRSGEERQDYSEECGRKEEWPVPGVAPKETAELSETLTREAQGNSSAGVEAAEQRPVEDGERGMKPTEGWKWTLNSGKAREWTPRDIEAQTQKPEPPESAEKLLESPGVEAGEGEAEKEEAGAQGRPLRALQNCCSVPSPLPPEDAGTGGLRQQEEEAVELQPPPPAPLSPPPPAPTAPQPPGDPLMSRLFYGVKAGPGVGAPRRSGHTFTVNPRRSVPPATPATPTSPATVDAAVPGAGKKRYPTAEEILVLGGYLRLSRSCLAKGSPERHHKQLKISFSETALETTYQYPSESSVLEELGPEPEVPSAPNPPAAQPDDEEDEEELLLLQPELQGGLRTKALIVDESCRR

SEQ ID NO: 49863 - protein, 377 aa, Artificial Sequence
  derived and/or modified sequence
MATIPDWKLQLLARRRQEEASVRGREKAERERLSQMPAWKRGLLERRRAKLGLSPGEPSPVLGTVEAGPPDPDESAVLLEAIGPVHQNRFIRQERQQQQQQQQRSEELLAERKPGPLEARERRPSPGEMRDQSPKGRESREERLSPRETRERRLGIGGAQELSLRPLEARDWRQSPGEVGDRSSRLSEAWKWRLSPGETPERSLRLAESREQSPRRKEVESRLSPGESAYQKLGLTEAHKWRPDSRESQEQSLVQLEATEWRLRSGEERQDYSEECGRKEEWPVPGVAPKETAELSETLTREAQGNSSAGVEAAEQRPVEDGERGMKPTEGWKWTLIMSLAGKGNQHLVTCFPHPVSGGRANCPISTLIQSPWCGWG

SEQ ID NO: 49864 - protein, 613 aa, Artificial Sequence [sequence omitted]

SEQ ID NO: 49865 - protein, 613 aa, Artificial Sequence
  derived and/or modified sequence
MATIPDWKLQLLARRRQEEASVRGREKAERERLSQMPAWKRGLLERRRAKLGLSPGEPSPVLGTVEAGPPDPDESAVLLEAIGPVHQNRFIRQERQQQQQQQQRSEELLAERKPGPLEARERRPSPGEMRDQSPKGRESREERLSPRETRERRLGIGGAQELSLRPLEARDWRQSPGEVGDRSSRLSEAWKWRLSPGETPERSLRLAESREQSPRRKEVESRLSPGESAYQKLGLTEAHKWRPDSRESQEQSLVQLEATEWRLRSGEERQDYSEECGRKEEWPVPGVAPKETAELSETLTREAQGNSSAGVEAAEQRPVEDGERGMKPTEGWKWTLNSRKAREWTPRDIEAQTQKPEPPESAEKLLESPGVEAGEGEAEKEEAGAQGRPLRALQNCCSVPSPLPPEDAGTGGLRQQEEEAVELQPPPPAPLSPPPPAPTAPQPPGDPLMSRLFYGVKAGPGVGAPRRSGHTFTVNPRRSVPPATPATPTSPATVDAAVPGAGKKRYPTAEEILVLGGYLRLSRSCLAKGSPERHHKQLKISFSETALETTYQYPSESSVLEELGPEPEVPSAPNPPAAQPDDEEDEEELLLLQPELQGGLRTKALIVDESCRR

SEQ ID NO: 49866 - protein, 76 aa, Artificial Sequence
  derived and/or modified sequence
LKISFSETALETTYQYPSESSVLEELGPEPEVPSAPNPPAAQPDDEEDEEELLLLQPELQGGLRTKALIVDESCRR

SEQ ID NO: 49867 - protein, 377 aa, Artificial Sequence
  derived and/or modified sequence
MATIPDWKLQLLARRRQEEASVRGREKAERERLSQMPAWKRGLLERRRAKLGLSPGEPSPVLGTVEAGPPDPDESAVLLEAIGPVHQNRFIRQERQQQQQQQQRSEELLAERKPGPLEARERRPSPGEMRDQSPKGRESREERLSPRETRERRLGIGGAQELSLRPLEARDWRQSPGEVGDRSSRLSEAWKWRLSPGETPERSLRLAESREQSPRRKEVESGLSPGESAYQKLGLTEAHKWRPDSRESQEQSLVQLEATEWRLRSGEERQDYSEECGRKEEWPVPGVAPKETAELSETLTREAQGNSSAGVEAAEQRPVEDGERGMKPTEGWKWTLIMSLAGKGNQHLVTCFPHPVSGGRANCPISTLIQSPWCGWG

SEQ ID NO: 49868 - DNA, 1134 bp, Artificial Sequence
  derived and/or modified sequence
atggccaccatccccgactggaagctgcagctgctggccagaagaagacaggaggaggccagcgtgagaggcagagagaaggccgagagagagagactgagccagatgcccgcctggaagagaggcctgctggagagaagaagagccaagctgggcctgagccccggcgagcccagccccgtgctgggcaccgtggaggccggcccccccgaccccgacgagagcgccgtgctgctggaggccatcggccccgtgcaccagaacagattcatcagacaggagagacagcagcagcagcagcagcagcagagaagcgaggagctgctggccgagagaaagcccggccccctggaggccagagagagaagacccagccccggcgagatgagagaccagagccccaagggcagagagagcagagaggagagactgagccccagagagaccagagagagaagactgggcatcggcggcgcccaggagctgagcctgagacccctggaggccagagactggagacagagccccggcgaggtgggcgacagaagcagcagactgagcgaggcctggaagtggagactgagccccggcgagacccccgagagaagcctgagactggccgagagcagagagcagagccccagaagaaaggaggtggagagcagactgagccccggcgagagcgcctaccagaagctgggcctgaccgaggcccacaagtggagacccgacagcagagagagccaggagcagagcctggtgcagctggaggccaccgagtggagactgagaagcggcgaggagagacaggactacagcgaggagtgcggcagaaaggaggagtggcccgtgcccggcgtggcccccaaggagaccgccgagctgagcgagaccctgaccagagaggcccagggcaacagcagcgccggcgtggaggccgccgagcagagacccgtggaggacggcgagagaggcatgaagcccaccgagggctggaagtggaccctgatcatgagcctggccggcaagggcaaccagcacctggtgacctgcttcccccaccccgtgagcggcggcagagccaactgccccatcagcaccctgatccagagcccctggtgcggctggggctag

SEQ ID NO: 49869 - DNA, 1842 bp, Artificial Sequence
  derived and/or modified sequence
atggcgacaatacctgactggaaactacagctgcttgcccggaggcggcaagaggaggcgtcagtaagagggcgtgagaaggctgaacgcgaaaggctgtcccagatgcctgcttggaagaggggactgctggagcggagacgtgccaaattgggattgagtcctggagaaccatcaccagtactcggaaccgtggaggcgggtccaccggatcctgacgaatcggcggtcctgctagaagctattggtcccgttcatcagaatcgctttattagacaggagagacagcagcaacagcaacagcaacaacgaagtgaggagcttttagccgagaggaaacccggacccctggaggcgcgagagcgcaggccatcacctggtgagatgcgcgatcaatccccgaagggtcgagaaagtagggaggagcgcctctcaccccgggaaaccagagagagaagactcggtatcggtggcgcccaagagctttctctgcgacccttagaggcacgggattggagacagtcccctggagaggttggagaccgcagcagccggctaagtgaggcttggaagtggcgcctgagtcccggcgagactccggagcgctcactgaggctggcagagagcagggaacagtcccctaggcggaaagaggttgaatcgcgcctcagccctggggaatcagcatatcagaagctcggcctgacagaagcgcataaatggcgtcctgactcccgggagtcccaggaacaatccttggttcaactagaagccaccgaatggaggctccggagcggtgaggagagacaggattatagtgaagagtgtggaaggaaagaagagtggccggtgcctggcgtcgcccctaaagagaccgcagagctttcagaaactctgaccagagaggcccagggaaattcctctgccggggtggaggctgcggagcaaaggcctgtggaggacggggaacggggcatgaaaccgaccgagggctggaagtggacccttaacagtggcaaagctcgcgaatggaccccccgcgatatcgaggctcagacacagaaaccagagcctcctgagtctgccgagaaactgttggaatctcccggcgtggaagccggagaaggtgaagccgaaaaggaggaagccggtgcccagggccgaccactgagggccctccagaattgttgtagcgtgccgtctccactccccccagaagatgctggaacaggaggcttgcgccagcaagaggaggaagccgtggagctccagcctccccccccagccccgctctctccgcctccacctgctcctacagctccccagccgcccggcgatccactgatgtccaggctgttctacggtgtgaaggccggaccaggagtcggggcacctcggcggtcaggccacacgtttaccgtgaatcccagaaggtccgtcccgcctgcaaccccggccacacccacgagtcctgccacagtcgatgccgcggtccccggggcgggaaaaaagagatacccgactgcagaggagatcttggttctgggaggataccttcgtctgtccaggagttgcctggcgaaagggtcaccggaacggcaccacaaacagctcaagatatcgttctctgagaccgcccttgagactacctatcagtatccatctgagtccagcgtgctggaggagctcggacccgagccagaggtgccaagtgcacctaatcccccggctgctcagcctgatgacgaagaggatgaggaggaactccttttgctgcagcctgaactacagggaggcttgcggacaaaggccctgatcgtcgacgaaagctgccgcaggtag

SEQ ID NO: 49870 - DNA, 1134 bp, Artificial Sequence
  derived and/or modified sequence
atggcaactattcccgactggaaactgcagctgctcgcccggcgccgccaggaggaagccagtgtccgtgggcgggagaaagcggaacgcgagagattgtcgcagatgcccgcttggaagcgcggcctcctggaaaggcgtcgcgctaagctagggctctctccgggggaaccttctccagtacttgggactgttgaggccggcccaccagatcccgacgagagcgccgtcctgctggaggccattgggcccgttcatcagaacaggttcatccgacaggaacggcagcagcagcagcagcagcagcaaagaagtgaggagctgcttgcagagcgaaaaccggggcctcttgaagcgagggagcgacggccaagtccaggcgagatgcgggatcaatccccaaagggtcgagagtcgcgcgaagagcgcctttctccccgcgaaacaagagaacggaggttggggatcggcggcgcccaagaattgtctctaagacccctcgaggctcgagactggcgtcagtcccctggcgaggttggcgaccgatcatcgcgcctgtccgaagcctggaaatggaggctttcgccaggcgagacgccagagcggagcttacggctagctgagtcacgtgaacagtccccacggcgcaaagaggtagagtctcgactttctcctggggaaagtgcctatcaaaaactcggtttaacagaagcacataaatggcgccctgacagccgcgagtcacaggagcagtccctggttcagttggaggccactgagtggcgactgcgctcaggggaggagaggcaggattattccgaggagtgcggacgcaaggaagagtggcctgtgcccggggttgctccaaaagaaaccgcggagctctctgagacccttaccagggaggcacagggcaatagctcagcgggagtggaggcagccgaacagcggcctgtagaggatggcgagcgggggatgaaaccgactgagggatggaaatggacactaatcatgagtctggccggaaaggggaaccagcatttggtgacttgcttcccgcatcctgtctccggtggacgggctaactgccccatctccacgttaatacagagcccttggtgtggatggggatag

SEQ ID NO: 49871 - DNA, 1842 bp, Artificial Sequence
  derived and/or modified sequence
atggcgaccatccccgactggaagcttcagcttttggcccggaggaggcaggaggaagctagcgtccgagggagagagaaagcagagcgggaaagattgagtcagatgcctgcttggaagagagggctactggagcgtcggcgtgctaagctaggtctgagcccgggtgagccctctccagtcctcggcacggttgaggccggcccgcctgatccagacgagtctgccgtactgctcgaggccatcgggccagtgcatcaaaacaggtttattagacaggagcgccaacaacagcagcaacagcagcaacggtccgaggagctgcttgccgaacggaagccgggtcctctggaggcaagagaacgacggccaagtccgggcgaaatgcgagatcagtcccccaagggacgagaatctcgggaagaacgcttgtcccctagagaaaccagagaacgccggctagggattggcggcgctcaggaacttagtctgcgtcctctggaagcaagagactggcggcaaagccctggcgaagtgggcgacagaagctccaggctgagtgaggcgtggaagtggaggttatctcctggcgagacccctgagagaagcctccggttggcggaatccagggaacaatctcccagacgcaaagaggtagaatccaggttgagccccggtgagagtgcctatcagaaactcgggctgacagaagcccacaagtggcgcccagactcccgggagagccaagaacagagcctggtgcagctggaggcaacggagtggcgccttcgttcaggagaggaacggcaggattattcggaagaatgtggaaggaaggaggagtggccagtgcccggagtggcacctaaagaaactgccgaactgagtgagaccctcactcgggaggcccagggaaatagcagcgcaggggtcgaagcggcggagcagcgtccagtagaggacggcgagcgaggaatgaaacctacagaggggtggaagtggaccctgaacagcggtaaggccagagagtggactcctagggacatcgaagcccagacgcagaaacccgaacccccagagagcgcggagaagttgctggaatcacccggcgttgaggctggagagggggaggccgagaaggaggaagcaggagcccagggcagacctctgcgggcgctccaaaactgttgctccgtgccgtctccccttcctcctgaagacgctggaactgggggcctaagacaacaggaggaagaagccgtggaacttcagccaccaccaccagcgccactgtcacctcccccccctgccccaactgcccctcagccaccaggagatcccctgatgagtcgcctgttctacggcgttaaagccggccccggcgtcggggctcccaggcgctctggacacacatttaccgtcaaccctaggcgctccgtgccaccagcgacaccagccacacccaccagccccgccaccgttgacgcagcggttcctggggctgggaaaaagcggtatcccactgctgaagagatactcgtacttggtggttatctccgcttgtcccgatcctgtcttgcgaagggctcacccgagcgccatcataagcagctgaagatcagcttttcagagaccgctttggaaaccacttatcaatatccaagtgagagcagcgtcttggaagagttaggccccgagcccgaagtcccttcagccccaaacccccctgcagctcaacccgatgacgaggaagacgaggaagaactgctgcttctccagccagagttgcagggtgggctgaggacaaaggctttgattgtggatgagtcctgcagaagatag

SEQ ID NO: 49872 - DNA, 1842 bp, Artificial Sequence
  derived and/or modified sequence
atggcaacaattccagactggaaactgcagttactagcccgccgccgccaggaagaagcatccgtaagagggagagaaaaggctgaacgtgagcggctgtcacagatgcccgcctggaaacgggggttgttagagcggcggcgagcaaagctgggcctttccccaggtgagccaagtccagtcctgggtacagtcgaagccgggccacccgaccctgacgagagcgcagttctgctggaggccatcggaccagtgcaccagaacagattcatcaggcaggagagacagcagcaacagcagcagcagcagcggtcagaagaacttctggctgagcggaagccaggcccgctcgaggcacgggagagaagaccttctcccggagagatgcgcgatcagtccccgaagggaagggaatcccgggaggaaaggttgtctcccagagaaacacgcgaaagaagactgggcatcggaggggcgcaagagctgtctcttcgaccactggaggccagggattggaggcagagcccaggtgaggtgggcgaccgaagctctagattgtctgaggcttggaagtggcggctgagcccaggggaaacccccgaaaggagcctgaggctggcagaaagtcgggagcagtctccacggcggaaggaggtcgaatctaggctgtcccccggggagtccgcctaccagaagctgggactgacagaggcgcacaaatggcgccccgacagccgcgaaagtcaggaacagagcctcgtgcaattggaagcaactgagtggcgcctgaggtccggcgaggagagacaggattattccgaggaatgtggacgaaaagaggaatggcccgtgccaggagtggccccaaaggaaactgctgagctgagcgagaccctgacccgtgaagcccaaggaaattcatcagctggggtggaggcggccgaacagagaccagtggaggatggcgagcgcggcatgaaacccaccgaaggatggaagtggaccctgaatagcggaaaggccagggaatggacacccagagatatcgaggctcagacacagaagcccgaacccccggaaagtgccgaaaaactgctggagtctcccggggttgaggcaggagagggggaagcggaaaaagaagaagccggcgcacagggccgccctcttagagccctgcaaaactgctgcagtgtccccagtccgttaccccccgaggacgctggaactggtggcttgcgtcaacaagaggaggaagctgtggaacttcagccacccccgcccgctcctctgagccccccaccacctgctcccacggcccctcagccccctggcgatccactcatgagccggctgttctacggcgtcaaggccggtcctggtgtgggcgctcctcgacggtccggacatacattcaccgttaacccaaggcgatcagtcccacccgctaccccagccaccccaacctccccagctactgtcgacgctgctgttcccggcgccggtaaaaagagataccccacagccgaggagatcctggtgctaggcggctacttaagactctctcgaagctgtctggctaagggaagccctgaacgccatcataagcagctcaagatctctttctcagaaacagccttagagaccacttatcagtatccatctgagtctagtgtgctcgaggaactcggacctgagcccgaagtaccctccgcccctaacccgcccgccgcccagcctgacgatgaagaagatgaagaagaactcctgctgctccagcccgaactgcaagggggactcagaaccaaggcccttattgtggacgagagctgcaggcggtag

SEQ ID NO: 49873 - DNA, 1842 bp, Artificial Sequence
  derived and/or modified sequence
atggcaactatcccagattggaaattgcagctgttagcccgaagaagacaagaggaagcaagtgtccggggcagagaaaaggctgagagagagaggctgagccagatgccagcttggaagcgagggctactggaacggaggcgtgccaaactgggactgtctcccggcgaaccttcaccagtgctgggaacggtggaggccggaccacccgatccagatgagtccgcggtgctgctggaagctatcggcccagtgcatcagaatcggttcatccgccaagagagacaacagcaacagcagcagcaacaacgaagcgaagagctactagctgagcggaaaccaggacccctcgaagcccgggagagaagaccttcccctggagaaatgagagatcagagccccaaggggcgcgagtcccgggaggaaagactcagtccacgggagacacgagagaggcgtctgggtattggcggcgcgcaggagctgagtctgaggcccctggaggccagggattggaggcagtcgcccggcgaagtgggagataggtcttctcgactcagtgaagcctggaagtggcggctctccccaggcgagactccagagaggtccctgaggctcgccgagtcccgggagcagtccccccgtaggaaggaagttgaaagccgcctttcccccggagagtccgcctaccagaagctgggactgaccgaggcccacaaatggaggccggacagccgagaatctcaagagcagagcctcgtgcagttggaagctacagagtggagactccgtagcggggaggaaaggcaggattattccgaggaatgcggtagaaaggaggagtggcctgttccaggggttgcgcctaaggaaacagcagagttgagcgagacgctcaccagggaagcccaaggcaattcttccgccggagtcgaggccgccgagcaaagacctgtcgaggatggggaacgaggaatgaagcccacagaaggctggaagtggaccctcaatagtggaaaggcacgcgagtggacgccacgggacattgaggcgcaaacccagaaaccagagcctcccgaaagcgcagagaagctcttagagagtcctggcgtagaagccggcgaaggagaggccgagaaagaggaagctggagcacagggacggcctttaagggcactgcagaactgctgttcagttccatctccacttcctcctgaggacgccgggaccggaggtctgcgtcaacaggaggaggaagcagtggagttgcagcctcccccccccgcccctcttagcccaccccccccagcgcccaccgcccctcagcccccaggggatccgctgatgtcacgacttttttacggtgtgaaggcaggccctggcgttggcgccccacggagatcggggcacacttttacagtgaaccctaggaggtcggtaccccccgccacacccgccaccccaacctctccagctactgtggatgcagcagtgccaggtgccggaaagaagcggtacccaaccgctgaggaaatccttgtgctcggaggatatcttcgcctctctcggtcctgcctggccaaaggaagccctgaacgccatcataagcagctgaaaatcagtttctctgagactgccctagagactacataccagtacccatcagagtcaagcgttctggaggagctcggtcctgagcctgaggtcccaagtgcacccaatcctcccgccgcccagccagacgacgaggaagacgaggaggagctgctactccttcaacctgagctccagggaggcctccggacaaaggctctcattgtggatgaaagctgccgacggtag

SEQ ID NO: 49874 - DNA, 1842 bp, Artificial Sequence
  derived and/or modified sequence
atggcaaccatccccgattggaaattgcagctccttgcacgccgtcgccaggaggaagcctccgtcagggggagggagaaggccgagcgcgagcgcctttcccagatgcccgcatggaaaagggggttgctggaaagacgacgggctaagttgggtctaagtcccggggagccctcccctgtgcttggcacagtggaagcagggccaccagatccggacgaatccgctgtgttgctcgaagccattggccccgtacaccagaaccgcttcattagacaggaaaggcagcagcagcagcagcaacagcagagatcagaggagcttttagctgagcggaagcctgggccactggaggccagagaaaggcgaccgtcccctggagagatgagagatcagtccccaaagggaagagagagcagagaggaacggcttagccctagagagacaagggagcggcgcctaggcatcggcggtgctcaggaactttccttacgtcccctggaggcacgggactggaggcagtcacccggcgaggtaggggatagatcctcgcggctttcggaagcctggaaatggaggctctcacccggcgagacaccagaacggagcctgagactggcggaaagtcgagagcagtcccctagaagaaaggaagtagagtcacgactgagtcccggcgagtccgcgtaccagaagctgggcctgactgaggctcacaagtggaggcccgatagcagggagtctcaggaacaaagcttagttcaactcgaagccaccgaatggcgactgcgctccggcgaagagcggcaggactattcagaagagtgcggtcgcaaggaggaatggccagtccccggggtggccccaaaggaaaccgctgagctgagcgagaccctgaccagggaggctcaagggaatagttcagctggcgtggaagctgcagagcagagaccagtagaggacggcgaaaggggcatgaaaccaacagaagggtggaaatggacacttaattctggtaaagcacgagaatggactccccgagatattgaagctcagacgcagaagccagaacctcctgaatccgccgagaaacttctagaatcaccaggagtcgaagccggcgaaggagaagcggaaaaagaagaagcgggagctcaggggagacctctcagggccctacaaaattgctgttcagtccctagcccactccctcctgaggacgccggaacgggtgggctgcgccaacaggaggaggaagccgtggagcttcagcctcctcctcctgcccccctctccccaccaccccccgcacccaccgccccacaacccccgggagaccccctgatgagccggctattttatggagtgaaggcggggcctggagtcggcgcacccaggcggagcggccacactttcacagttaatccgcgcaggagtgtcccaccagccaccccagccacgccaacgagtcccgcaaccgtcgatgcagccgtgcctggcgctggcaaaaagcgatatccgaccgcagaagaaatactggtattgggcggctatctgcgactgtcccgctcatgtctggccaaggggagcccggagagacaccataagcagctgaagatttcattttccgaaacggccttagaaactacttaccagtaccctagcgaaagttccgtattggaggagcttggccctgaaccagaggtgcctagcgcgcccaacccacccgctgcccagcctgacgacgaggaggatgaggaagaactgctccttctgcagcccgagctgcagggcggccttcgcacaaaggctcttatcgtggacgagagctgtcgacggtag

SEQ ID NO: 49875 - DNA, 1842 bp, Artificial Sequence
  derived and/or modified sequence
atggccaccatcccggattggaagctccagttgttagctcggaggagacaggaagaggcttctgtccgcggaagggagaaagccgagagagagcgcctttcccagatgcccgcttggaaacggggtcttctggagagacgtagggcaaagttaggtctctcacctggagagccctctcctgtactaggtacggtggaggccgggccccctgaccccgacgagtctgccgtgcttcttgaggcaatcgggccagttcatcagaaccgctttattaggcaggagagacaacaacagcagcaacagcaacagcgatcagaagaactactcgccgagcggaaacccggaccactcgaggccagagagagaagaccgagccctggcgaaatgagggaccaatccccgaaaggacgggagagccgcgaagaaaggctctccccaagagaaactcgtgaacggagacttggaattggaggagcgcaggaattgtccttgcggcctctagaggcccgagattggcgacagtctccgggtgaagtgggcgacaggtccagcagactaagtgaggcctggaagtggaggctgtccccaggcgagacccccgaacgctcacttcgtctcgctgaatctagagagcagtccccgcggaggaaagaagtggagagccggctgtcccccggggagtcagcttaccagaagttaggccttaccgaggcccacaagtggagacctgactcacgggaatcacaagagcagagcctggtacaactggaggccaccgagtggcggcttcggagcggggaggaacgccaggattactcagaggaatgtggtcggaaggaggaatggcccgtgcccggggtggcaccgaaggaaaccgccgaattatctgaaactctaacaagggaggctcaagggaactcttccgccggtgtcgaagctgcagaacagaggcctgtcgaggatggagaacggggaatgaagcctacagaagggtggaagtggaccttgaatagtggaaaggctcgggaatggacccctagagatattgaagcgcagacccagaagcctgagcctccagagtccgctgagaagctactcgaatccccaggggtcgaggccggcgagggcgaggctgagaaggaagaggcaggcgcacagggacgtccactgcgggcccttcaaaattgctgcagcgtgcctagtccactgccccccgaagacgccggaactggcgggctgagacaacaggaggaggaagccgtagaactacagcccccaccgcccgcccctcttagtccacctccacccgcccccacagcccctcagccaccgggggacccccttatgtctagacttttctatggagtaaaggcggggcccggcgtcggggcaccacggagatccggacataccttcactgtcaaccctcgtcggagcgtgcccccggccacccccgcaacccctacttctccggccactgttgacgcagcggtgcccggggctggaaaaaagaggtacccaaccgccgaggagatcttggttcttggcggatacctgcggctgtccagatcgtgcctggcaaagggtagccccgagaggcatcacaaacaattaaaaataagcttcagtgaaaccgcactggagacgacataccaatatccttccgagagcagcgtcctcgaggaattggggcctgagcctgaggtcccatccgcgccaaaccctccagccgcccagcccgacgacgaagaggacgaggaagagcttctcctcctgcagccggaattacagggtgggcttaggactaaggcacttatcgtggatgagagctgtcgacggtag

SEQ ID NO: 49876 - DNA, 1842 bp, Artificial Sequence
  derived and/or modified sequence
atggccacaatccccgactggaaattgcagctgttggcccggagacggcaggaggaggctagcgtccgtggcagagagaaggcagaaagggagaggctgtctcaaatgcctgcgtggaagcgcggcctgctggaacggcgaagggcgaagttggggttatcacccggagagcccagccctgttcttggcacggtggaagcaggaccaccagatcccgacgagagtgccgtactcctagaggcaataggtcccgtgcatcagaatagatttataaggcaggaacgccagcaacagcagcagcagcagcaacgttctgaagagctgctggccgagcgcaagcctggacctctcgaggcccgtgagcgtagaccatccccaggagaaatgcgcgaccaatcaccgaagggcagggaatcacgcgaggagcggcttagcccgcgcgaaacacgcgagagacggctgggcattggaggtgcccaggagctttctctccgcccactcgaggcaagggattggaggcagtcacccggggaggtgggtgaccggtcgagtcgcctctctgaggcttggaagtggcgcctttcccctggcgaaacaccagagcggtcactccggttggcagagtcacgtgagcaatccccacgccggaaggaggtggaatcacggctgagtccaggggagtctgcatatcagaagctcggactgaccgaggcccataaatggcgacccgattcccgcgagagtcaggaacagtctctagttcagcttgaggcgacggaatggcgtttgagatctggggaggaacggcaagactattccgaggagtgcggacgaaaggaggagtggccggtgccgggcgtggcaccaaaagagaccgcagagctgtctgagacactcaccagagaggcccaggggaacagcagcgccggcgtggaggccgcagaacagaggcctgtggaggacggagaaagaggcatgaaaccaacggagggatggaagtggaccctcaattccggaaaggcacgcgagtggaccccccgggatattgaggcacagactcagaagcctgagccacctgagtctgccgaaaagctgttggagtcccccggcgtcgaggccggggagggcgaagccgaaaaagaggaagccggggcacaggggcgtcctctaagggcgctgcaaaactgctgctccgtgccaagccccctgccgccagaagacgcagggaccgggggcctgcgacagcaggaagaggaagctgtggagctgcagccacctcccccagccccgctgagccccccccctcctgctcccaccgctccgcagcctcctggcgaccctctcatgtcgagacttttttatggggtgaaagccggcccaggagtaggcgctccacgccggagcgggcacaccttcaccgttaatcctcggcggagcgtacctcccgccaccccagcaacacccacaagtcctgcgaccgtcgacgccgctgtgcccggtgcgggaaaaaaaaggtaccctaccgccgaagagatcctggttcttggggggtatctgcgtctgtcacggtcctgtctggccaaaggctcccctgagagacaccataagcagctgaaaatcagcttctccgagaccgccttagaaaccacttatcagtatccatcggagagctctgtactagaggagctgggtccagagccagaggtgcccagcgctcccaacccgcccgcagctcagcctgatgacgaggaggacgaggaggagctgctcctgctccagcctgaactccagggcggattacggactaaagctctgatcgtggatgaatcatgtagaaggtag

SEQ ID NO: 49877 - DNA, 1842 bp, Artificial Sequence
  derived and/or modified sequence
atggcaaccatccccgactggaagctgcaactgctggccagacgtaggcaggaagaggcaagtgtcagaggacgggagaaagccgaaagggagaggttgtctcaaatgcctgcttggaaacgggggctgctagaacggagacgcgcgaagctgggactaagtcccggcgagccatctccagtgctgggtacggtcgaagcaggacctcccgatcccgacgagtctgcggtgctgttggaggctattggacctgtccatcagaatcgttttatcaggcaagagaggcagcagcagcagcaacagcaacagcggtcagaggagctccttgctgagagaaaacccgggccccttgaagctcgcgagcgcagaccctctccaggtgaaatgagagatcagtcacctaaaggcagggagtccagagaagaaagattgagcccgcgggaaactagggagcgtcggctgggaatcggtggtgcgcaggagctgtcactccggcctctcgaggcccgcgactggcggcagagccctggcgaagttggggatagatcttcgagattgagtgaagcctggaaatggagactgtcgccgggagaaactcctgagagatccctccggttggctgagtcccgggaacagtcaccaaggagaaaagaggttgaaagtcgactaagcccaggggaaagtgcctaccagaaactcggtctcaccgaggcacataagtggaggccagattcacgagagtcacaagaacagtcgcttgtgcaactggaggctacagaatggaggttacgatccggagaagaacgacaggactactccgaggaatgcggcagaaaggaagagtggccggtccctggtgtggcccccaaggaaactgcagaactatcagaaacgctcactcgcgaggcccaggggaattcctccgccggggttgaagccgctgagcagcgcccagtagaggacggggaacggggaatgaaaccaacagagggatggaagtggacgctgaactctggtaaggctagagagtggacacctcgggacatcgaggcacaaacgcagaaaccggaacctcccgaatccgccgagaagctgttagaatcacctggggttgaggccggagagggggaggccgaaaaagaggaagctggtgctcagggtcgaccgctgagggcgctacaaaattgctgttcagtgccatctcccttgccccctgaggacgccgggactgggggattgagacaacaggaagaagaggccgttgagctacaacctcctccacccgcgccactctcaccaccacccccagctccaacggccccccagcctccaggggaccctctcatgtctcgactgttctatggcgtgaaagcaggacctggagtcggagcaccacgaagaagtgggcacaccttcactgtaaatcctaggcgtagcgtgccccccgctacgcccgcgacacccacctccccagctactgtggacgcagcagttcctggtgccggcaagaaaaggtatccaactgccgaagagatactcgtcctcggaggttacttgagactgtcacggagctgcctggctaagggcagccctgagcggcatcataagcaactgaagatctcattttcagagacagcgctggaaactacatatcagtacccctcagagtcgagcgtcctggaggaactcggcccggagccagaagtgcctagtgctccgaacccccccgccgctcagcccgatgacgaagaggatgaagaggagctgcttcttctccagcctgaactgcagggcggtcttagaaccaaggctttaatcgtggatgagagctgtcgccggtag

SEQ ID NO: 49878 - DNA, 1842 bp, Artificial Sequence
  derived and/or modified sequence
atggccaccattccagactggaagctgcagttgcttgcacgaagacggcaggaggaagcctcggttcggggaagggagaaggccgagcgagagcgcttgtcccagatgccagcatggaagagagggttgttagagcggcggcgggcaaaactcggactctctccaggcgagccttcaccggtgcttgggacggtggaagctggacctcctgatccagacgaatccgcagtcctcctggaggccatcggacctgtgcaccagaataggttcattaggcaggagcggcagcagcaacaacagcaacaacagcggagcgaggaactcctcgccgagagaaaacccgggcccctggaggccagggaaagacggccatcccccggtgaaatgcgcgaccaatcacccaaaggacgagagagtagagaggaacgcctgagcccgagagaaaccagggagcggcggctcggaatcggcggtgctcaagagctatcactgcgccccttggaggcccgagactggcgacaatcgcctggcgaggtgggtgacaggtcctcccgcttatctgaagcctggaaatggcgactgtcacctggcgagacccctgagaggtctctgcgcctggctgaatcccgggaacagagtcctaggcgtaaagaggtggaatcccgtctgtcccccggggagtccgcctatcagaagttaggtctgacagaggctcacaaatggaggccagactcccgagagtcccaggagcagagccttgttcaactagaagctaccgagtggcgtctgcgcagtggtgaagagcggcaagattactccgaagaatgcgggaggaaggaggaatggcctgtcccgggggtggcacccaaggagactgccgaactgtccgaaaccttgacccgcgaggcgcaagggaattcttctgctggagttgaggccgcagaacagagacctgtggaggatggtgagaggggtatgaagccgactgaagggtggaaatggaccctgaattcaggcaaagctagagaatggacacccagggatatcgaggcccagactcagaaaccggaacctcctgagagtgccgagaagctcctcgaatcaccaggggtcgaagctggcgaaggcgaggctgaaaaggaggaagccggtgctcagggcaggcccctcagggccctgcagaattgctgttcggtcccgagccctttaccccctgaagacgctggcactggaggcttacggcagcaggaagaggaggctgtcgaactgcaacccccaccccctgcgcctctctcaccgccacccccagctcccaccgctccccagccccccggagatcccttgatgagcaggctgttttatggcgttaaagccgggcctggtgtcggcgcccctcgtcgttcgggacacactttcacagtaaaccctaggagaagtgttcctcctgctacccccgcgactcccaccagtccagctacggtggacgctgccgttcctggcgcgggcaagaaacgctacccaacagccgaggagattctcgttctgggcggatatcttagactctctagatcttgtctcgctaaaggcagccctgagaggcatcataagcagctcaagatctccttcagcgagacagcgctcgaaacaacctatcagtatccttctgagtccagtgtcctagaagaactggggcccgaacctgaggtaccatccgcccctaatcctcccgcagcacagccagatgacgaggaggatgaagaggaactgctcctgctccaacctgaattgcagggcggcctccgcaccaaggccctgatagttgacgagagctgccgtcgctag

SEQ ID NO: 49879 - DNA, 1842 bp, Artificial Sequence
  derived and/or modified sequence
atggccactataccggactggaagctgcagttactcgctcggcgccggcaagaagaagcatctgttagaggcagggagaaggcagaaagagagaggttgtcccagatgcctgcttggaaacgcggcctgctcgaacgccgacgggccaagctcgggttatccccgggggaacccagtcccgtgctgggaactgtggaggctggacctcccgacccggacgagtctgccgtgctattggaggcgattgggccggtgcaccaaaaccgctttattcggcaggaaagacaacagcaacaacagcagcagcaacgctccgaggaactcctggcggagcggaaacctgggcctctggaggcacgagagcgaaggcccagccccggagaaatgcgagatcagtcacctaaaggaagggagagccgagaggaaaggctgtctccccgagagactcgggagagaagattagggattgggggcgctcaggagcttagtctgcggcctctagaggcacgagattggaggcagagccccggcgaagttggagatcggagtagccggctttcagaggcgtggaaatggaggctatctccaggtgaaactcctgaaagaagcctgcgcctggcagaaagcagggagcaatctcccaggcgcaaggaggtggagagtagactaagtcctggtgagtcggcctatcagaaacttgggctcaccgaggcacacaagtggagaccagacagtagggaatcccaggagcagtcccttgttcaactagaggccacagagtggagattgcgtagcggcgaagagaggcaggattattctgaggagtgcggcaggaaggaggagtggcctgtgccgggagtggcacccaaagagactgcggagctctccgaaacactaactcgtgaagcccagggcaactcgtccgctggtgtggaagccgccgaacagcgacccgtggaggacggggaaagggggatgaaaccgactgagggctggaagtggacactgaactccggaaaggctcgcgagtggacacccagagacattgaagctcagactcagaagcctgagcccccggaaagtgccgagaaattgttggagagtccaggagtggaagcgggcgagggcgaagctgagaaggaagaagcaggcgcccagggtaggcccttgcgtgccctgcaaaattgttgctctgtcccttctccactgccacccgaggacgccggaacaggaggccttcgtcagcaggaagaggaagctgtcgaactacaaccaccccccccagcccctctgtcgcccccaccgcctgcaccaactgccccccagcctcctggagacccattgatgtccagacttttctatggggtgaaagcaggtcccggggtcggagctccccggcggagcggccataccttcaccgtgaaccctagaaggagtgtgcctcccgctacccccgccaccccaaccagtccagctactgttgatgctgccgtgccaggcgctggcaaaaaacgataccctactgcagaagaaatcctagtccttggggggtacctgcggttgtccaggtcatgcctggccaaaggatctcctgagagacaccataagcaacttaagatcagcttttcggagaccgctctcgaaacaacataccagtacccttctgagtcatcagtgctggaagagttgggaccggaacccgaagtgccgagcgcgccgaacccgcccgctgctcagcccgatgatgaggaggatgaggaggagttgctgctattgcagccggaactgcagggcggtctgcggactaaagctctgatagttgatgaatcttgtaggcggtag

SEQ ID NO: 49880 - DNA, 1134 bp, Artificial Sequence
  derived and/or modified sequence
atggccactatccccgactggaagctgcagctactagccagacgacgccaggaggaagcttcagttcgagggcgagagaaggccgaaagggaaagattgagccagatgcccgcctggaaaagagggctgctggagcgccgaagagccaagttgggcctctctccgggcgagcctagcccagtgctaggaacggtagaggcgggcccccccgatcccgacgaatctgccgtgctgctggaggcaatcggccccgtgcatcaaaatagattcatccggcaggagcgccaacagcagcaacaacagcagcagcggtcagaagaactactggcggagaggaagcctggacctttggaagctagagaaagacgcccctccccaggagaaatgagggatcagagccccaaggggagagaaagtcgggaggagagattatcaccaagagaaactcgcgaacgaaggctggggattggaggggcccaggaactgtcattgcgccctctggaggccagggactggaggcagtcacccggcgaggtgggtgatcgctcttctagactgagcgaggcatggaagtggcggctgtcacccggggagacgccagaacgttccttgagactcgctgaatcgcgggaacagtctccacggcggaaggaggttgagagtcgcctctctcctggagagagcgcttaccaaaaacttggtttgactgaggctcacaaatggcgtcctgactcccgagagagccaagagcagagcctagtgcaactggaggcaaccgagtggcgattgcggtccggggaggaacgtcaggattacagcgaagaatgtggccggaaggaggagtggcctgttccgggggttgccccaaaagagacggctgagctaagcgagaccctcacccgggaagctcagggaaattcctctgccggcgtagaagcagccgaacagagacccgttgaagacggggaacgagggatgaaacccacagaaggctggaagtggactctgattatgtccctagctggcaagggaaatcagcacttagtgacgtgctttccccatcctgtgagtggcggtcgagcaaattgccccattagtaccctgatccaatcaccttggtgtgggtgggggtag

SEQ ID NO: 49881 - DNA, 1134 bp, Artificial Sequence
  derived and/or modified sequence
atggcgacaatacccgactggaaattgcagctcttagcgcgacgacggcaggaggaggctagcgtaaggggacgcgagaaagccgagagggagagactcagccagatgcccgcctggaagcggggactgttagaacggagacgagctaaacttggtttaagccccggcgaaccatccccggtcctgggtactgtcgaggctggcccgccagaccctgatgagagcgccgttctcctcgaagctattggacccgtacaccagaataggtttatcagacaggagcgccaacaacaacagcagcagcagcagcgttcagaggaacttctggccgagaggaaacccggtccactcgaggctagagaaagacggcctagccctggagagatgagagaccagagtccaaaaggaagggaaagtcgcgaggagaggttgtctcctagagaaactcgggaaaggcggctgggaatcggcggcgctcaggaactgagccttcgccccctggaagctagggattggcggcagagcccaggggaggtgggagatcggagcagcagattgagcgaggcctggaaatggcgcctatctccaggcgagacccctgagagaagcctacgcctcgccgagtcacgggagcaatctcctaggcgaaaagaggtggagagtcgattgagtccaggcgaaagtgcctatcagaagctaggattaaccgaggcacataaatggagaccagacagccgtgaatcccaggaacagtcactcgttcagcttgaagccaccgagtggcggcttcgatccggcgaggaaaggcaggattactctgaggaatgtggccgcaaggaggagtggccggtccccggagttgcacctaaagagactgctgagctgagcgagaccttgacccgtgaggcacagggcaacagcagcgcaggcgtagaggcagcagaacagcgtcctgtcgaggatggagaacggggtatgaaaccgaccgaaggctggaagtggacactgattatgtccctggcagggaaaggcaaccagcatctggttacttgcttcccccacccagtgtcaggtgggcgggctaattgtcctattagtacactgatccagtccccttggtgcggctggggatag

SEQ ID NO: 49882 - DNA, 1134 bp, Artificial Sequence
  derived and/or modified sequence
atggcaacgattcctgactggaagctgcaacttctggcccgcagacgacaggaggaggcttcggttcgcgggagagaaaaagcagagcgagaaaggctgtctcagatgcctgcatggaaacgcggacttttggagagacgccgcgccaagctcgggcttagtcccggcgagccttccccggtgttgggtaccgtggaggctgggccgccagaccctgacgaatcagccgtgctgctggaagccatcggccccgtacaccaaaatcgctttatccggcaggagagacagcagcagcagcagcaacaacagagaagtgaagaacttctggccgagcgaaagccaggtccgctggaagcacgcgaaagaagacccagtccgggtgagatgcgggaccagtcccccaaaggaagagaatcaagagaggaaaggctttcacctagagaaaccagggaaaggcgtctgggaattggaggcgctcaagagttgtctctgaggccgttggaggctcgcgactggcggcagtcaccgggcgaagtcggggatagatctagtcgactgagcgaagcctggaaatggcgcctgagtccaggggagacacccgaacgatctctgcgacttgccgagtctcgcgagcagtccccaagacggaaggaagtcgagagtcgtctgtcaccaggcgagtcagcatatcagaaacttggcttaactgaggctcataagtggaggcctgactctcgcgaaagccaggagcagagtttggtccagctggaagccaccgagtggagactgagaagtggggaggagcgccaagactatagcgaggaatgtggacgaaaagaagagtggccagtccctggggtggccccaaaggagaccgccgaactgtctgaaaccttaacccgagaggcacagggcaattcttctgcaggggtggaggccgctgaacagcgaccagttgaggacggagaaagggggatgaaacccaccgaaggctggaagtggactttaattatgtctctcgcaggcaaggggaaccagcatctggttacgtgcttcccccaccccgtttccggtgggcgcgctaattgtcctattagtactttaatccagagcccatggtgcgggtggggctag

SEQ ID NO: 49883 - DNA, 1134 bp, Artificial Sequence
  derived and/or modified sequence
atggccacaattccggattggaagctgcagctgctggccagaaggagacaagaggaggcctcagtccgcggccgcgagaaggccgagcgagagaggctttcgcagatgcccgcttggaaaagggggctccttgaacgaagacgtgcaaagctcggcctgagtcccggcgagccttcgccggtacttggcaccgtggaagccggtcctcctgacccggatgaaagtgccgtgctgctggaagcaattgggcccgtgcaccaaaatcggttcatccgccaagagagacagcagcagcagcagcagcaacagagatccgaagagctattggcagaaaggaaacccggtccactcgaagcaagagagaggcgaccaagccctggagagatgagagatcagtcgccgaaaggaagggagagcagagaagagagactgtctccaagagagaccagagaacggcggctgggcataggcggtgcccaggaactgagcttacggccactcgaagcccgcgattggcgacagtcccctggagaggtcggcgatcgaagcagccggctgtccgaggcttggaagtggcgcctcagtccaggcgaaacccctgaacgcagcctgcgattagctgagtctcgggaacagagcccacgccggaaggaggtggagagcaggctgagccccggagagtctgcatatcagaagctgggcctgactgaagctcataaatggcgacccgactcgagggaaagtcaggagcagagtttagtacagttagaggccaccgaatggcgccttcggtctggagaagaacggcaggattactccgaagagtgtggacggaaggaggaatggcccgtgcctggagtggcgccaaaagagactgcggagttgagcgaaacactcacacgggaagcccaggggaatagcagcgcaggcgtggaagcagcagagcagagaccggtggaggatggtgagcgtggaatgaagccaacggagggttggaagtggactctgataatgtccctggctggtaaggggaatcagcatttggtgacgtgcttccctcaccccgtttcaggaggcagagccaattgccccatcagcaccttgatccagtcaccatggtgcggctggggttag

SEQ ID NO: 49884 - DNA, 1842 bp, Artificial Sequence
  derived and/or modified sequence
atggccaccatcccagactggaagctgcagctgctggcccggcggcggcaggaggaggcctctgtgcggggccgggagaaggccgagcgggagcggctgagccagatgcctgcctggaagaggggcctgctggagaggagaagagccaagctgggcctgagccctggagagcccagccctgtgctgggcaccgtggaggccggccccccagaccctgatgaatctgctgtgctgctggaggccatcggccctgtgcaccagaaccgcttcatccggcaggagcggcagcagcagcagcagcagcagcagaggtctgaggagctgctggccgagaggaagccaggccccctggaggcccgggagcggcggcccagccctggagagatgagggaccagagccccaagggccgggagagccgggaggagcggctgagcccccgggagacccgggagcggcggctgggcatcggcggggcccaggagctgagcctgcggcccctggaggcccgggactggaggcagagccctggagaggtgggggacaggagcagccggctgtctgaggcctggaagtggaggctgagccctggagagaccccagagaggagcctgcggctggccgagagccgggagcagagccccaggaggaaggaggtggagagccggctgagccctggagagagcgcctaccagaagctgggcctgacagaggcccacaagtggaggccagacagccgggagagccaggagcagagcctggtgcagctggaggccacagagtggaggctgcggtctggagaggagcggcaggactacagtgaagaatgtggcaggaaggaggagtggcctgtgcctggggtggcccccaaggagacagctgagctgtctgagaccctgacccgggaggcccagggcaacagcagcgctggggtggaggccgctgagcagaggcctgtggaggatggagagcggggcatgaagcccacagagggctggaagtggaccctgaacagcggcaaggcccgggagtggaccccccgggacatcgaggcccagacccagaagccagagcccccagagagcgctgagaagctgctggagagccctggggtggaggccggggagggggaggccgagaaggaggaggccggggcccagggccggcccctgcgggccctgcagaactgctgcagcgtgcccagccccctgcccccagaagatgctggcaccggcggcctgcggcagcaggaggaggaggccgtggagctgcagcccccacctccagcccccctgagccccccacctccagcccccacagccccccagcccccaggggaccccctgatgagccgcctcttctacggcgtgaaggccggccctggggtgggcgccccccggcgcagcggccacaccttcaccgtgaaccccaggagatctgtgcccccagccaccccagccacccccaccagccctgccaccgtggatgctgctgtgcctggagctgggaagaagcgctaccccacagctgaggagatcctggtgctgggcggctacctgcggctgagccgcagctgcctggccaagggcagccctgagcggcaccacaagcagctgaagatctccttcagcgagacagccctggagaccacctaccagtaccccagcgagagctctgtgctggaggagctgggccctgagcctgaggtgcccagcgcccccaaccccccagctgcccagccagatgatgaggaggatgaggaggagctgctgctgctgcagcctgagctgcagggcggcctgcggaccaaggccctgattgtggatgagagctgcagaagatag

SEQ ID NO: 49885 - DNA, 1134 bp, Artificial Sequence
  derived and/or modified sequence
atggccaccatcccagactggaagctacagctgctagcccggcgccggcaggaggaggcgtccgttcgaggccgagagaaagcagaacgggagcgcctgtcccagatgccagcctggaaacgagggctcctggagcgccgccgggccaagcttgggctgtcccctggggagcctagccctgtgctagggactgtagaggctggacctccagacccggatgagtctgcggtccttctggaggccatcgggccagtgcaccagaaccgattcatccggcaggagcggcagcagcagcagcagcaacaacaacggagtgaagagctgctagcagagagaaagcctgggcctctggaggcccgggagcggagacccagccctggggagatgcgggatcagagccccaagggaagagagtcaagagaagagagactaagtccgagggagaccagagagaggaggctggggatagggggagcccaagagttgagcctgaggcctctggaggctcgggactggaggcaaagcccaggagaggtgggagacaggagctcccgactgtcagaggcatggaaatggaggctgagtcctggagaaactccagagcggagtctgagactagcagagtctcgagagcaaagccccaggagaaaagaggtggaaagtagactgagcccaggggaatctgcctaccagaagttgggcctgacagaggcccataaatggagacctgactccagagagtctcaggaacagagtttggtacaactggaggcaacagagtggaggctgaggtcaggagaagaaagacaagactactcggaagaatgtgggagaaaagaagagtggccagttccaggggtagctccaaaagagactgcagagctgtccgagaccctgacaagggaggcccaaggcaacagttccgcaggagtggaggcagcagagcagaggcctgtggaagatggcgagaggggcatgaagccaacagaagggtggaaatggaccctgataatgagcctggcagggaagggcaaccaacatcttgtaacttgctttccccaccctgtttctgggggcagagccaattgcccaatttctaccctaatccaaagtccctggtgtgggtggggttaa

SEQ ID NO: 49886 - DNA, 1134 bp, Artificial Sequence
  derived and/or modified sequence
atggccaccatcccagactggaagctgcagctgctggcccggcggcggcaggaggaggcctctgtgcggggccgggagaaggccgagcgggagcggctgagccagatgcctgcctggaagaggggcctgctggagaggagaagagccaagctgggcctgagccctggagagcccagccctgtgctgggcaccgtggaggccggccccccagaccctgatgaatctgctgtgctgctggaggccatcggccctgtgcaccagaaccgcttcatccggcaggagcggcagcagcagcagcagcagcagcagaggtctgaggagctgctggccgagaggaagccaggccccctggaggcccgggagcggcggcccagccctggagagatgagggaccagagccccaagggccgggagagccgggaggagcggctgagcccccgggagacccgggagcggcggctgggcatcggcggggcccaggagctgagcctgcggcccctggaggcccgggactggaggcagagccctggagaggtgggggacaggagcagccggctgtctgaggcctggaagtggaggctgagccctggagagaccccagagaggagcctgcggctggccgagagccgggagcagagccccaggaggaaggaggtggagagccggctgagccctggagagagcgcctaccagaagctgggcctgacagaggcccacaagtggaggccagacagccgggagagccaggagcagagcctggtgcagctggaggccacagagtggaggctgcggtctggagaggagcggcaggactacagtgaagaatgtggcaggaaggaggagtggcctgtgcctggggtggcccccaaggagacagctgagctgtctgagaccctgacccgggaggcccagggcaacagcagcgctggggtggaggccgctgagcagaggcctgtggaggatggagagcggggcatgaagcccacagagggctggaagtggaccctcatcatgagcctggccgggaaaggaaaccagcacctggtgacctgcttcccccaccctgtgtctgggggccgggccaactgccccatcagcaccctcatccagagcccctggtgtggctggggctag

SEQ ID NO: 49887 - DNA, 1842 bp, Artificial Sequence
  derived and/or modified sequence
atggccaccatccccgactggaagctgcagctgctggcccggcggaggcaggaggaagcatccgtgcgggggcgagaaaaggccgagcgagaacgcctaagccaaatgcccgcttggaaacgggggctcctcgaacgccgaagagcaaaactgggcctgagccccggggagccctcccctgtgcttgggacagtggaggcaggtccccctgatccagatgaaagcgctgtgttgctggaagcaattgggcctgttcaccagaacagatttatcagacaggagagacagcaacaacagcagcagcaacagcgctcagaggagttattggctgaacggaagccgggaccgctggaggctagggaaagaaggccttcgcccggcgagatgcgggatcagtcccccaaaggccgcgagtcaagagaggagcgattatctccgagggaaactcgcgagaggcgcttgggtattggtggtgcacaggagctgagtttacgcccacttgaagctcgcgactggaggcagtcacccggcgaagtgggagacaggagcagcagactttcagaagcgtggaagtggaggctcagccccggagaaactcccgaaaggagccttcgtctggcggaatcacgagaacagagcccgaggaggaaggaggtagaaagccgcctcagtccgggagaaagtgcctatcagaagctgggacttactgaggcgcacaaatggcgtcccgactcccgtgagagccaggagcagtcactggttcagttagaagctaccgagtggcggttgcgatcaggcgaagagaggcaggactattccgaagagtgtggtaggaaggaggaatggccggtaccaggggtggctccaaaggaaacagctgaactcagtgaaacccttaccagagaagcacagggaaattcttcagctggcgtagaggcggccgaacagagacctgtggaagacggagagcgggggatgaagcctactgagggttggaagtggacgctaaactctggcaaggcccgagagtggacaccgagggacatagaggcccagacacaaaagcccgagccccctgagtcagcagagaagctattggaatctcccggggttgaggcgggcgagggtgaggcagaaaaggaagaggctggggcccagggccgcccactgagggcccttcagaattgctgtagcgttccaagtccattgccccccgaggacgctggaacgggggggctcagacagcaggaagaagaagcggtggagctccagcccccgccaccagcgcccttaagcccacccccgcctgctcctaccgcccctcagcctcccggcgatccccttatgtcacggctgttttacggcgttaaagccggccctggtgttggggccccaaggcgtagtggacataccttcactgtgaacccacgacgatctgtgccgcccgcgacaccggcaacccccactagccctgccaccgtggatgcagcagtgcctggggccggtaagaaacgataccccactgctgaggaaatcctggtactgggcgggtacttgagattgagtagatcctgcctcgccaagggctccccggagcggcaccacaagcagctgaaaatctccttctccgagacggcgttagagacaacttatcagtacccgtctgagtcgagcgttctggaagaactgggcccagagccagaggtacccagcgctccaaacccacccgccgcacaaccagatgatgaagaggacgaagaggaattactgctgctgcaacccgaattacagggcggactgagaactaaggctctcatcgtagatgaatcttgcagacgttag

SEQ ID NO: 49888 - DNA, 1134 bp, Artificial Sequence
  derived and/or modified sequence
atggccaccatccccgactggaagctgcagctgctggcccggcggcgccaggaagaagcgtctgtacgggggcgcgagaaggccgaaagagagcgtctcagtcagatgcccgcgtggaaaagaggactgctcgaaagaagacgggccaagctgggcctgtccccaggcgagccaagtcccgtgttgggtactgtggaagcaggtcctcctgatcccgatgaatctgccgtcttgctggaggccattggcccagtgcatcagaatcgattcattagacaagagagacagcaacagcagcagcagcagcagaggagtgaagaactcctggcagaacgcaagcccggtcccctggaggccagggaacgcagaccctcaccaggggaaatgcgtgaccagagccctaaaggcagggagagtagagaggagcgcctgagtcccagagagacaagagagaggcgcttgggcataggaggcgcacaggaattgagtctgcgcccactggaggcacgcgattggaggcagagtccgggggaagtcggggatcggtcatctaggcttagcgaagcttggaagtggagactgtcgcccggggaaacgccggaacgatccctccgcttagccgagagtcgggagcagtcacctcggcgcaaggaggttgagtctcgattgtcccctggcgagtctgcttatcagaaactaggtctgaccgaggcgcacaaatggagacccgacagtagagaaagccaggaacagtctttagtgcagttagaagctaccgaatggcgcctgcggtctggcgaagagcgccaggattacagcgaagaatgcggtaggaaagaagagtggcctgtgcccggcgtggcacccaaagagaccgcggagctgagcgagacactgacaagagaagctcagggaaacagttctgccggagtggaagcagctgagcaaaggcctgtggaggacggtgagcggggcatgaagccaactgaaggatggaagtggacgctgatcatgagcctggccggaaaaggcaaccagcacctggtcacgtgcttcccccatcccgtgagtggtgggcgagctaattgtccgatttctactctgatccagagcccctggtgtggttggggatag

SEQ ID NO: 49889 - DNA, 1842 bp, Artificial Sequence
  derived and/or modified sequence
atggccaccatccccgactggaagctgcagctgctggcccggcggcgccaggaagaggccagcgtgcgcggcagagaaaaagcggaacgggagcggctgtcccagatgccagcatggaaacgcggactcctcgagagacggagggcgaagctaggtttgagtccgggtgaaccctccccagtcctgggcaccgtggaagctggccctccggatcctgatgagtcagcggtgttattagaagccattggaccagtccatcaaaatcggtttatcaggcaagagcgccagcagcagcagcagcagcaacagcgcagtgaggaactactcgccgaaagaaaacctggcccccttgaggctagagaacgtagaccttcccccggcgagatgagggatcagagccccaagggacgggagtcccgggaagagaggctcagcccacgagagactcgcgaaaggcggttgggaatagggggtgctcaggagctgtccctgaggccacttgaggctcgggattggaggcagagtcccggtgaggtgggcgaccgatcctcccgccttagtgaggcttggaagtggagactcagccctggcgagacacctgagaggagcctgagactggccgagtcccgggaacaaagtcctaggcggaaggaggtcgaaagtagactcagccctggcgagtcagcgtaccagaaacttggcctgaccgaagcccataaatggaggcctgattctcgagagagtcaggagcagtctcttgttcaactcgaggcgactgagtggcgcttgcgcagcggagaggagcgtcaggattatagtgaagaatgtggtcggaaggaggaatggcctgttcctggcgttgctccgaaggagacagccgagttgtctgaaacgttgacccgagaagcccaggggaactcatcagccggagtggaggccgctgaacaaagaccagtggaggatggcgagcggggcatgaagccgactgagggctggaaatggacactgaattccggtaaagctcgggagtggacgccgagagacatcgaggcccaaacacagaaaccagagccaccggagagcgcagagaagctcttagagtctcctggggtagaggccggcgagggggaagccgaaaaggaagaggccggcgcccaaggcaggccactgagggccctgcaaaactgttgttcggtaccatccccattgccacccgaagatgccggaacaggaggcctccgacaacaggaagaagaggctgttgaactccagccaccccccccagcccctctctcccctccaccacccgctccaactgcaccccagccgcctggcgatcctctcatgtccaggttgttctatggtgtgaaagcgggccctggagtcggcgccccccgcaggtccggtcatacgtttactgttaacccgaggcggagtgtcccaccggctacacccgcaacgccaacatctccagcaacggtggatgctgccgtgccaggagcaggcaagaagcgctaccccaccgccgaggaaattctggttctgggtggctatctacgactgtccaggtcatgtctagccaaaggaagcccagagcggcaccataaacagctgaagatcagtttctcagagactgccctcgaaacaacctatcagtacccctccgagagcagtgtactggaagaactgggtccagagcccgaagttccatctgcccctaatcctcctgccgcccagcctgatgatgaggaagacgaagaggagcttctgcttctgcagcctgagctacagggggggctacgaacaaaggcgctcatcgttgacgagagctgtaggaggtag

SEQ ID NO: 49890 - DNA, 2853 bp, Artificial Sequence
  derived and/or modified sequence
cctccctccagtctccggatctccctcggtccctctctcctcctcttcctctctctggacgcccggctcctccgcaccccctcccccgggggtcccgcggccttgctccctaccctcacctcaagacgaccatggccaccatcccagactggaagctacagctgctagcccggcgccggcaggaggaggcgtccgttcgaggccgagagaaagcagaacgggagcgcctgtcccagatgccagcctggaaacgagggctcctggagcgccgccgggccaagcttgggctgtcccctggggagcctagccctgtgctagggactgtagaggctggacctccagacccggatgagtctgcggtccttctggaggccatcgggccagtgcaccagaaccgattcatccggcaggagcggcagcagcagcagcagcaacaacaacggagtgaagagctgctagcagagagaaagcctgggcctctggaggcccgggagcggagacccagccctggggagatgcgggatcagagccccaagggaagagagtcaagagaagagagactaagtccgagggagaccagagagaggaggctggggatagggggagcccaagagttgagcctgaggcctctggaggctcgggactggaggcaaagcccaggagaggtgggagacaggagctcccgactgtcagaggcatggaaatggaggctgagtcctggagaaactccagagcggagtctgagactagcagagtctcgagagcaaagccccaggagaaaagaggtggaaagtagactgagcccaggggaatctgcctaccagaagttgggcctgacagaggcccataaatggagacctgactccagagagtctcaggaacagagtttggtacaactggaggcaacagagtggaggctgaggtcaggagaagaaagacaagactactcggaagaatgtgggagaaaagaagagtggccagttccaggggtagctccaaaagagactgcagagctgtccgagaccctgacaagggaggcccaaggcaacagttccgcaggagtggaggcagcagagcagaggcctgtggaagatggcgagaggggcatgaagccaacagaagggtggaaatggaccctgaactccgggaaggctcgagaatggacacccagggacatagaggctcaaactcagaaaccagaacctccagagtcagcagagaagcttctggaatctcccggtgtggaggctggagaaggggaggctgagaaggaggaggcgggggctcagggcaggcctctgagagccctgcagaactgctgctctgtgccctcccccctcccaccagaggacgctgggactggaggcctgagacagcaggaagaggaagcagtggagctccagcccccaccaccagcccctctgtctcccccacccccagccccaactgccccccaacctcctggggatcccctcatgagccgcctgttctatggggtgaaggcagggccaggggtgggggccccccgccgcagtggacacaccttcaccgtcaacccccggcggtctgtgccccctgcgaccccagccaccccaacctctccagccacagttgatgctgcagtcccgggggctgggaagaagcggtacccaactgccgaggagatcttggttctggggggctacctccgtctcagccgcagctgccttgccaaggggtcccccgaaagacaccacaaacagcttaagatctccttcagcgagacagccctggagaccacgtaccaatacccctccgagagttcggtactggaggagctgggcccggagcctgaggtccccagtgcccccaaccctccagcagcccaacccgacgacgaagaggatgaggaagagctgctgctgctgcagccagagctccagggcgggctgcgcaccaaggccctgattgtggatgagtcctgccggcggtgaccatcttccaacatagggatatacctccctccttcttataactgaagatcctggagcccggaagattcagggcagacagaccctgataatgagcctggcagggaagggcaaccaacatcttgtaacttgctttccccaccctgtttctgggggcagagccaattgcccaatttctaccctaatccaaagtccctggtgtgggtggggttaaacgtgctggtgcatcctaggtcatccaagagtgagcgccaagtcctgagaaggggcacagaactccctggagggtggagatggagcacctgccccccatggcagggtacactctccccacagccttcctccccaccatcccgtggggactctcgggatttaagcactcgtctctctgggaggcccagaccccactccatttataggcacatctccttcatttcctaggtcactgcccctttgtttacagctcctgcctcctcccttgaccacagcctggtttacaaattccatcagctcccagccccacctgccaaagtcccaggtttacaagccacgcttacttgctgtgtctgcgtggaattctctcctctgtcccctccagtctcctcattggagtgacctgaaggtgtggcttcctccactttttctcagtattactttgccttagttttccccaagagggaaggctggaactcttaactctgtaccccttgatagttatttaattctgtttctcctagtggttcacaattgaactgaattgagatggtgtcgggtggctaaggagacacctcacctctccttccccattgtgccgcctttatcaattgcctgttttgttttgtttgttttttaactttccataataaaatggagttctcttcaa

SEQ ID NO: 49891 - DNA, 1842 bp, Artificial Sequence
  derived and/or modified sequence
atggccaccatccccgactggaagctgcagctgctggcccggcggagacaggaggaggcctcggtgagaggtagagagaaggccgaaagagagcggctgagccagatgccagcctggaaaagaggcttactggagcggcgcagggccaaactggggctcagccccggtgagccctcacccgtcctgggtacagttgaggctgggcctcccgatcctgacgaatctgccgtactgctggaagctattgggcctgtgcaccagaaccgattcatccgtcaagagaggcagcagcagcagcagcaacagcagcggtccgaggagctactcgctgagaggaaacctggccccctggaggctagggaaagaaggccgtcacctggggagatgcgcgaccagagccctaaaggacgggagtcacgtgaagagaggctttcaccacgcgagactcgggaaaggcggctgggaattggcggagctcaggaactgagcttacgccccctcgaggcccgtgattggcgacaatcccccggcgaggtgggagataggtctagcaggctgagtgaggcttggaaatggaggctgagtccaggcgaaacgccagaacggtccctgcgcttggcagagagccgggagcagtctccccgccggaaggaggtggaaagcagactgagtccaggagaatccgcttatcagaagctggggttgacagaggcccacaaatggaggccggacagcagggagagccaggaacagagtctggtgcagctggaagcgacagagtggaggctgcgatccggggaagaaaggcaggactacagcgaagagtgtggcagaaaggaagagtggcccgtccccggtgtggcccctaaggaaacagcggagctgagtgagacacttacgagagaggcccagggcaattctagtgccggggtggaagccgcagagcagagacctgtggaggacggcgagcgcggtatgaagcccacagaagggtggaagtggaccctgaactctggaaaggcaagagagtggacaccacgagacatcgaggctcagactcagaaacctgagccaccagagagtgccgagaagctgctggagagtcctggcgtggaagctggagaaggtgaggcggagaaggaggaggcaggtgcccagggcagaccactccgtgccctccagaattgttgttccgtaccttcccctttgccaccagaagatgctggcacaggcggtctccggcagcaggaagaagaagccgtggagttgcaacctcctccacctgcaccactgagcccaccaccgcctgctccaaccgctccacagcctccgggcgaccccctaatgtcccggcttttctacggcgtgaaagccggcccgggcgtaggagccccccgacgaagtggacatacgtttactgtgaacccgcggcgctccgtgccacctgcaacccccgccacccccacctcccctgctacggtggatgccgccgtcccaggggctggtaagaagagatacccaactgccgaagagattctggtcctgggcgggtatctccgtttaagccgatcctgcctggcgaaaggcagtccagaaaggcaccacaaacagttgaagatctctttttcggagactgccttggagactacctaccaatatccttccgagtcatccgtgctggaggagttaggtccagagcctgaagttccctccgctcccaatcctccagccgcacaacccgatgatgaggaggatgaggaggagctccttcttctgcagcctgaactgcagggtggacttcgaacgaaggccctcatcgtagatgaatcctgtcgacgctag

SEQ ID NO: 49892 - DNA, 1842 bp, Artificial Sequence
  derived and/or modified sequence
atggccaccatccccgactggaagctgcagctgctggcccggcggcgccaggaggaggcgagtgtcagagggagggagaaagccgaacgcgagaggctgtctcagatgcctgcatggaagcgcggcttgctggaaaggcgacgggccaagcttggtctgtcacccggggagccatcgcctgtactcggaacagtcgaggctgggccccctgacccggatgagtctgccgtgctgctggaagccataggcccagtccatcagaatcgctttatcagacaggagaggcagcaacagcagcaacagcagcagcggtctgaagagcttctggcagaacggaaacctggtccactagaagcccgtgagcgaagaccaagccctggcgagatgcgcgatcagtcacctaaggggagggaatctagagaggagcggttgagtccaagggagacccgggagcgtaggttgggaatcggaggagcgcaggagctgtcgctaagaccactcgaggctagagactggaggcagtctcccggggaggtaggtgatcggtcgagccggctcagcgaggcctggaagtggagactaagccccggcgagacccccgaacgaagtcttcggctggcagaatccagagagcagagtcctagacgcaaggaggtagagtcccgactgagtcctggggagtcagcttatcaaaagctgggcctcactgaggctcataagtggaggcctgactcaagagagtctcaggagcaaagtctggtacagctggaggccaccgagtggagattgagatccggcgaggagcgacaagactactccgaggagtgcggacgtaaagaagagtggccggtgcccggagttgccccaaaggaaactgcggagctaagcgagactttaacacgcgaggcacaaggtaactcttcagctggagttgaagctgccgagcagcgacccgtagaggacggggagagaggcatgaaacccactgaaggttggaagtggaccctgaactccggcaaggccagagagtggaccccacgggacatcgaggcacaaacccaaaagcccgaacctccagagtctgccgaaaagctgctggagtccccaggggtggaggctggggagggagaagcagagaaggaagaagctggggcccagggaaggccactgagggcactccaaaactgttgtagcgttccaagtcccctccctcccgaggacgcagggacaggtggccttaggcagcaggaagaagaagcggtggagcttcagccaccaccccctgccccactttccccacctccccccgcgcccactgctccacaaccacctggcgaccctttgatgagccgtctcttctacggcgtgaaagcaggtcccggcgtcggggccccacgaagatccggccacaccttcacggtgaaccctcgcaggtcagtacctccagctacccccgctacccctacctctcctgctactgttgacgccgccgttccaggagccggcaaaaaacggtaccccaccgcagaggaaatcttagttctagggggttacttgaggctcagccgttcctgcctggctaagggatcacctgagcgtcaccacaaacagctgaaaatcagcttcagcgagacagctctcgaaactacttaccagtacccgtctgaatcgtccgtacttgaggagttgggacctgagcctgaggtgccctccgcccctaaccctcctgcagctcaaccggacgatgaagaggatgaggaagagctgcttctgctgcaaccggagttacagggcgggctgcggacgaaggctctcatcgtggatgagtcatgcaggcgatag

SEQ ID NO: 49893 - DNA, 1842 bp, Artificial Sequence
  derived and/or modified sequence
atggccaccatccccgactggaagctgcagctgctggcccggcggagacaggaggaagccagtgttaggggcagggagaaggcggaacgcgaaagactgagccagatgcctgcgtggaaaagaggcctattagaacggcgccgagctaagctggggctttcccccggagaaccgtccccagtcctgggcactgtcgaggctggaccccctgacccggacgagtccgcagtgctgttggaggctatcggccctgtccaccaaaacagatttattagacaggaacgtcagcagcagcagcagcagcaacagcggtctgaggagttgctggcagaaagaaaacccggccccttagaggctcgcgaacggagaccatctccaggcgagatgagagaccaatctccaaaaggccgagaatcaagagaggagcggctctctccgagagaaactcgggagcgaagactggggatcggaggcgcccaggagttgtctttgaggccccttgaagcccgagactggcgacagagccccggtgaagtgggcgaccggtctagccgcctatccgaagcctggaagtggaggcttagccccggggaaacccctgagcggtccctgagattggccgaatcccgcgagcagagcccaaggcggaaggaggtggagtctcgcctttcaccgggagagagtgcttatcagaaacttgggctcacagaggctcataagtggcggccggacagccgcgagtcacaagagcagagcttggtccagttagaagctacagaatggcgtctgagaagcggagaggagaggcaggactacagtgaggagtgcgggcgcaaggaggagtggcctgtcccgggagtggcccctaaggagactgcagagttgtccgagactctgactcgcgaagcgcaggggaatagcagcgccggggtcgaagcggctgagcagagacccgtagaggatggagaacgagggatgaaacctaccgaggggtggaaatggactcttaactcaggcaaggccagagagtggacgccccgagacatagaagcccagactcagaaacccgagcctcccgaaagcgctgaaaagctcctcgagtcccccggtgtggaggccggcgagggtgaggcagaaaaagaagaggccggcgcccagggccgtcctctccgtgcgctgcaaaactgctgctctgtgccctctccactgccccccgaagatgccgggacaggcggactgcgacagcaggaggaggaggccgtggaactacagccccccccgccagccccattgtcgcctccaccccccgcgccaacagctccccaaccacctggggacccactcatgtcaagattgttctatggggtcaaagcaggaccaggcgtgggcgcccctaggcggtcaggacacacgttcacggtgaatcctaggagaagcgttccaccagctacccctgccacgcccacctcacccgccacggtcgatgccgcggtccccggcgctggcaagaaacgctaccctacggctgaagagatcttagtcctaggtggctacttaaggctctccaggtcttgcttggccaagggcagccccgagagacaccacaaacagctaaaaatttccttttccgagacagccctggagacgacctatcagtatccttctgagtccagcgtgctggaagagctaggacccgagcccgaagtccctagcgcccccaacccgccagccgcccagcccgacgacgaagaggatgaggaggaactgcttctcctccagcccgaattgcagggaggcctgcggacaaaggcactcatcgtagatgagtcatgcagaaggtag

SEQ ID NO: 49894 - DNA, 1842 bp, Artificial Sequence
  derived and/or modified sequence
atggccaccatccccgactggaagctgcagctgctggcccggcggcgtcaagaagaggccagcgtgagaggccgcgagaaggcagagagagaacggctgtcccagatgcccgcctggaagcgggggctgctggagcgcaggcgggccaagctgggattgtcacctggggaacctagcccagttttaggaacagtcgaagccggcccgcccgaccccgacgaatcagccgttctgctagaggcgatcgggccagtgcatcagaatcggttcatccgccaggaacgccagcaacagcaacagcagcagcaacgatcagaggagctgctggctgaacgtaaaccgggacctcttgaagctcgtgagagaaggcctagcccaggggagatgcgcgaccagtcgccaaaaggaagagaaagcagggaagagaggttatctccccgagagaccagggagagacggctgggtattggtggagcccaggagctaagcctgaggcccttagaggcaagagactggcgccagagtccaggggaggtaggggatagatcaagccggttgagcgaagcttggaagtggcggctctcccctggcgaaactccagaacgttcactgcgcctagccgaaagtcgcgaacagtctccaagaagaaaagaggtggagagcagactgtccccaggcgagagtgcttaccagaaacttggcctgaccgaagcccacaagtggagacccgattccagggaatcacaggagcagtccctggtccagctggaagctaccgagtggcggctgagaagcggagaagagcggcaagattacagcgaagaatgtggccgcaaggaagagtggccggtgcccggagtcgcgcccaaagaaactgctgagctgtctgagacactgaccagggaggcccagggaaattcttctgcaggagtcgaagccgccgagcagaggccagtagaggacggcgagcgtggcatgaagcctactgagggctggaagtggaccctaaattctgggaaggctagagaatggacccctagagacattgaggctcagactcaaaaaccagaaccccccgagagcgccgagaaattgttggagagccccggagtggaggcaggcgagggcgaggctgagaaggaggaggcgggggcccagggaaggccgcttcgcgcattacaaaactgctgttcggtgcctagtcccctgccccctgaggacgctgggaccggaggacttcggcagcaggaggaggaagccgtggaactccagccaccgccgcccgcgcccctctctccaccccctccagctcccaccgctcctcagccaccgggcgatccactcatgagcagactgttctacggcgtgaaagccgggccaggtgttggggcgccgagaaggagtggacacaccttcacagtgaacccccgaaggtcagtgcctcccgccactccggcgaccccaaccagtcccgctaccgtcgacgctgctgtgcccggtgcaggcaagaagcgttaccccacggccgaggagatcctcgtgctcggtgggtatctgcggctttcccgcagctgcctggctaagggcagcccagaaaggcaccataagcaactgaaaatctccttctccgagacagcccttgagaccacctaccaatatccctccgagtctagtgttttggaggagctgggccctgagcccgaagtgccgagtgcccccaacccacctgccgctcagccggacgacgaagaagacgaagaagaactgctgctgctacagccagaactgcagggcgggctgaggacaaaagcgctgatcgtggatgagagttgcaggcggtag

SEQ ID NO: 49895 - DNA, 1842 bp, Artificial Sequence
  derived and/or modified sequence
atggccaccatccccgactggaagctgcagctgctggcccggcggcgtcaagaggaggcttccgtgcgcggacgggaaaaggctgagcgcgagagactgtcccagatgcctgcatggaaaaggggcttactggagcgacgccgagccaagttgggactctctcccggagaaccatcccctgtcctaggcaccgttgaggctggccctcctgaccctgacgagagcgcagtactgctcgaagccatcgggcccgtgcatcagaatcgatttatcaggcaggaacgacagcagcagcagcagcaacagcagcggtcagaggagttattggctgagcgcaagcctggtcccctcgaagcccgtgagagaagaccttcacctggcgagatgcgggaccaatctccaaagggccgcgaatcacgcgaggaacgactatctcctcgggagacaagagaaaggcgtctgggaattgggggcgctcaggagctgtcactcagaccactggaggctcgggattggcggcaaagccctggcgaagtgggggacaggagctcccgtctgagtgaggcctggaaatggaggctgtctcctggagagaccccggaacgctcactgcggctcgcagagtctagggagcagagtcctagacggaaagaggtcgagagtcggttgtcacctggtgagagcgcttatcagaaactggggttaactgaagcccacaagtggcgaccagactcccgggagagccaggaacaatctctggtgcagctcgaggctacggagtggaggctccgctctggtgaagagagacaggattacagcgaagagtgtggacggaaggaagagtggcccgttccaggggtggctcctaaggagactgccgaactgtcagaaacccttactagggaagcccaagggaactcatctgcaggggtcgaggcagcagaacagagacccgtagaggacggggaaagaggcatgaagcccacagagggatggaagtggacccttaactccggtaaagcccgcgaatggactccacgtgacatcgaggcacaaactcagaagccagaacctccagaatctgctgagaagttactggagtcccccggtgtggaggccggagagggtgaggctgagaaggaggaagcaggtgcacagggtcgtcccctaagagcattgcaaaactgctgcagtgtcccctctcccttgccacctgaggatgctggcacaggtggactgaggcagcaggaggaggaagctgtagaactccagcccccgccaccagctcctctgtctcctcccccacccgccccaacagctccgcaaccacccggagacccgctgatgagccgtctgttctatggagtcaaggcaggacctggcgtcggcgcgcctcggagatccggtcacacattcacagtgaaccctaggcggtctgttccaccagcgactcctgcaacacctacttcacccgcaacagtggatgctgccgtgccaggcgctgggaagaaaagataccctactgcagaggagattctcgtactcgggggttatctgaggttgtctcggagttgcctcgccaaagggagtccagagagacatcataaacaattgaagatcagctttagcgaaaccgctcttgaaacaacctaccagtatcccagtgagagctcagtgctcgaagagctcggacctgaaccagaagtaccaagcgcccctaacccacctgcggcacagccagatgacgaagaggatgaggaagaattactgctgttacaaccagagctccagggtgggttgcgcacgaaagccctcatcgttgatgagagctgcagacgctag

SEQ ID NO: 49896 - DNA, 1842 bp, Artificial Sequence
  derived and/or modified sequence
atggccaccatccccgactggaagctgcagctgctggcccggcggagacaagaagaggcatccgtgagaggacgggagaaagcggagcgtgagcggctgtcgcaaatgcctgcatggaagcgaggtctcctcgagcgccggcgagcgaagctcgggctttcccctggtgagcccagccccgttctcggcactgttgaagcaggcccccctgatcctgatgaatccgctgttttactagaggcaatcggacctgtgcatcaaaatagatttataaggcaggagcgacagcagcaacagcagcagcagcagagaagcgaggagctgctggcagaacgaaagccgggccccctggaagcacgggaacggagaccctcaccaggtgagatgcgcgaccagagcccaaaaggaagagagagccgcgaggagagactcagtcctcgggaaacgcgagagcggagactcggcataggaggagctcaagaattgagtttacgccccctcgaagcccgggattggcgacaaagtcccggagaggtcggagacagatcgagcaggctaagtgaagcctggaagtggcggctgtctcctggggaaacacccgaacgcagccttcgactagcagagagccgcgagcagagccctcggcgcaaggaagtggaatccagattatcccctggggagagtgcgtaccaaaagcttggtttaacagaggcccacaagtggagacccgactctagggaaagtcaggagcagtcgctagttcagctggaggcaacagaatggaggctgcgttccggagaggagcgccaggattattcagaggaatgtggccgcaaggaggagtggcctgtgcctggagtcgctcccaaggaaactgctgaactgtctgagactttgacccgagaggcgcaaggaaattcaagtgctggagtggaggccgccgaacaacgccccgttgaggacggcgaaagaggcatgaagcctacggagggatggaagtggactctcaattcaggcaaggcccgcgagtggacaccccgcgacatcgaggctcaaacacaaaagcccgaaccgccagaatcggcagagaaactcttggagtctccgggagtagaagccggagaaggagaagctgaaaaggaggaagccggcgcccagggaagacccttaagggcgctgcagaattgctgtagcgttccctctccgctaccccctgaagacgctgggactggtggactgaggcagcaggaagaggaggccgttgaacttcagccaccccctcctgctcccttgtctccaccaccaccagcccccaccgcaccgcagcctcctggcgacccactgatgtcacgactgttttatggtgtcaaggctggtcccggtgttggtgcacccaggcgctcgggccacaccttcactgtcaatcctaggcgttctgtgcctccagccactcctgcaacccccacatcccctgcaaccgtggacgccgcagtcccaggtgcaggcaagaaacgctatccaacagccgaggaaatattagtgctgggagggtaccttaggctgagcaggtcttgcctggcaaaaggctctccggaacgacaccacaagcaactcaagatatcatttagtgaaaccgctctcgagacgacttatcaataccccagtgaatcttctgtgctagaggagcttgggccggagcccgaagtgccttctgcacctaaccctccggcagctcagcccgacgatgaagaggacgaggaagagctgctgctcctgcagcccgagttacaggggggtctgcgcacaaaagctctgatcgtggacgaatcttgcaggagatag

SEQ ID NO: 49897 - DNA, 1842 bp, Artificial Sequence
  derived and/or modified sequence
atggccaccatccccgactggaagctgcagctgctggcccggcggaggcaggaagaggccagcgtgcggggacgggagaaggccgagagagagcgattatcccagatgccagcgtggaagcgcggccttctcgagcggaggagagccaagctgggtctcagcccaggggagccatcaccggttctggggaccgtggaggcaggtccccctgacccagacgaatcagccgtgctgcttgaggccataggccctgtgcaccaaaacagattcatcaggcaagagcgacagcaacagcagcagcagcaacagcgttccgaagagctcttggctgagcgcaagccagggccattggaggcacgggagaggagacccagccccggggaaatgagggatcagtcccctaaggggcgggagtcccgcgaagagagactgagtcccagagagacaagggagcgcagactgggaatagggggagcccaggagctgagtctccggccccttgaggcacgagactggcggcagtcgcctggcgaggttggcgataggagcagtcgattgtcagaggcttggaaatggagactttcacccggggagactcccgagagaagccttcgtttagccgagagtagagagcagtctccaaggcgcaaggaggtggagtctcggctctcacccggcgagagtgcctatcaaaagctcggactgactgaagcgcacaagtggaggccagatagccgggagtctcaggaacaaagtctggtccagctcgaagccaccgaatggcggttacggagcggcgaggaacgccaggattattccgaggagtgcggtcgcaaggaggaatggcctgtgccaggggtagcacctaaggagaccgccgagctcagcgagaccttgaccagagaagcccaggggaattctagcgcaggagtagaggctgcagaacaacgtcctgtggaagacggagagcgcggcatgaagcctacggaaggctggaaatggactttgaattctggtaaggcacgggagtggacaccaagggatatcgaagcacagactcagaaaccagaacccccagagtccgccgaaaagttgctagaaagtccaggggttgaagccggagagggcgaggcggagaaggaagaggctggcgcccagggaagacccttgagagctcttcaaaactgttgttctgtaccgtccccgctccctcccgaggacgctggaacaggtggactcaggcagcaggaagaggaagctgtcgagctgcagccacctcccccggcacccctgtcaccaccgccacctgcccccacagcaccgcagccaccaggagatccactgatgagtcgcctcttttacggcgtcaaggctggacccggggtcggggcaccccggcgttccggacacacgttcaccgtgaatcctagaaggagcgttcctcctgcaactcctgcgaccccgacctctccagctaccgttgacgcagccgtgcctggcgctggcaagaagcgctatcccacagccgaggaaatactggttctgggaggttacctcagactctccaggtcatgcttagcaaagggaagccccgagcgtcaccacaaacagctgaagatttccttcagtgagactgccttagaaacaacctaccagtacccctcagaaagctctgtattggaagagttggggcccgagcccgaggtgccttcagcacccaatcccccagccgcccaacccgacgacgaagaggacgaggaggagctcttacttcttcagccggaactgcagggcggcctgcgcaccaaagccctgattgtggacgagtcatgcagaaggtag

SEQ ID NO: 49898 - DNA, 1842 bp, Artificial Sequence
  derived and/or modified sequence
atggccaccatccccgactggaagctgcagctgctggcccggcggaggcaggaggaagcatccgtgcgtggaagggagaaggccgagcgcgagcggctgagccagatgcccgcctggaagcgggggctccttgagcggcgacgggccaagctggggctgtctccaggagagcccagtccggtcctcggcaccgttgaggccgggcctccagatccagatgaatctgccgtactgctggaagcaatcgggcccgtccatcagaatagattcattaggcaggagaggcagcagcaacagcagcaacagcagcgatcggaggagctcctggctgagcggaagccgggcccgctggaggccagggagcgcaggccctctcctggggaaatgcgggaccagtcccctaaagggagggagtccagggaggagagactgtcacctcgggagaccagggagcgcagattaggcatcggaggcgcccaagaactgtccctccgaccattggaggcccgagactggaggcagtccccaggagaggtgggggaccggagctcccggcttagcgaggcttggaaatggagactgtctcccggagagacacccgagcgctctcttcgactggctgaatcccgcgagcaatctccacgaagaaaggaggtcgagagccggctatcccccggagagtccgcctaccagaagctggggctgaccgaagcccataagtggcgccccgatagccgtgaatcccaggagcagtctctggtgcaattagaagcaaccgagtggcgcctcaggtctggcgaagagagacaggactacagcgaagagtgtggacgcaaagaggaatggcccgttcccggggtcgctcccaaggaaacagctgaattgagcgaaacattaacccgcgaggctcaggggaatagtagcgctggagtcgaagccgcagaacagcgcccagtggaggatggagagaggggaatgaaacccacagagggatggaagtggaccctcaattctggtaaagctcgcgagtggacgcctagagacatcgaagcccagacccagaagccagagcctccagagtcagcagagaagctcttagaaagcccaggtgtggaggcaggagaaggggaggccgagaaagaggaggctggggcgcagggaagacctcttagggcgctgcaaaattgctgctctgtgccaagcccgctgccacccgaggacgcgggaaccggcggcttacgtcaacaggaggaggaggccgttgaactccaaccccccccaccagctccactaagtcccccaccgcctgcaccaaccgcgccccagcctccaggcgaccctctgatgtccagactgttttacggtgtaaaagcaggacctggcgtcggagctcccaggcggtccggacacaccttcacagttaaccctcgccggtcggtgcctccggctacgccagcaacgcctacctctccagcgactgtagacgcagctgtgccaggagctggcaagaagcgataccccacagccgaggagatactggtcttaggtggctacttgcgcctctcacggtcatgcttggctaagggcagtcctgaacggcaccacaagcaattgaagattagcttctctgaaaccgccctggagactacgtaccaatacccgagcgaatcaagtgttttggaggaacttggtcctgaacctgaagtgcccagcgccccaaacccccccgcggcacaaccagacgacgaggaggatgaagaggaactcctgttgcttcagcccgaacttcagggaggcctgcggaccaaggccttaattgttgatgaatcctgccgccgatag

SEQ ID NO: 49899 - DNA, 1134 bp, Artificial Sequence
  derived and/or modified sequence
atggccaccatccccgactggaagctgcagctgctggcccggcggcgccaggaagaggctagcgtacgcggcagggaaaaggctgagagggaacgactgtctcagatgccagcatggaagagagggctgcttgagcgcagacgtgcaaagttgggcctgagtcccggcgagcctagtcctgtcctgggaactgttgaagccgggcctccagacccggatgagagtgcagtattactggaagccatagggcctgttcaccagaacaggttcatccgacaggaaaggcaacagcagcaacagcaacaacagcgctccgaggaactgctagcagagcgcaaacctggacccctggaagcacgggaaagaaggccaagtcccggggagatgcgcgatcagagtcccaaggggagagagagccgagaggaacgcctgagtcctagagaaacaagagaacgcagactgggcatcggcggcgctcaggagctttcacttcgcccactggaggcccgagattggagacagagtccaggcgaagtgggggatagatccagtaggctttccgaagcctggaagtggcggctaagccccggcgagaccccggaaaggagccttcggcttgcggagagtagggagcagagcccgagacgcaaagaggttgagtcccgtctcagccccggggaatccgcctatcagaaactagggctcactgaggctcataagtggcgccccgattccagggaaagccaggagcagagcttagttcaactggaagctaccgaatggcgccttcggtcaggggaggagcgacaggattacagtgaagagtgtggtcggaaggaggaatggccagtccctggagtggcccccaaggaaacagcagaattgtccgagacacttaccagagaggcacaggggaacagtagcgcgggggttgaagctgccgaacagagaccggtcgaggatggcgagagagggatgaagcctacagaaggctggaaatggaccctgatcatgagcttagccggcaagggcaaccagcatctggtgacctgctttccacaccccgtctcaggtgggcgagctaactgtcccatttccaccttaatacagtccccctggtgtgggtggggttag

SEQ ID NO: 49900 - DNA, 1134 bp, Artificial Sequence
  derived and/or modified sequence
atggccaccatccccgactggaagctgcagctgctggcccggcggaggcaggaggaagcatcggtacggggccgagaaaaggctgagagggaaaggctgtctcagatgcccgcctggaaacggggccttctagaaaggcggcgggccaaattaggtctttcacccggggaaccttcacctgtgctgggcaccgtcgaagcagggccccctgaccctgatgaatctgccgtcctactcgaagccatcggccctgtgcatcagaaccgctttattaggcaggagcgccagcaacagcagcaacaacagcaaaggtctgaagagctactagcagagcggaaacctgggccgctggaagcgcgagagagaagaccttcaccaggcgaaatgagagatcaatctcccaaggggagggagagccgcgaagaacgcctgagcccccgggaaacccgagagcgcaggctgggcatcgggggtgcccaagaactctccctcagaccactggaggcacgagactggagacagtcccctggcgaggtcggagatcggagttccagattaagtgaggcctggaagtggaggctctctcccggggagacaccggagcgatctctgcggttagccgaatctagagagcagagtccacgccgcaaggaagttgaaagcagactctcgcctggcgagtctgcctaccaaaagcttggactgaccgaagctcacaagtggagacccgattcacgcgaaagtcaagagcagagcttagtccagctcgaagctaccgagtggcggctcagaagtggcgaggaacgccaagattatagtgaggagtgcggaaggaaagaggagtggccagtacctggagtggcgcccaaggagacggcagagctctctgaaaccctcacacgtgaggctcagggcaattccagcgccggagtagaagccgcagagcagcgaccagtggaagacggcgaacggggcatgaagcctaccgaaggctggaagtggaccctcatcatgtctctcgcaggcaaggggaatcagcacctggttacttgtttcccccacccagttagcggcggtcgcgccaactgtcccatcagcaccctgatacagtcgccttggtgcggctggggctag

SEQ ID NO: 49901 - DNA, 1134 bp, Artificial Sequence
  derived and/or modified sequence
atggccaccatccccgactggaagctgcagctgctggcccggcggcgtcaggaagaagccagtgtaagaggtagagagaaagcggaacgtgaaagactgtcacaaatgccagcctggaagcgtgggctcttggaacgcagaagagcaaaactaggcctctccccaggagaaccttcacccgtcctggggactgttgaggcaggtccaccagatcctgacgaaagcgcagtcttgctcgaggccatcggcccggtacaccagaatcgctttatcaggcaggaacgccagcagcagcagcagcaacaacagcgttctgaagaattgctggcagagcgtaagcccgggccactagaggcacgtgagagacgcccctccccgggggagatgcgggatcagtctccgaaggggagagagagcagagaggagaggctgagcccacgcgagacacgcgaaaggcggctcggcatcggaggcgcccaagagctgtctcttaggcccctcgaggcccgggattggagacaaagtccaggcgaggtgggtgaccggtcaagcagattgtccgaggcctggaagtggcggctttctcctggcgaaaccccggagcgatctctcagactggcggaaagtcgggaacagagtcctaggcggaaagaggttgaaagcagattgagcccgggcgagtccgcttatcagaagctgggcttaaccgaggcccataagtggcggccggacagtagagagtcacaggagcaaagcctcgtgcagcttgaggccacagagtggagactgcggagtggcgaggagcgacaggattactcggaggagtgcgggaggaaagaagaatggccggtacccggggttgcccccaaagagaccgccgagctctcggagaccttgacccgagaagctcagggcaattcttccgccggcgtcgaggcagccgagcaacgacccgttgaagacggcgagcgaggcatgaagccgaccgagggctggaagtggactttgatcatgtcgctagccggaaaggggaatcaacacctagtgacatgttttccacatccagtgtcaggcggaagagcaaactgtcctatctcgactctcatacagtctccatggtgcggatggggctag

SEQ ID NO: 49902 - DNA, 1134 bp, Artificial Sequence
  derived and/or modified sequence
atggccaccatccccgactggaagctgcagctgctggcccggcggagacaggaggaggcctcggtgcgggggcgagagaaggccgagcgcgagagactttcacagatgcccgcttggaagcgaggacttcttgagagacgacgggcaaagctgggtctgagtcctggtgagccaagtccagtattggggacagtcgaggcggggccgcccgaccccgatgagtccgcagttctgttagaggcaatcggacccgtgcaccaaaatagatttattaggcaggagcgccaacagcagcagcaacaacaacagagaagcgaggaactgcttgctgagcgaaaacccggaccactggaggcacgcgaaagaagaccatctccaggggagatgcgtgaccaaagccctaaggggcgagagagtagggaggaaagactgtctccgcgtgagacccgcgagcgtcgactggggatcgggggagctcaggaactgtcactaaggccactcgaagccagagactggaggcagtcacccggtgaggtcggcgatcgctctagccgtctgtctgaggcatggaaatggaggctgtcgcctggtgagacacctgaacggtcgctgcggttggctgagtcccgcgagcagtctcctaggcgaaaagaagtagagtcacgactgtcacccggcgagtcagcctatcagaagctgggcctgaccgaggcacacaagtggcgacccgatagtcgagaatcccaggaacaatcactcgtgcaactcgaagcgactgagtggaggctgaggagcggtgaggagaggcaggactacagcgaagaatgcggccggaaggaagagtggccagtcccgggagtggcccccaaggagaccgccgagctatctgagacactgactagagaagcccagggcaattcctccgccggagtggaggccgcggaacagcgacccgtggaagacggagagagaggaatgaagcccactgagggttggaaatggactttgataatgagcttggccggaaaggggaaccagcatcttgtgacatgcttcccgcaccctgtgtcaggggggagagcaaattgcccaatcagcacgctcatccaaagcccatggtgcgggtggggctag

SEQ ID NO: 49903 - DNA, 1842 bp, Artificial Sequence
  derived and/or modified sequence
atggcaactattccggattggaagctacagctgctcgccaggcggagacaggaagaagcaagtgttcgcggaagggagaaggccgaacgggagcggctcagtcagatgcccgcttggaaacgaggcttgcttgaacgccgtcgcgctaagttgggactcagccccggagagcccagccccgtcctcggcacagtggaggccggtccaccagaccccgatgagtccgcggtgcttctggaggctatcgggccagtgcaccagaatagatttatccgccaggagcgtcagcaacagcagcaacagcaacaacggtcagaagagcttctggctgaacggaagccaggaccactggaggcaagagagcgtagaccttcaccaggtgagatgagagaccaaagtccgaagggcagagagtccagggaagaacggctgagcccccgagaaacaagggaaagacgacttggaataggaggtgctcaagagctgtcactcagacctcttgaggcacgtgattggcgccaatcacccggagaggtcggtgataggagctcaagactctctgaggcctggaagtggcgcctcagtcccggagagaccccggagaggagcttgcggctggctgaatcccgcgaacagtcccccagacggaaggaagtagagtcccgcctctctcctggcgagtccgcctaccaaaaactgggactaaccgaggcccataaatggaggccagacagtcgggagtctcaagagcaaagtctggtgcagctggaggcgaccgaatggcggctgagatctggagaggaacggcaggattattcagaggaatgtggccgaaaagaagagtggcccgtccctggagtcgcccctaaagagacagcagagctgtctgagacgctgactagggaggcccagggaaatagtagcgctggggtggaggctgccgagcaaaggccagtcgaggatggggagagaggcatgaagcctacggagggatggaagtggaccctcaattccggaaaggctcgggagtggactcccagagacatagaggcccaaactcagaagcctgaacccccagaaagcgccgagaaactcctggaaagccccggagtagaggcgggtgagggggaagccgaaaaggaggaggcaggcgctcagggcagacccctgcgagctctgcagaactgttgcagtgtcccctccccccttcctcccgaggacgctggaacgggagggctgcggcagcaagaagaggaggcagttgaattgcaacctccacccccagcccctctgtcgccacccccacctgctcccactgctcctcaaccacccggtgacccgttaatgtctaggctcttttatggggtcaaggcaggaccaggggtgggggcaccccgtaggtccggacacaccttcacagttaaccccagaaggtccgtgccccctgctacacccgctacaccaacctcccccgctacagtggacgccgcagtgccgggtgccggaaaaaaaagatatccaactgctgaagagattctggtgttgggtgggtacctcaggctgagtcgaagttgtctggcaaaagggagccctgagaggcaccataaacaactgaaaatcagcttctctgagaccgccctcgaaaccacataccagtaccccagtgaatcctcggtcttggaggagctgggccctgagcccgaagttccatctgccccaaatccccctgcagcccagcccgatgacgaagaggatgaagaggagcttcttttattgcagcccgaactgcaggggggattgaggaccaaggccctgattgtggatgagagctgccgacgatag

SEQ ID NO: 49904 - DNA, 1134 bp, Artificial Sequence
  derived and/or modified sequence
atggctaccatacccgactggaaactccagcttttggcgagacggagacaggaagaggccagtgtgagaggacgcgagaaagccgagcgcgagaggctttctcagatgccagcctggaagcgcggactgcttgagcgacgcagggcaaaactgggcctgagtcctggggaaccatccccagtgcttgggaccgtagaagctggacctcccgatcctgacgagagtgccgtgttactcgaggcgattggaccagtgcaccaaaacaggttcatccgacaagagcgacagcagcaacagcagcagcagcagagatcagaggaactcctcgccgaacgaaaaccaggaccattggaagccagagaaaggagaccatcccccggtgaaatgagagaccagagtccgaagggcagggaatcgagagaagagaggctttcccctcgcgagacccgtgagcgcaggctgggtattggtggcgctcaggagctttccctgcgacctctcgaagctagagactggaggcagtcccccggtgaagttggtgatagaagttctagacttagcgaggcatggaaatggagactgtccccaggtgaaacaccagaacggagcttgaggctggccgagtcccgggagcagtctcctaggagaaaagaagtggagagtcggctgtcacctggtgaatctgcttatcaaaaactggggctaacggaggcacacaaatggaggcctgattcaagagaatctcaggagcagtccttagtccaacttgaggctacagaatggcgactcaggtccggcgaagagcgtcaggattatagcgaggaatgtggccgaaaggaagaatggcctgtgccaggagtggcccctaaggagactgccgagctgtctgaaactttgacacgtgaagcacagggaaactcctccgctggagtggaagccgcagagcagaggccagtggaggacggagaacgcggaatgaaaccaacagagggctggaagtggacacttataatgtcgctcgcaggaaaaggaaaccagcacctggttacctgcttcccgcatcctgtgagtggcggacgcgcaaattgccccatttctacattgatccagtccccatggtgcggatggggatag

SEQ ID NO: 49905 - DNA, 1842 bp, Artificial Sequence
  derived and/or modified sequence
atggcaactattcctgattggaaattacagctgctagcgcgacggagacaggaagaagcttctgtcagggggcgagaaaaggcagagagggaacgcctttcccagatgcctgcctggaagcgaggactgctagaacgaaggagagccaaactagggctgagccccggagagccatcccctgtgctgggcactgtcgaagccggaccaccagatcctgacgagagcgccgtcttgctggaagccattggcccagtgcaccaaaaccgctttatccgacaggaacggcagcagcaacagcagcagcagcagcgtagcgaagagcttctagccgagcggaagccaggcccactggaggccagggagaggagaccctctcctggagagatgcgagaccagtcccctaagggcagagaaagccgggaggaacggttatccccacgcgagactcgtgaaagaaggctgggaatagggggagcccaggagctttctctccggcctttagaagctagagactggagacaatcacccggagaggttggggatcgtagttcccgcctctcagaagcatggaaatggcggctctccccaggcgagacccccgagcgatcactacgacttgctgagtctcgcgaacagtcacctcggcgtaaagaagtggagtcccgcctcagcccaggtgagtccgcgtaccaaaagctggggttgaccgaggctcacaagtggcggccagactcaagggagagccaggaacagagtcttgtgcaactggaggcgacggagtggcggcttcggagtggcgaggagagacaggactatagcgaggaatgtggcagaaaggaggagtggccagtcccaggggtggcccctaaggagaccgccgagctgtctgagacgctgactcgggaggcgcaagggaactcttcagcaggcgtggaagccgctgagcagaggcctgtggaggacggggagagagggatgaaaccaactgaagggtggaaatggactttgaacagcggaaaagccagagagtggactccgagagacattgaggctcagacacagaaaccagagccgccagagtccgccgagaagttactggaaagccccggtgtcgaggccggtgagggggaagctgagaaggaggaggctggggcacaaggccgtcctctccgtgctctccagaactgctgcagtgttccctcccctctgcctccagaggatgccggaacaggaggtttgcgacagcaggaggaggaagctgtggaattacagcctcccccaccagccccactgagccccccacccccagctcccaccgctccgcagcccccaggggacccccttatgtcacggctgttctatggcgtcaaagcaggccctggggtgggagcaccccgacgcagtggccacacctttaccgttaatcccaggcgctccgtgcctcctgccaccccagccactcctactagccctgctactgtcgacgcagccgtcccaggcgcagggaagaaaaggtatcccaccgccgaggaaattctagtcctcggcggatacctgaggctctccagatcttgtctggccaaggggagtcctgagagacaccacaagcagctaaagatctccttctctgagacggctctggaaacaacataccagtatccttccgaaagttctgtactggaggaattggggcctgaacctgaggtgccctctgctccgaatcctcctgccgcacagccagacgacgaggaggacgaagaggagttactgctgttgcagccagagcttcaggggggtctccgaacaaaggctctgattgtggatgagtcttgtcgaaggtag

SEQ ID NO: 49906 - DNA, 1842 bp, Artificial Sequence
  derived and/or modified sequence
atggccactatacctgactggaagctccagctcctcgccaggcgcagacaggaggaggccagtgttaggggccgtgagaaggcagagagggagcgtttatcccagatgcctgcttggaagcgcggattactggagagacgtcgggctaaactcgggctgagccccggagaacccagcccagtgctagggaccgttgaggcaggacccccagaccccgacgagagcgctgtgctgttggaggctattggtccagtccatcagaaccgtttcataagacaggagcggcagcagcagcaacagcaacaacagcgcagcgaagaattattagccgagcgcaaaccgggaccccttgaagcaagggagcgcagaccttctccaggcgaaatgcgagaccaaagccctaaaggaagagaatccagagaggaaaggttatctccacgcgagactagggagcggagattgggcattgggggagcccaggaactctccctgaggccgctggaagctcgcgattggcgccaatctccaggggaggttggagataggagctcccgcctatcagaagcatggaagtggcggctctctccaggtgagacccccgaaaggtctctgcgcctggccgaatcaagggagcaatctccaaggcgcaaggaggtcgagagccggctctctcccggagagtcagcgtaccagaagctcggcctgaccgaggcgcataagtggcgtccagacagtagagaaagtcaagaacagtccctggtgcagctcgaggccactgaatggcgcctccgcagcggggaggagcgacaggactattctgaagagtgcggcagaaaggaagagtggccggttccgggagttgcaccaaaggaaaccgctgaattatctgagaccctgacgcgcgaggcgcagggtaacagtagcgctggggtggaagctgccgaacaaaggccagttgaagacggggagcggggaatgaaacctacggagggctggaagtggaccctgaatagtggaaaggctcgggagtggacgccaagggatatcgaagcacagacccagaagcccgagcctcccgagtcagcagagaaactactggagtctccgggtgtcgaggccggtgagggcgaggcggagaaagaggaggctggcgctcaaggccgacccctcagagctctccaaaattgttgttccgttcccagccctctgccccctgaagacgcaggcaccggcggacttaggcagcaggaagaggaagctgtggaactgcaaccccctcctcctgcaccactgtctccaccccctcccgcacccacagctccgcagccacccggtgacccattgatgagccggcttttctatggcgtcaaggctggtcctggcgtgggagcacctagaagaagtggccatacttttacggtcaacccacggcgaagcgtgcccccagcgacacccgctaccccgacctcacctgctactgtggatgccgcagtgccaggtgcaggtaagaaaagatatcccacagctgaagagatcttagtgctgggcggttacctccgcctctcacggtcttgtctggccaaagggtcacccgagaggcatcacaaacagctgaagatctcgttttctgagacggcactggagacaacctatcaatatccctctgagtcgagcgttctggaagagttggggcctgagcctgaggtcccttcagctcctaaccctccggctgcccaaccggacgatgaggaggatgaggaggaactactcttgctgcagcccgaactacaagggggtcttcggacgaaggcgcttatagtggatgaatcctgtcggagatag

SEQ ID NO: 49907 - DNA, 1842 bp, Artificial Sequence
  derived and/or modified sequence
atggcaacaatcccagactggaagctgcaattgctggctcgcagacgtcaggaggaggctagcgttcggggaagagagaaggccgagcgggaaagattatcacagatgcccgcatggaagaggggactgctggagcgacggcgtgccaaactgggcctttcacccggagaaccttcccccgtactgggtacagtggaagccggaccgccagatccagacgagtctgccgtgctgctggaggccattgggcctgtgcaccagaatagattcataagacaggaaaggcagcagcaacagcagcagcaacagagatctgaagagctgttggctgagcggaaacctgggccactcgaggcgcgagagcgcagaccaagtccgggtgagatgcgcgatcagtctcctaagggtcgggaatcaagggaagaaaggttatccccccgtgagacgcgggagagaagactgggaattgggggtgcccaggagttgtcgttacgcccactggaggctagggactggcgtcaaagcccaggcgaggtgggggatcgctctagtcgcctctcggaggcatggaagtggagactgagtccaggagagactccagagcgctcgctcagactggctgaatcccgcgaacaatcacctcgcaggaaggaagtagagtcaagactatctcctggcgaatccgcttatcagaagctcgggctgactgaggcccacaagtggcggcctgactcccgcgagagccaagagcaatccctcgtgcagctagaagccaccgagtggcgcctccggtcgggggaggaacggcaggactattcggaggaatgcgggaggaaggaggaatggcctgtgcccggagtcgcccctaaggaaacagccgagttatccgagacactcaccagggaagctcagggcaacagttctgcgggtgtggaggccgcagagcagcggcctgtggaggatggtgaacggggtatgaagcccaccgagggctggaagtggaccctcaacagcggtaaagctcgcgagtggaccccgcgagacatagaggcccaaactcaaaagccagagcctcctgaaagtgctgagaaactgctggaaagtcctggagtggaagccggagaaggcgaagctgagaaggaagaggctggcgctcagggtcggcctctgcgggcactgcaaaactgttgctccgtgcctagccccctgccccctgaagatgcagggactgggggactgcgacaacaagaggaggaggcagtggaactgcaacctccaccaccagcaccactgtctccacccccaccggctcctacagcccctcaacctcccggtgatcccttgatgagtaggctcttttacggagttaaggcaggccctggggtgggtgcccctcgccgaagcggacacacattcaccgtgaacccccgaagatctgtgccacccgctaccccagcaacccctaccagtccggcaacggtcgacgccgctgttccaggcgctgggaaaaagcggtaccccacagccgaagagattctcgtcctcggtgggtaccttcgattgagccggtcttgtcttgctaagggatctccagagagacatcacaaacaactgaaaatcagctttagcgagactgcattagagacaacgtatcaatatccgtctgagtcatcagtgcttgaggagctaggccctgagccagaggtgccatcggccccaaatcccccagccgcacagccagacgatgaggaagacgaagaagagctgctgctcttacagcccgagctccagggaggcctccggaccaaggcacttatagttgatgagagctgtaggcgctag

SEQ ID NO: 49908 - DNA, 1842 bp, Artificial Sequence
  derived and/or modified sequence
atggccactattcccgattggaagctccaattgctcgccagaagacgtcaggaagaggcttctgtgagaggtagagagaaggccgagagggaacggttgtctcagatgccagcatggaaacggggtttgctggaaaggcgacgcgcaaaattaggactgtcccctggtgagccaagccccgttctgggtaccgtggaggccggacctccagatcctgatgagtccgctgttctgctcgaagccattggccctgtgcatcaaaacagatttattcgacaggagcggcagcagcagcaacagcagcagcaacggtcagaagaactcttggccgagaggaaacctggtcctctggaggcccgagagcgaagaccttctccaggcgaaatgagagatcagagcccaaagggcagggagtcccgtgaggagcggcttagcccaagggagactcgagaacggcgactgggcattgggggtgcccaggagttaagtctccggccattagaagcccgtgactggcgacagagcccgggagaagtgggggatcgtagttctagactgtccgaggcatggaagtggcggcttagtcctggcgagactccagaacgctcactgagactggccgaatcgcgggagcagagtccccgtagaaaggaagtggaaagccgcctcagtcctggagaaagtgcttatcaaaagttgggacttacagaagcccacaagtggcgcccagactccagggaatcccaggaacagtctctcgtgcagctggaagcaaccgagtggcgtcttaggtcaggcgaagagcggcaggactactctgaagagtgtgggaggaaggaggagtggccggttcccggtgtcgctcctaaagagactgcggaactctcagagacacttactcgagaagcgcaaggcaattcctcagccggtgtcgaggccgcagaacagcgccctgtggaagacggtgagagaggaatgaagccaacagaaggctggaaatggaccctgaactccgggaaagccagggagtggactccaagagacattgaggcgcaaacacaaaagccagaaccaccagagtctgccgaaaagctcctggaaagccccggagtggaggccggtgagggggaggccgaaaaggaggaggccggagcacagggacgacccctgcgggcactgcagaattgttgctccgtgcctagccctctcccacctgaggatgcaggcacaggcggtctgcgccagcaggaggaggaagcggttgagcttcagcccccaccaccagctcctctctcccctcctcccccagcccctacagctcctcaaccgccaggggaccccttgatgagtcggctgttctacggagtcaaagccggacccggtgttggggctcctaggagatctgggcatacgtttacagtaaaccccaggagatccgtacctccggctactcctgccacacctacatcgccagctactgtggacgccgcagtacccggagcgggaaaaaagcggtaccccaccgctgaagagatcctcgttctcggaggataccttcgactgagccgtagttgtctcgctaaagggagtcccgaaagacatcacaagcagcttaaaatttctttttctgaaaccgcactggagacaacgtatcagtatccgtccgaatcaagcgttctggaagagctggggccagagccagaggtgcccagcgctcccaacccacccgctgctcagccggatgacgaggaggatgaagaagagctgctgcttttacaacccgagctgcaaggcggtttgcgcaccaaagccctgatcgtggatgaaagctgcagaaggtag

SEQ ID NO: 49909 - DNA, 1842 bp, Artificial Sequence
  derived and/or modified sequence
atggccaccatccctgattggaagctgcagctgttggcccgtcgaagacaggaggaggcttcagtgcgcggtagggaaaaagctgagagggaacgtctgtcccagatgccagcttggaagcgcggactgttggaaaggaggagggcaaaactcggcctgtcccctggcgaacctagtcctgttttaggaactgtcgaggctggtcctcctgatcccgacgagtctgctgtgctgcttgaggctattggtcccgtacatcagaaccgcttcataagacaggagagacagcaacagcagcagcaacagcagaggagcgaagaactcttagcggagcggaagccgggtccccttgaggctcgcgagcgacgacccagccccggagagatgcgggaccaatcccctaaaggcagagaaagccgagaagagcggctgtccccacgggagactcgggaaagaaggctgggcattggtggtgcccaggagctgagtttaaggcccttggaagcccgagattggcgtcagtccccaggagaggtaggagaccggagttctcggctctccgaggcctggaagtggaggctgagccccggagagaccccagaacggtcactccgtctggccgagtccagagagcagtcccctcgacgcaaggaggtggaatcccggctctctccaggcgagtcagcctatcagaaactgggacttactgaagcccataaatggcgcccagatagcagggaatcgcaagaacagtccttggttcagctggaagcaactgagtggcggctgaggtcaggggaagaaagacaggactatagcgaagagtgtggacggaaggaggagtggcctgtgcctggggtggcaccaaaggagactgctgaacttagtgaaactttgacccgggaagctcaggggaacagcagtgctggtgtggaggcagctgaacagcgccctgttgaggacggtgagagaggcatgaaacctactgaaggatggaagtggactctaaattccggcaaagcacgagagtggactccaagagacattgaggcgcagacacagaagcccgagccaccagagtcagctgagaaactgctcgaatcccctggagtggaagccggtgaaggtgaggcagaaaaggaagaggccggagcacaaggcaggcccctccgggcactgcagaattgctgctccgtgccgtcaccactccctcctgaggatgccggaaccggtggtctgcggcaacaggaagaagaagctgttgagctccagccccctcccccagcgcctctgagcccccctccgccagctccaaccgccccacagccccctggagatcctcttatgtcacgcctgttctacggcgtaaaagcaggtccaggtgtcggagcccctcggagaagtggccatacttttaccgttaatccaaggagatctgtccctcccgctacccccgctacccccacgtctcctgcaacagttgatgccgcagtccccggagctggcaaaaaaaggtacccaacggcagaggaaatcctggtgctaggcggatatttacggctgtcacgatcctgtctggcaaaaggcagcccagagagacaccataagcagctgaagatctcattcagcgagaccgcattggaaactacatatcagtacccgtccgaatctagcgtcctcgaggagctcggccctgagcctgaggttccctccgcacccaatccacctgcagcacaaccagacgatgaagaagacgaagaagaacttctgttgctgcagcccgaattacagggcggactgcgcacgaaggcgctgatcgttgatgagtcttgccggcgatag

SEQ ID NO: 49910 - DNA, 1842 bp, Artificial Sequence
  derived and/or modified sequence
atggccacaatccctgactggaagctgcagctcctggccagacgaaggcaggaggaggcaagcgtgcgcggaagagaaaaggccgagagggaacggctgtcacagatgccggcttggaaacgagggctcctggaacgcagacgagcgaagctaggcttgtcccccggtgagccaagccctgtgctggggacagtggaggctgggcctcccgaccctgacgaaagcgcggtgctgttagaagctattggccctgtgcaccagaacaggttcattcgccaggaaagacagcagcagcagcagcagcaacagaggtcagaagagcttttggccgagagaaaacccggaccgctggaagcacgcgagcgcaggcccagtcctggcgagatgcgcgatcaatctcccaaaggcagagagtcacgcgaggagaggctgtctcccagagagactagggaaagacgccttggaattggcggagcccaagagcttagcctacggccactggaggctcgggattggcgccagagccccggagaggtcggggatcgcagcagccggttatccgaggcttggaaatggaggctcagtcctggagaaacaccagaacgcagcctgcgtctcgccgagtctcgggagcagagcccaagacgcaaggaagtagagagcaggctttccccaggagaatccgcataccagaagttaggccttacagaggctcacaaatggcgacccgactccagagagtcccaggaacagagccttgtgcagctggaggctacggagtggcgtttgcggtctggagaggagcggcaggattactcggaagaatgcggacggaaggaagaatggccagtgcctggagtggcacctaaagagacggccgaactcagcgaaacccttacgagagaggcccaggggaattctagcgccggagtcgaagcagcagagcaacggcctgtagaagacggcgagcggggaatgaaaccaacggaagggtggaaatggaccttgaatagtggcaaagctcgtgaatggactcctcgggacatcgaggctcaaacacagaagcccgaaccccctgagagtgccgaaaagctgctagagagcccaggagtggaagccggtgagggtgaggcagaaaaggaggaagcaggtgcacagggcagaccgcttagggctctacagaattgttgttccgtgcctagtcctctacccccagaggacgcgggtaccggtggcctgagacaacaggaggaggaggccgtcgagcttcagcccccaccaccagcccctctgtcacctccacccccagccccaaccgccccacagcctccgggagatcctctcatgtccagactcttttacggggtgaaagcaggcccaggagtgggcgctcctcgtagaagcggtcatacatttaccgtgaacccgagaagatctgtgccaccagcaacacctgccacacccacatctccagccaccgtggatgccgctgtgcccggagccggaaaaaaaagataccctacagcagaggaaatcctggtgctaggcggttacctcagactgagcaggagttgtctggcaaagggctccccggagcggcatcacaaacaactgaagatttcttttagcgagacagcgctcgagaccacttaccagtatccatccgagtccagcgtgctggaagagctgggcccagaacccgaagttccaagcgcccctaatccaccggctgctcaacccgacgatgaagaagatgaggaggagctactgctcttgcagccagagctgcagggcggtctaagaacgaaggcacttatagtggatgaatcttgccgtcgatag

SEQ ID NO: 49911 - DNA, 1842 bp, Artificial Sequence
  derived and/or modified sequence
atggctactattccggactggaaattacagcttctcgctagaagaagacaggaggaggcttcagtgcggggtagggaaaaggccgagcgagagcgactctcccagatgcccgcatggaagcgtggtctcttagagcgacggagggctaaattgggtttgagccctggggagccaagccctgtgctcggaaccgtggaagccggacccccagacccagatgagtctgcagtcctgctggaggctatcgggccagtgcaccagaatcgcttcatccggcaggagagacagcagcagcagcagcaacagcagagatcagaagagctcctagccgagcggaaacctgggcctctcgaagccagggagcggagaccaagtccaggtgaaatgcgcgaccagagccccaaaggcagagaatcacgcgaggagaggttatctccccgagagacaagggagcgcagactagggattggcggagcccaggagttatcattgagaccactcgaggctcgtgactggcgtcagagcccgggtgaagttggtgatcggtcttcgaggctgtccgaggcctggaagtggcgcctgagtcctggggagacccccgagcgctcactgaggctcgcagagtcacgcgaacagagtccccgacggaaggaagttgagtcgaggctctctccaggggaaagcgcctaccaaaagctgggactgaccgaggctcataaatggcgacccgattccagggagtcacaggagcagagcctggttcagctggaagccacagaatggcgattgcgctctggcgaggaacggcaggactatagcgaagagtgcggaagaaaagaagagtggcccgtgcccggtgtagcgcctaaggaaacggcggagttgagcgaaactctgaccagagaggctcaggggaactcatctgccggtgtggaagccgctgagcaaagacctgttgaagacggggagaggggaatgaaacccacagagggttggaagtggacactgaactcgggaaaggctcgggaatggacacctagggatattgaggcccagacccagaagcctgaacccccagagtcggcagaaaagctgttagagtcccccggtgtggaggctggtgagggagaagccgagaaagaagaagctggcgctcaggggcgaccccttcgtgcgctgcagaattgttgttcggtgccaagtcctctaccccctgaggacgctggaaccggcggattgagacagcaggaggaggaagctgtagagttgcaaccccctcctccggcacccctctctccaccccctcctgcccctacagccccacagccccctggcgatcctctgatgagccggctgttctatggggtgaaagcgggacctggtgtgggcgcacccagacgtagcggacatacgtttactgtaaacccgagacgttccgttccaccagcaaccccagcgacccccacatctccggcaaccgtcgatgcagccgtgcctggggctggtaagaagcggtaccctacggctgaggagatcctcgtgctgggcggatacctgaggctgagcagatcatgcctggctaagggttcaccggagagacaccataaacagctgaaaatatcgttctcagagacagcattagagacaacctatcagtatccttcggagtcctctgtgcttgaagaattgggtcctgagcctgaggtacctagcgcgcctaaccctccggctgcgcaacccgacgacgaggaggacgaggaagagctgctgctgctccagcctgagctgcaggggggattaagaaccaaggccctgatagttgacgaatcctgtcgtagatag

SEQ ID NO: 49912 - DNA, 1842 bp, Artificial Sequence
  derived and/or modified sequence
atggcaaccataccggactggaaactacagctattggccagaaggcgtcaggaagaggcgagcgtgagaggcagggaaaaggccgagcgcgagagactgtctcagatgcctgcctggaagaggggcctgctggagaggcgcagggccaaactggggttgtcacctggggagcccagtccggtcctggggactgtggaagccggacctccagaccccgatgagtctgctgtcctgctcgaggctatcggccctgttcaccaaaacagattcataaggcaggagcgacagcaacaacagcagcagcagcagcggtccgaggaattacttgccgaaaggaagcctggcccactggaggctcgagagcgacggccttcaccgggagaaatgagggatcagagccccaaagggcgtgaaagtagagaggagcgactaagtccgcgagagactcgagagcgccgtctgggaattgggggagctcaggagctatcattacgtccattggaagctcgtgactggaggcagtctccaggcgaagtcggcgacagaagcagccggctgtcagaggcctggaagtggagactgagcccaggcgaaacacctgaacgatccttacggctcgccgaatccagagagcagtccccccgtcgaaaggaagtcgaaagtcggcttagtcccggtgagagcgcctatcagaaactcgggttgaccgaagcccacaaatggcgaccagactctcgagagtcacaggaacagtccctagtgcaattagaggcaacggaatggcgcctccgctctggagaggaacggcaagattattctgaagaatgcggcaggaaggaagaatggcctgtgcccggagtcgctccgaaagaaacagcagaactctccgaaacattgacccgtgaggcacaaggtaatagcagcgccggagtggaggctgcagagcagcgacccgtggaagacggggagagagggatgaaacctaccgaggggtggaaatggactctgaactctgggaaggcgagggagtggacccctcgggatatcgaggcacagacccagaagcctgaaccacctgagtctgcggagaagcttttggaatccccaggagtggaggccggagagggcgaggcggagaaggaggaagctggggctcagggtcgccctctgagagctttgcagaattgctgttccgtccctagtccacttccccctgaggacgcaggaactgggggactgcgccagcaggaagaggaagcagtggagttgcagcctcctcctcctgcgcctctgagccctccccctcccgcaccgacggcaccacaaccccctggggatcctcttatgagcaggttattttacggcgtcaaagctggacctggtgtgggggcaccaaggaggagcgggcatacctttaccgtcaatccaaggaggagtgtgccacccgcaaccccggctacacccacaagccccgcaacagttgacgcggctgtgcccggagccggaaaaaaacgctaccctactgctgaggaaatcctggtgctaggaggctatctcaggctcagccgtagctgcctagctaagggttcccctgagcggcaccacaagcagctgaagatctccttttcagagactgccctagaaaccacctaccagtacccctccgagtcctccgtactcgaagagcttggaccagaacctgaagtgcctagcgctcctaacccccctgccgcacagcccgacgacgaagaagatgaagaggagctgttactgttgcagcccgaattgcagggcggtctgagaacaaaggctctgattgtagacgagtcatgccgacggtag

SEQ ID NO: 49913 - DNA, 1842 bp, Artificial Sequence
  derived and/or modified sequence
atggcgaccatcccagactggaaattgcaactcctggcgcgaagacgccaagaggaggcctctgtgagaggcagagagaaggctgaaagagagcgcctcagccagatgcccgcttggaagcgaggactcctcgagcgaaggagagcgaagctcggcctgtctcctggagagccctcacctgtcttgggaacagttgaagcaggcccaccagatccagacgagagcgccgtgctactcgaagctatcggacctgtccatcagaaccgtttcattcggcaggagaggcagcagcagcagcaacagcagcagcgctcagaagaacttctcgctgaaagaaagccagggcctctggaggcgcgagaaagaaggccatccccgggagagatgcgcgatcaatcaccgaagggcagagagtcacgggaggaacgtctgtcccctcgagaaactcgagagagaaggttgggcattggcggtgctcaagaactgtcactacgccctctagaagccagggattggcggcagagtcctggcgaagtcggcgacaggtcctcaagactgtcagaggcctggaaatggaggctctctcccggtgaaacccccgaacggtcactgaggctggctgagagcagggaacagtccccccgacggaaagaagttgaatcaagactgtccccaggagaaagcgcctaccaaaaactcggcctaacggaggcacataagtggcgtcctgactcccgcgaaagtcaggaacaaagcctcgttcagctggaggcgacagagtggagactgcgatctggcgaagaaagacaggactacagtgaggaatgtggacgaaaagaggaatggcccgtaccaggtgtggcaccgaaagagaccgccgaactttccgagaccctgaccagggaggcccaggggaattcatccgcaggagtggaagctgcggaacaaagacccgtagaggatggtgaacggggaatgaagcctactgaggggtggaaatggaccctcaattcaggaaaggctcgagagtggactccccgtgacatcgaagctcagacgcagaaaccggagcctccggaaagcgccgagaaactgctcgaaagtcccggagtggaagccggtgagggcgaggccgagaaggaagaggctggagcccagggaagaccattgagagccttgcagaactgttgtagcgtaccatccccgctgccgcctgaagacgccggtacaggcggtctgagacaacaggaggaagaagctgtggaactacagcctcctccccctgctcccctgagccccccaccacctgcccctacagcccctcagccccctggcgacccacttatgtcgcgtctattctacggtgtgaaggcgggaccaggggtgggtgcaccgagacgatctggccatacgttcactgtgaatcctcgaaggtccgttccgccagccacgccagcaacaccaacgtcccctgccactgtcgacgctgccgttccaggcgctggtaagaaacgatatccaacagccgaggagatcctggtcctgggaggttacctaaggctttctagaagctgcctcgcgaaagggagccctgagaggcatcacaaacagcttaagatttctttttccgaaacagcgctggaaacaacgtaccagtatccgtccgagtcaagcgtgctggaggaattagggccagaaccagaggtaccttctgccccaaacccgcctgccgcacagcccgatgatgaggaggatgaagaagagctgctcttgcttcagcctgagctacaggggggactgcgtactaaagccctgattgttgacgagtcgtgccgtcggtag

SEQ ID NO: 49914 - DNA, 1134 bp, Artificial Sequence
  derived and/or modified sequence
atggcaacgatccctgattggaaactgcagctactggcccgacgcagacaggaggaagcgagcgtcaggggtagagaaaaggcggaaagggaacgactgtcccaaatgccggcttggaaaagggggctcctagagcggaggagagccaagctggggctcagcccaggtgaacctagtcccgtgttaggtactgtggaagcgggacccccagacccagacgaatccgccgtgctgttggaggctatcggtcccgtgcaccagaatcgatttattcgacaggaacgccagcaacagcagcaacagcagcagcggtcagaggagcttctggctgaaagaaagccagggccactcgaggctcgcgaacgcaggccgtccccaggggagatgcgagaccagtctccgaaggggagggagtctcgtgaggagcgcctgagcccccgtgagacgagagagcgcaggctggggatcgggggtgcacaggagctctcattaaggccactggaggcacgagattggaggcagagcccgggagaggtgggcgatagatccagcaggctgagtgaagcctggaagtggcggctgtccccaggggagacacctgagaggagccttaggctggctgaaagtagggagcagtctcctcgcaggaaggaggttgaatcgaggctttccccaggggagagtgcctaccagaagttaggactgaccgaagcacacaagtggcggccagactcaagggagagccaggagcagtctcttgttcagctggaagccacagagtggcgcctgcggtcaggagaggagcgtcaggattactcggaggagtgtgggaggaaggaagagtggccagttccaggggtcgcgcctaaggagaccgcagaactcagcgagaccctgacaagggaagctcagggcaacagttccgccggtgtggaagcagctgagcagagacccgtagaagatggcgagagaggaatgaagcctaccgaaggctggaagtggacactgattatgtctctcgcagggaaagggaatcaacatcttgtcacatgcttccctcacccagtttccggaggccgtgcaaattgtccaatcagcaccctgattcaatctccctggtgcggttggggctag

SEQ ID NO: 49915 - DNA, 1134 bp, Artificial Sequence
  derived and/or modified sequence
atggcaactatccctgactggaagttgcagttgctcgccagaaggaggcaggaagaagccagcgtgagggggagggagaaagcggagagagaaaggttgagccagatgcctgcttggaagcggggtttgctggaacgaaggcgcgcaaaattaggtttgagccctggcgaacctagccctgtgttgggtacggttgaggccggtcctcccgacccagatgaatctgccgtgctgctggaggccatcgggcctgtgcatcagaacagatttatacgccaagaaagacagcagcagcagcagcagcagcagagatctgaagagttgctggccgaaaggaagccaggcccacttgaggcaagagagcgacggccttcaccgggagaaatgagggatcagagccccaaagggagggaatcccgcgaggagcggttgtctccacgcgagaccagagaacgaagactaggcatcggtggagcccaggagttgtctctgagaccattggaagcacgcgattggcgccagagtcctggcgaggtgggcgatcgttcttctcggctctcggaagcatggaagtggcggctgagtcccggagagaccccggaacgaagcctccgactggcagagtctagggagcagtcccccagacgaaaggaagtcgagagtcgactgtctccaggcgaatctgcgtaccagaaactcgggctgactgaagcacataaatggcgcccagatagtcgcgaaagccaggagcaatccctggtccagctggaagctacagagtggaggctaagaagcggcgaggagaggcaggattattccgaggaatgcggacggaaggaggagtggccagtacccggagtcgcccctaaggaaacggctgagctgtcagaaacacttactagggaggctcagggaaattcttccgctggggtggaagccgctgagcagagaccagtggaggatggggagcggggtatgaaacccactgagggctggaagtggacacttatcatgagtctcgcaggcaagggaaatcaacatcttgtcacgtgcttcccacatccagtgtctggcggtcgcgctaattgtccgattagtacactgatccagtccccctggtgtggttggggctag

SEQ ID NO: 49916 - DNA, 1134 bp, Artificial Sequence
  derived and/or modified sequence
atggccacgatcccggactggaaactacagttgttggccaggcgcagacaggaagaagcctccgtgagaggtcgggagaaggctgagagggaaaggctctcacagatgccagcttggaagagaggtctactcgaacggcgtcgtgccaagctgggactgtctccaggtgaaccgtcacctgtgctcggcaccgtcgaggcgggtccaccagaccccgacgagagcgccgtgcttctcgaggctatcggcccagtgcatcagaacaggtttattcgccaagaacggcagcagcagcagcagcaacaacagagaagtgaggagctgctggccgagagaaaacccggaccactggaggcacgagagaggaggcccagccctggcgaaatgcgcgaccaatcacctaagggcagggagagtagggaggaacggctgagtcccagagagacacgggaaaggaggctggggattggaggagcacaggagcttagcttgaggcccctggaggccagggactggagacagtccccaggtgaagtgggagacagatctagtcggttatccgaggcttggaaatggcggctgagcccaggcgaaacccctgagagatcccttagactcgcggaatcgcgcgaacaatcacctcggaggaaggaggtcgaaagtagactctctccgggagagagcgcctaccaaaagctggggctcacagaggctcataagtggcgcccagacagtagagagagccaggagcaatcgctggtgcaattggaggccaccgaatggagactgaggtccggcgaagaacgtcaagactacagcgaggaatgtggcagaaaggaggagtggcccgtgcctggggtcgccccaaaagagaccgctgaactgagcgagaccctcacgagggaggcacagggaaatagctccgccggtgtagaggcggctgaacagagaccagttgaagacggagagagggggatgaagcccacggagggatggaagtggacactcattatgagcttagccggtaaagggaatcagcacttagtgacctgttttccacatcctgtctctggcggacgcgcaaattgtccgatctccactctgatccaaagcccatggtgcggatggggatag

SEQ ID NO: 49917 - DNA, 1134 bp, Artificial Sequence
  derived and/or modified sequence
atggctaccatacctgattggaagttacagctccttgccaggcgcagacaagaagaggcctctgtgaggggcagggaaaaggcagaacgggagcggctgtcccaaatgccagcttggaagaggggattgttagagcgtcggcgtgcaaagttaggcctctctcccggtgagccaagtcctgtcttaggtaccgtggaagctggtcccccagacccagacgagtccgctgtgcttctggaagcaattggacctgtgcaccagaacaggtttattaggcaggagcgccaacagcaacagcagcagcaacagagaagtgaggaactgctagccgaaaggaaaccaggccctcttgaagctagagaaaggcgccctagccccggagaaatgagggatcaaagccctaagggccgagagagccgagaggagaggctgagcccacgagagactcgggagagacggctcgggatcggaggagcccaagaactcagcctccgcccacttgaggctcgggactggaggcagagccccggtgaagtgggcgacagaagcagcaggctttcagaggcatggaagtggcggctctctcctggcgagacccccgaaagaagcctgagactggccgagagtagggagcaatcccctaggagaaaagaggtggagagcagactgagtccaggcgagtccgcataccagaagttaggccttacagaggctcataagtggcgacctgacagcagagagagccaggaacagagcctagtgcagcttgaagcaactgagtggaggctcaggtcaggcgaagagagacaggattatagcgaggagtgtggtagaaaagaggaatggcctgtccctggtgtggcccctaaagagacggctgaactgtcagagaccctcacacgcgaggcccaaggaaactccagtgcgggagtcgaagcggcagaacagaggcctgtcgaggatggcgagcgaggcatgaaacccacagaaggttggaagtggaccttaattatgagccttgcgggaaagggtaatcaacacctggttacatgttttccacacccagtatctggaggcagggcaaactgtcccatctccaccctgatacagtctccatggtgtggctggggctag

SEQ ID NO: 49918 - DNA, 4599 bp, Artificial Sequence
  derived and/or modified sequence
actttgccagagcggccgggtccccattcccattccttcaaatcccctttttcccggcagccgacctgtagacccaagggagacaggttgaagctagaaagagtcggggcagcagctctggtaggggagggagcatccaaaacctctggcttctgagcgcctctcctgccgcccatccacaaagccccccacagcctggcggctgccctcgaccccgcaaaacaaaggacttcagaggctggacctacagacccagatgagaaggcaaaagcgtagggaggagcggcaggagatgggaagggcgggccccgctcggagcagctgccgcttcctcccaaagtcccacgaggggcctgagtcacgggccaccgccctgggtcggcgagctgggggaagggatctggacacctggcgtgtccgggcgggaagctggtgagggcccctggggacagagcggaggaccagtggttggggcgagaagagggcagtcccgcagcgagtcccacgcggggtgggagggatctaggccccgccctctcctcggctccgccctgcgcccccttccctctcctcattgtccttagacaaagcggtcgccgcccccgcccggccccctggtctctgtctccgtccctcctcctttgctgcctctttccctcctcctctccctccctcctcccctccctccagtctccggatctccctcggtccctctctcctcctcttcctctctctggacgcccggctcctccgcaccccctcccccgggggtcccgcggcctgtgagttgactgaggggctcagacttggggagtgggtgtctcctcgcccctgtccttgctcccgtccctggcccggaccttggctgtctcctctttgtgccgagattgtcagtctgtgcggctacagcggggtggagacggccggctctgtcacggcttcatgagagcggggacggggcgcaggacttgcaggcgccggggagaagagacatggagccggcccttggcactctggggtcgcgtggggcagtcggtgggggaggcaggcggtggtgacaggacagggtgggggtggacgccagggttctgggaacgcgctggcagccctgacgcccgggttccgaaagtctcgggggtgggtatttcccccgacccgcctcgggggcggagtgcggggcagaggggtgggggctggggagaggcgtggcccgagcggtgctggaagcggagccgggacctttggggcccgcgctgagacgcgcccggctgctgccgccgccctcctttcccctcttccctggtttcccttctcctctagacctgttcgctctccgcccctccttgcctccccaacaccccctcaggtcccgttgcctcctggtcctttcagggattcctggtccttccttcccacactagcctccctggggtatcgctgaggcagcctggcctgcacccaggttcccctcacccctgccacatttctctcttctccctcacgccaactttccttttcgcccttctctctctttctcacatcctagagacggtctttaatacgcattaaccctgtgctgccacatctggctcctgccctcattgcctccaatccggactcttcctctcacatcacccccaccacccccaacttgggctcacaacttctcttcactttttccatttccccagttctctgccttccgtctttccctctgtcctcatccttagcccctctgccctgctttgtgtcccacctctccccctccacttcctctcctcccaccctcagtctcacccccgggctgtctcactctctggagcctctccttcctgttctctgtccccagtgctccctaccctcacctcaagacgaccatggccaccatcccagactggaagctacagctgctagcccggcgccggcaggaggaggcgtccgttcgaggccgagagaaagcagaacgggagcgcctgtcccagatgccagcctggaaacgagggctcctggagcgccgccgggccaagcttgggctgtcccctggggagcctagccctgtgctagggactgtagaggctggacctccagacccggatgagtctgcggtccttctggaggccatcgggccagtgcaccagaaccgattcatccggcaggagcggcagcagcagcagcagcaacaacaacggagtgaagagctgctagcagagagaaagcctgggcctctggaggcccgggagcggagacccagccctggggagatgcgggatcagagccccaagggaagagagtcaagagaagagagactaagtccgagggagaccagagagaggaggctggggatagggggagcccaagagttgagcctgaggcctctggaggctcgggactggaggcaaagcccaggagaggtgggagacaggagctcccgactgtcagaggcatggaaatggaggctgagtcctggagaaactccagagcggagtctgagactagcagagtctcgagagcaaagccccaggagaaaagaggtggaaagtagactgagcccaggggaatctgcctaccagaagttgggcctgacagaggcccataaatggagacctgactccagagagtctcaggaacagagtttggtacaactggaggcaacagagtggaggctgaggtcaggagaagaaagacaagactactcggaagaatgtgggagaaaagaagagtggccagttccaggggtagctccaaaagagactgcagagctgtccgagaccctgacaagggaggcccaaggcaacagttccgcaggagtggaggcagcagagcagaggcctgtggaagatggcgagaggggcatgaagccaacagaagggtggaaatggaccctgaactccgggaaggctcgagaatggacacccagggacatagaggctcaaactcagaaaccagaacctccagagtcagcagagaagcttctggaatctcccggtgtggaggctggagaaggggaggctgagaaggaggaggcgggggctcagggcaggcctctgagagccctgcagaactgctgctctgtgccctcccccctcccaccagaggacgctgggactggaggcctgagacagcaggaagaggaagcagtggagctccagcccccaccaccagcccctctgtctcccccacccccagccccaactgccccccaacctcctggggatcccctcatgagccgcctgttctatggggtgaaggcagggccaggggtgggggccccccgccgcagtggacacaccttcaccgtcaacccccggcggtctgtgccccctgcgaccccagccaccccaacctctccagccacagttgatgctgcagtcccgggggctgggaagaagcggtacccaactgccgaggagatcttggttctggggggctacctccgtctcagccgcagctgccttgccaaggggtcccccgaaagacaccacaaacagcttaagatctccttcagcgagacagccctggagaccacgtaccaatacccctccgagagttcggtactggaggagctgggcccggagcctgaggtccccagtgcccccaaccctccagcagcccaacccgacgacgaagaggatgaggaagagctgctgctcctgcagccagagctccagggcgggctgcgcaccaaggccctgattgtggatgagtcctgccggcggtgaccatcttccaacatagggatatacctccctccttcttataactgaagatcctggagcccggaagattcagggcagacagaccctgataatgagcctggcagggaagggcaaccaacatcttgtaacttgctttccccaccctgtttctgggggcagagccaattgcccaatttctaccctaatccaaagtccctggtgtgggtggggttaaacgtgctggtgcatcctaggtcatccaagagtgagcgccaagtcctgagaaggggcacagaactccctggagggtggagatggagcacctgccccccatggcagggtacactctccccacagccttcctccccaccatcccgtggggactctcgggatttaagcactcgtctctctgggaggcccagaccccactccatttataggcacatctccttcatttcctaggtcactgcccctttgtttacagctcctgcctcctcccttgaccacagcctggtttacaaattccatcagctcccagccccacctgccaaagtcccaggtttacaagccacgcttacttgctgtgtctgcgtggaattctctcctctgtcccctccagtctcctcattggagtgacctgaaggtgtggcttcctccactttttctcagtattactttgccttagttttccccaagagggaaggctggaactcttaactctgtaccccttgatagttatttaattctgtttctcctagtggttcacaattgaactgaattgagatggtgtcgggtggctaaggagacacctcacctctccttccccattgtgccgcctttatcaattgcctgttttgttttgtttgttttttaactttccataataaaatggagttctcttcaa

SEQ ID NO: 49919 - DNA, 2853 bp, Artificial Sequence
  derived and/or modified sequence
cctccctccagtctccggatctccctcggtccctctctcctcctcttcctctctctggacgcccggctcctccgcaccccctcccccgggggtcccgcggccttgctccctaccctcacctcaagacgaccatggccaccatcccagactggaagctacagctgctagcccggcgccggcaggaggaggcgtccgttcgaggccgagagaaagcagaacgggagcgcctgtcccagatgccagcctggaaacgagggctcctggagcgccgccgggccaagcttgggctgtcccctggggagcctagccctgtgctagggactgtagaggctggacctccagacccggatgagtctgcggtccttctggaggccatcgggccagtgcaccagaaccgattcatccggcaggagcggcagcagcagcagcagcaacaacaacggagtgaagagctgctagcagagagaaagcctgggcctctggaggcccgggagcggagacccagccctggggagatgcgggatcagagccccaagggaagagagtcaagagaagagagactaagtccgagggagaccagagagaggaggctggggatagggggagcccaagagttgagcctgaggcctctggaggctcgggactggaggcaaagcccaggagaggtgggagacaggagctcccgactgtcagaggcatggaaatggaggctgagtcctggagaaactccagagcggagtctgagactagcagagtctcgagagcaaagccccaggagaaaagaggtggaaagtagactgagcccaggggaatctgcctaccagaagttgggcctgacagaggcccataaatggagacctgactccagagagtctcaggaacagagtttggtacaactggaggcaacagagtggaggctgaggtcaggagaagaaagacaagactactcggaagaatgtgggagaaaagaagagtggccagttccaggggtagctccaaaagagactgcagagctgtccgagaccctgacaagggaggcccaaggcaacagttccgcaggagtggaggcagcagagcagaggcctgtggaagatggcgagaggggcatgaagccaacagaagggtggaaatggaccctgaactccgggaaggctcgagaatggacacccagggacatagaggctcaaactcagaaaccagaacctccagagtcagcagagaagcttctggaatctcccggtgtggaggctggagaaggggaggctgagaaggaggaggcgggggctcagggcaggcctctgagagccctgcagaactgctgctctgtgccctcccccctcccaccagaggacgctgggactggaggcctgagacagcaggaagaggaagcagtggagctccagcccccaccaccagcccctctgtctcccccacccccagccccaactgccccccaacctcctggggatcccctcatgagccgcctgttctatggggtgaaggcagggccaggggtgggggccccccgccgcagtggacacaccttcaccgtcaacccccggcggtctgtgccccctgcgaccccagccaccccaacctctccagccacagttgatgctgcagtcccgggggctgggaagaagcggtacccaactgccgaggagatcttggttctggggggctacctccgtctcagccgcagctgccttgccaaggggtcccccgaaagacaccacaaacagcttaagatctccttcagcgagacagccctggagaccacgtaccaatacccctccgagagttcggtactggaggagctgggcccggagcctgaggtccccagtgcccccaaccctccagcagcccaacccgacgacgaagaggatgaggaagagctgctgctcctgcagccagagctccagggcgggctgcgcaccaaggccctgattgtggatgagtcctgccggcggtgaccatcttccaacatagggatatacctccctccttcttataactgaagatcctggagcccggaagattcagggcagacagaccctgataatgagcctggcagggaagggcaaccaacatcttgtaacttgctttccccaccctgtttctgggggcagagccaattgcccaatttctaccctaatccaaagtccctggtgtgggtggggttaaacgtgctggtgcatcctaggtcatccaagagtgagcgccaagtcctgagaaggggcacagaactccctggagggtggagatggagcacctgccccccatggcagggtacactctccccacagccttcctccccaccatcccgtggggactctcgggatttaagcactcgtctctctgggaggcccagaccccactccatttataggcacatctccttcatttcctaggtcactgcccctttgtttacagctcctgcctcctcccttgaccacagcctggtttacaaattccatcagctcccagccccacctgccaaagtcccaggtttacaagccacgcttacttgctgtgtctgcgtggaattctctcctctgtcccctccagtctcctcattggagtgacctgaaggtgtggcttcctccactttttctcagtattactttgccttagttttccccaagagggaaggctggaactcttaactctgtaccccttgatagttatttaattctgtttctcctagtggttcacaattgaactgaattgagatggtgtcgggtggctaaggagacacctcacctctccttccccattgtgccgcctttatcaattgcctgttttgttttgtttgttttttaactttccataataaaatggagttctcttcaa

SEQ ID NO: 49920 - DNA, 4599 bp, Artificial Sequence
  derived and/or modified sequence
actttgccagagcggccgggtccccattcccattccttcaaatcccctttttcccggcagccgacctgtagacccaagggagacaggttgaagctagaaagagtcggggcagcagctctggtaggggagggagcatccaaaacctctggcttctgagcgcctctcctgccgcccatccacaaagccccccacagcctggcggctgccctcgaccccgcaaaacaaaggacttcagaggctggacctacagacccagatgagaaggcaaaagcgtagggaggagcggcaggagatgggaagggcgggccccgctcggagcagctgccgcttcctcccaaagtcccacgaggggcctgagtcacgggccaccgccctgggtcggcgagctgggggaagggatctggacacctggcgtgtccgggcgggaagctggtgagggcccctggggacagagcggaggaccagtggttggggcgagaagagggcagtcccgcagcgagtcccacgcggggtgggagggatctaggccccgccctctcctcggctccgccctgcgcccccttccctctcctcattgtccttagacaaagcggtcgccgcccccgcccggccccctggtctctgtctccgtccctcctcctttgctgcctctttccctcctcctctccctccctcctcccctccctccagtctccggatctccctcggtccctctctcctcctcttcctctctctggacgcccggctcctccgcaccccctcccccgggggtcccgcggcctgtgagttgactgaggggctcagacttggggagtgggtgtctcctcgcccctgtccttgctcccgtccctggcccggaccttggctgtctcctctttgtgccgagattgtcagtctgtgcggctacagcggggtggagacggccggctctgtcacggcttcatgagagcggggacggggcgcaggacttgcaggcgccggggagaagagacatggagccggcccttggcactctggggtcgcgtggggcagtcggtgggggaggcaggcggtggtgacaggacagggtgggggtggacgccagggttctgggaacgcgctggcagccctgacgcccgggttccgaaagtctcgggggtggctatttcccccgacccgcctcgggggcggagtgcggggcagaggggtgggggctggggagaggcgtggcccgagcggtgctggaagcggagccgggacctttggggcccgcgctgagacgcgcccggctgctgccgccgccctcctttcccctcttccctggtttcccttctcctctagacctgttcgctctccgcccctccttgcctccccaacaccccctcaggtcccgttgcctcctggtcctttcagggattcctggtccttccttcccacactagcctccctggggtatcgctgaggcagcctggcctgcacccaggttcccctcacccctgccacatttctctcttctccctcacgccaactttccttttcgcccttctctctctttctcacatcctagagacggtctttaatacgcattaaccctgtgctgccacatctggctcctgccctcattgcctccaatccggactcttcctctcacatcacccccaccacccccaacttgggctcacaacttctcttcactttttccatttccccagttctctgccttccgtctttccctctgtcctcatccttagcccctctgccctgctttgtgtcccacctctccccctccacttcctctcctcccaccctcagtctcacccccgggctgtctcactctctggagcctctccttcctgttctctgtccccagtgctccctaccctcacctcaagacgaccatggccaccatcccagactggaagctacagctgctagcccggcgccggcaggaggaggcgtccgttcgaggccgagagaaagcagaacgggagcgcctgtcccagatgccagcctggaaacgagggctcctggagcgccgccgggccaagcttgggctgtcccctggggagcctagccctgtgctagggactgtagaggctggacctccagacccggatgagtctgcggtccttctggaggccatcgggccagtgcaccagaaccgattcatccggcaggagcggcagcagcagcagcagcaacaacaacggagtgaagagctgctagcagagagaaagcctgggcctctggaggcccgggagcggagacccagccctggggagatgcgggatcagagccccaagggaagagagtcaagagaagagagactaagtccgagggagaccagagagaggaggctggggatagggggagcccaagagttgagcctgaggcctctggaggctcgggactggaggcaaagcccaggagaggtgggagacaggagctcccgactgtcagaggcatggaaatggaggctgagtcctggagaaactccagagcggagtctgagactagcagagtctcgagagcaaagccccaggagaaaagaggtggaaagtagactgagcccaggggaatctgcctaccagaagttgggcctgacagaggcccataaatggagacctgactccagagagtctcaggaacagagtttggtacaactggaggcaacagagtggaggctgaggtcaggagaagaaagacaagactactcggaagaatgtgggagaaaagaagagtggccagttccaggggtagctccaaaagagactgcagagctgtccgagaccctgacaagggaggcccaaggcaacagttccgcaggagtggaggcagcagagcagaggcctgtggaagatggcgagaggggcatgaagccaacagaagggtggaaatggaccctgaactccgggaaggctcgagaatggacacccagggacatagaggctcaaactcagaaaccagaacctccagagtcagcagagaagcttctggaatctcccggtgtggaggctggagaaggggaggctgagaaggaggaggcgggggctcagggcaggcctctgagagccctgcagaactgctgctctgtgccctcccccctcccaccagaggacgctgggactggaggcctgagacagcaggaagaggaagcagtggagctccagcccccaccaccagcccctctgtctcccccacccccagccccaactgccccccaacctcctggggatcccctcatgagccgcctgttctatggggtgaaggcagggccaggggtgggggccccccgccgcagtggacacaccttcaccgtcaacccccggcggtctgtgccccctgcgaccccagccaccccaacctctccagccacagttgatgctgcagtcccgggggctgggaagaagcggtacccaactgccgaggagatcttggttctggggggctacctccgtctcagccgcagctgccttgccaaggggtcccccgaaagacaccacaaacagcttaagatctccttcagcgagacagccctggagaccacgtaccaatacccctccgagagttcggtactggaggagctgggcccggagcctgaggtccccagtgcccccaaccctccagcagcccaacccgacgacgaagaggatgaggaagagctgctgctgctgcagccagagctccagggcgggctgcgcaccaaggccctgattgtggatgagtcctgccggcggtgaccatcttccaacatagggatatacctccctccttcttataactgaagatcctggagcccggaagattcagggcagacagaccctgataatgagcctggcagggaagggcaaccaacatcttgtaacttgctttccccaccctgtttctgggggcagagccaattgcccaatttctaccctaatccaaagtccctggtgtgggtggggttaaacgtgctggtgcatcctaggtcatccaagagtgagcgccaagtcctgagaaggggcacagaactccctggagggtggagatggagcacctgccccccatggcagggtacactctccccacagccttcctccccaccatcccgtggggactctcgggatttaagcactcgtctctctgggaggcccagaccccactccatttataggcacatctccttcatttcctaggtcactgcccctttgtttacagctcctgcctcctcccttgaccacagcctggtttacaaattccatcagctcccagccccacctgccaaagtcccaggtttacaagccacgcttacttgctgtgtctgcgtggaattctctcctctgtcccctccagtctcctcattggagtgacctgaaggtgtggcttcctccactttttctcagtattactttgccttagttttccccaagagggaaggctggaactcttaactctgtaccccttgatagttatttaattctgtttctcctagtggttcacaattgaactgaattgagatggtgtcgggtggctaaggagacacctcacctctccttccccattgtgccgcctttatcaattgcctgttttgttttgtttgttttttaactttccataataaaatggagttctcttcaa

SEQ ID NO: 49921 - DNA, 1842 bp, Artificial Sequence
  derived and/or modified sequence
atggccaccatccccgactggaagctgcagctgctggccagaagaagacaggaggaggccagcgtgagaggcagagagaaggccgagagagagagactgagccagatgcccgcctggaagagaggcctgctggagagaagaagagccaagctgggcctgagccccggcgagcccagccccgtgctgggcaccgtggaggccggcccccccgaccccgacgagagcgccgtgctgctggaggccatcggccccgtgcaccagaacagattcatcagacaggagagacagcagcagcagcagcagcagcagagaagcgaggagctgctggccgagagaaagcccggccccctggaggccagagagagaagacccagccccggcgagatgagagaccagagccccaagggcagagagagcagagaggagagactgagccccagagagaccagagagagaagactgggcatcggcggcgcccaggagctgagcctgagacccctggaggccagagactggagacagagccccggcgaggtgggcgacagaagcagcagactgagcgaggcctggaagtggagactgagccccggcgagacccccgagagaagcctgagactggccgagagcagagagcagagccccagaagaaaggaggtggagagcagactgagccccggcgagagcgcctaccagaagctgggcctgaccgaggcccacaagtggagacccgacagcagagagagccaggagcagagcctggtgcagctggaggccaccgagtggagactgagaagcggcgaggagagacaggactacagcgaggagtgcggcagaaaggaggagtggcccgtgcccggcgtggcccccaaggagaccgccgagctgagcgagaccctgaccagagaggcccagggcaacagcagcgccggcgtggaggccgccgagcagagacccgtggaggacggcgagagaggcatgaagcccaccgagggctggaagtggaccctgaacagcggcaaggccagagagtggacccccagagacatcgaggcccagacccagaagcccgagccccccgagagcgccgagaagctgctggagagccccggcgtggaggccggcgagggcgaggccgagaaggaggaggccggcgcccagggcagacccctgagagccctgcagaactgctgcagcgtgcccagccccctgccccccgaggacgccggcaccggcggcctgagacagcaggaggaggaggccgtggagctgcagccccccccccccgcccccctgagcccccccccccccgcccccaccgccccccagccccccggcgaccccctgatgagcagactgttctacggcgtgaaggccggccccggcgtgggcgcccccagaagaagcggccacaccttcaccgtgaaccccagaagaagcgtgccccccgccacccccgccacccccaccagccccgccaccgtggacgccgccgtgcccggcgccggcaagaagagataccccaccgccgaggagatcctggtgctgggcggctacctgagactgagcagaagctgcctggccaagggcagccccgagagacaccacaagcagctgaagatcagcttcagcgagaccgccctggagaccacctaccagtaccccagcgagagcagcgtgctggaggagctgggccccgagcccgaggtgcccagcgcccccaacccccccgccgcccagcccgacgacgaggaggacgaggaggagctgctgctgctgcagcccgagctgcagggcggcctgagaaccaaggccctgatcgtggacgagagctgcagaagatag

SEQ ID NO: 49922 - DNA, 1842 bp, Artificial Sequence
  derived and/or modified sequence
atggccaccatccccgactggaagctgcagctgctggccagaagaagacaggaggaggccagcgtgagaggcagagagaaggccgagagagagagactgagccagatgcccgcctggaagagaggcctgctggagagaagaagagccaagctgggcctgagccccggcgagcccagccccgtgctgggcaccgtggaggccggcccccccgaccccgacgagagcgccgtgctgctggaggccatcggccccgtgcaccagaacagattcatcagacaggagagacagcagcagcagcagcagcagcagagaagcgaggagctgctggccgagagaaagcccggccccctggaggccagagagagaagacccagccccggcgagatgagagaccagagccccaagggcagagagagcagagaggagagactgagccccagagagaccagagagagaagactgggcatcggcggcgcccaggagctgagcctgagacccctggaggccagagactggagacagagccccggcgaggtgggcgacagaagcagcagactgagcgaggcctggaagtggagactgagccccggcgagacccccgagagaagcctgagactggccgagagcagagagcagagccccagaagaaaggaggtggagagcggcctgagccccggcgagagcgcctaccagaagctgggcctgaccgaggcccacaagtggagacccgacagcagagagagccaggagcagagcctggtgcagctggaggccaccgagtggagactgagaagcggcgaggagagacaggactacagcgaggagtgcggcagaaaggaggagtggcccgtgcccggcgtggcccccaaggagaccgccgagctgagcgagaccctgaccagagaggcccagggcaacagcagcgccggcgtggaggccgccgagcagagacccgtggaggacggcgagagaggcatgaagcccaccgagggctggaagtggaccctgaacagcggcaaggccagagagtggacccccagagacatcgaggcccagacccagaagcccgagccccccgagagcgccgagaagctgctggagagccccggcgtggaggccggcgagggcgaggccgagaaggaggaggccggcgcccagggcagacccctgagagccctgcagaactgctgcagcgtgcccagccccctgccccccgaggacgccggcaccggcggcctgagacagcaggaggaggaggccgtggagctgcagccccccccccccgcccccctgagcccccccccccccgcccccaccgccccccagccccccggcgaccccctgatgagcagactgttctacggcgtgaaggccggccccggcgtgggcgcccccagaagaagcggccacaccttcaccgtgaaccccagaagaagcgtgccccccgccacccccgccacccccaccagccccgccaccgtggacgccgccgtgcccggcgccggcaagaagagataccccaccgccgaggagatcctggtgctgggcggctacctgagactgagcagaagctgcctggccaagggcagccccgagagacaccacaagcagctgaagatcagcttcagcgagaccgccctggagaccacctaccagtaccccagcgagagcagcgtgctggaggagctgggccccgagcccgaggtgcccagcgcccccaacccccccgccgcccagcccgacgacgaggaggacgaggaggagctgctgctgctgcagcccgagctgcagggcggcctgagaaccaaggccctgatcgtggacgagagctgcagaagatag

SEQ ID NO: 49923 - DNA, 1842 bp, Artificial Sequence
  derived and/or modified sequence
atggccaccatccccgactggaagctgcagctgctggccagaagaagacaggaggaggccagcgtgagaggcagagagaaggccgagagagagagactgagccagatgcccgcctggaagagaggcctgctggagagaagaagagccaagctgggcctgagccccggcgagcccagccccgtgctgggcaccgtggaggccggcccccccgaccccgacgagagcgccgtgctgctggaggccatcggccccgtgcaccagaacagattcatcagacaggagagacagcagcagcagcagcagcagcagagaagcgaggagctgctggccgagagaaagcccggccccctggaggccagagagagaagacccagccccggcgagatgagagaccagagccccaagggcagagagagcagagaggagagactgagccccagagagaccagagagagaagactgggcatcggcggcgcccaggagctgagcctgagacccctggaggccagagactggagacagagccccggcgaggtgggcgacagaagcagcagactgagcgaggcctggaagtggagactgagccccggcgagacccccgagagaagcctgagactggccgagagcagagagcagagccccagaagaaaggaggtggagagcagactgagccccggcgagagcgcctaccagaagctgggcctgaccgaggcccacaagtggagacccgacagcagagagagccaggagcagagcctggtgcagctggaggccaccgagtggagactgagaagcggcgaggagagacaggactacagcgaggagtgcggcagaaaggaggagtggcccgtgcccggcgtggcccccaaggagaccgccgagctgagcgagaccctgaccagagaggcccagggcaacagcagcgccggcgtggaggccgccgagcagagacccgtggaggacggcgagagaggcatgaagcccaccgagggctggaagtggaccctgaacagcagaaaggccagagagtggacccccagagacatcgaggcccagacccagaagcccgagccccccgagagcgccgagaagctgctggagagccccggcgtggaggccggcgagggcgaggccgagaaggaggaggccggcgcccagggcagacccctgagagccctgcagaactgctgcagcgtgcccagccccctgccccccgaggacgccggcaccggcggcctgagacagcaggaggaggaggccgtggagctgcagccccccccccccgcccccctgagcccccccccccccgcccccaccgccccccagccccccggcgaccccctgatgagcagactgttctacggcgtgaaggccggccccggcgtgggcgcccccagaagaagcggccacaccttcaccgtgaaccccagaagaagcgtgccccccgccacccccgccacccccaccagccccgccaccgtggacgccgccgtgcccggcgccggcaagaagagataccccaccgccgaggagatcctggtgctgggcggctacctgagactgagcagaagctgcctggccaagggcagccccgagagacaccacaagcagctgaagatcagcttcagcgagaccgccctggagaccacctaccagtaccccagcgagagcagcgtgctggaggagctgggccccgagcccgaggtgcccagcgcccccaacccccccgccgcccagcccgacgacgaggaggacgaggaggagctgctgctgctgcagcccgagctgcagggcggcctgagaaccaaggccctgatcgtggacgagagctgcagaagatag

SEQ ID NO: 49924 - DNA, 1134 bp, Artificial Sequence
  derived and/or modified sequence
atggccaccatccccgactggaagctgcagctgctggccagaagaagacaggaggaggccagcgtgagaggcagagagaaggccgagagagagagactgagccagatgcccgcctggaagagaggcctgctggagagaagaagagccaagctgggcctgagccccggcgagcccagccccgtgctgggcaccgtggaggccggcccccccgaccccgacgagagcgccgtgctgctggaggccatcggccccgtgcaccagaacagattcatcagacaggagagacagcagcagcagcagcagcagcagagaagcgaggagctgctggccgagagaaagcccggccccctggaggccagagagagaagacccagccccggcgagatgagagaccagagccccaagggcagagagagcagagaggagagactgagccccagagagaccagagagagaagactgggcatcggcggcgcccaggagctgagcctgagacccctggaggccagagactggagacagagccccggcgaggtgggcgacagaagcagcagactgagcgaggcctggaagtggagactgagccccggcgagacccccgagagaagcctgagactggccgagagcagagagcagagccccagaagaaaggaggtggagagcggcctgagccccggcgagagcgcctaccagaagctgggcctgaccgaggcccacaagtggagacccgacagcagagagagccaggagcagagcctggtgcagctggaggccaccgagtggagactgagaagcggcgaggagagacaggactacagcgaggagtgcggcagaaaggaggagtggcccgtgcccggcgtggcccccaaggagaccgccgagctgagcgagaccctgaccagagaggcccagggcaacagcagcgccggcgtggaggccgccgagcagagacccgtggaggacggcgagagaggcatgaagcccaccgagggctggaagtggaccctgatcatgagcctggccggcaagggcaaccagcacctggtgacctgcttcccccaccccgtgagcggcggcagagccaactgccccatcagcaccctgatccagagcccctggtgcggctggggctag

SEQ ID NO: 49925 - DNA, 1842 bp, Artificial Sequence
  derived and/or modified sequence
atggcgaccatcccggactggaagctccaattgctagctcgcaggcgacaagaggaggcttctgtcagggggagggaaaaagctgaacgagagcgcctgagccagatgcccgcctggaagcgtggtctcctggagcgcagacgggccaagctgggattaagtcccggggagccgagccccgtactaggcactgtggaagcaggaccccctgacccggatgagtccgcagtcctcctggaggcaatcggccccgttcaccagaatagattcatcaggcaggaaagacagcagcagcagcagcagcaacagaggtctgaggaactgttagccgagagaaagcccggcccactcgaggcacgggagcggcgccccagcccaggagagatgcgcgaccagtctcccaaggggcgagaatccagagaagaaaggctgagccctcgcgagacgcgcgaacgtcgccttggaattgggggcgcccaggagctgagcctgagacctctggaggctcgggactggcgtcaatccccaggcgaagtcggggaccgaagttctagactgtccgaagcttggaagtggcggctctctccaggggagacccccgagcggagtttaagactcgccgaaagccgcgaacagtcaccgcggcgcaaggaggtggagagtggcctgtccccgggcgagtccgcataccagaaactagggttgaccgaggcacacaagtggagacctgatagtcgcgagtcccaagaacagagcctagtacaactagaggccaccgagtggcggttgaggagcggagaagaacgacaagactattcggaggaatgtgggcgtaaggaggagtggcctgtccctggggtcgccccgaaagaaacagcggagttatctgagactctaactagagaggcccaaggcaatagttctgcgggcgttgaggcagcggagcagcgacctgtggaagacggcgagaggggcatgaaacctaccgaggggtggaaatggacgctaaatagcggaaaggccagagagtggacccctagggacatcgaggcgcaaacccagaagcccgaaccccctgagagtgccgaaaagctgctagagtcccccggcgtcgaagctggcgaaggtgaggctgaaaaagaggaggctggcgcccagggacgccctcttcgtgccctgcaaaactgctgcagcgtgcctagccccctaccacctgaagacgctggtacaggcggtctacgccagcaagaggaggaagcagtcgaattgcagccccctcctccggcccccctgtcacccccgccccccgctcctaccgctccacaacccccaggagacccattgatgtcacgcctgttctatggtgtgaaggccggcccgggcgtcggcgctccaaggaggtctgggcatacattcactgtcaacccccggaggtccgtgccacctgccacacccgctactcctacaagccccgccaccgtcgatgcagccgtgcccggggcgggcaaaaaacgctatcccactgctgaggaaatactagtcctggggggctatctgaggctgagtaggtcatgcctggccaaagggagtccagagcgccaccacaagcagctgaagatttcctttagcgagacagcgctggagacaacgtaccagtaccctagtgagtcaagcgtgctggaagaacttggacccgagcctgaagtcccgtccgctccgaaccccccggccgctcagcccgatgacgaggaggatgaagaggagctcttactgcttcagcctgagctacagggcgggctgcgtactaaggcgttgattgtcgatgagagctgccgccggtag

SEQ ID NO: 49926 - DNA, 1842 bp, Artificial Sequence
  derived and/or modified sequence
atggcaaccatccctgactggaaactgcagcttctcgcgcgcagacgccaggaggaagcctctgtgagaggacgagagaaggctgagagagagcggctgtctcaaatgcctgcgtggaagaggggcctgcttgagcggagacgcgccaagcttgggttgtcccctggggaaccttccccggttttgggcacagtggaggccggacctccagatcctgacgagagcgctgttcttctggaagcaattggaccagtacatcagaacaggttcatcagacaggaaaggcagcagcagcaacagcaacagcagcggtcagaggaactgctagcggagcgaaagcccgggcctctagaggccagggaaaggaggcccagccctggagaaatgagagaccaatcaccaaaaggcagagagtcccgagaggaacgactgtctccccgcgaaacacgggagcgccgcctcgggatcgggggggcacaagaactctctctgagacctctggaagcacgcgactggagacagagccccggcgaggtcggagataggtctagtcgcttgtctgaggcgtggaagtggaggctttcccctggggaaacgcccgaacggtccttgcgcctggcagagagcagggagcaatcaccacgcagaaaagaagtggaaagtggactctccccaggagagtctgcataccagaagctgggcctgacggaagcccacaaatggcgtcccgattctcgtgaatctcaggaacagtccctcgtccagttagaggcaaccgaatggcggcttcgtagcggcgaggagcgtcaagattactccgaggagtgcgggcggaaggaggagtggccagttcctggcgtcgctcccaaagaaaccgccgagctgtcagagactctcactcgggaagcacaaggcaactcttccgctggtgtggaagctgctgagcagcggcccgtggaagacggtgagcggggcatgaaacctacagaggggtggaagtggactctcaactctggaaaagcgagggaatggacaccccgtgatatcgaagcccagacacaaaagcccgaaccccccgaatcagccgagaaactgctcgagagccccggagtcgaggcaggggaaggggaggcagagaaggaagaggccggcgcacagggaaggccattacgggccctgcagaactgctgttccgtgccttcccctctcccccccgaggacgcaggcactggtggattgagacagcaagaggaagaggctgttgagttacaacctcctccgcccgctcctctaagcccaccccctcccgcgcccactgcgccacagccccctggagacccgttgatgagccgcctgttctacggcgtcaaagccgggcctggcgttggagccccgcgtaggagcggccatactttcactgtcaatccacggaggtcggtcccgcccgccacaccagctactccaacatcgcctgctaccgtcgatgcagcggtgcctggcgcgggtaaaaagcggtatcctaccgcggaggaaatactcgtgttaggcggttacctgcggctctccaggagttgccttgccaaggggtccccagagaggcatcacaagcagctgaagatcagtttcagcgaaacagcgctcgagaccacataccagtacccaagcgagagctccgtgcttgaagagttgggtccggagcccgaagtgccctctgcaccaaacccccccgccgcacagcccgacgacgaggaggatgaagaagagttgctcctgctccagcccgaactgcagggcgggttgcggaccaaagccctcattgtggatgaaagttgtcggaggtag

SEQ ID NO: 49927 - DNA, 1842 bp, Artificial Sequence
  derived and/or modified sequence
atggctactatcccggattggaaactgcaactactggccagacgccggcaggaggaggcctccgtgagagggagagagaaggccgagcgcgagagattgagtcaaatgcctgcctggaagagaggactgttggagaggcgccgggctaaactggggctctccccaggcgaacccagtcctgttctgggaaccgttgaagcaggtcctccagatccggacgagtctgccgtcctcctggaggcgattgggcctgttcaccagaatcggttcattagacaggaacggcagcagcagcagcaacaacaacagagatccgaggagctgctagctgagcgcaaacctggccccttggaggcaagggaacgacgcccatcacccggagagatgcgggatcagtccccgaagggcagggagtcacgcgaggaaaggctgtctccccgagagactcgggaacgacgactcgggattgggggagcccaggaactaagcctgcggccactcgaagcacgagattggagacagtccccgggtgaggtaggtgacagatcaagtcgtctgtctgaagcatggaagtggcggctgtcccccggtgagacccccgagcggtccctcagattggcagagtcccgcgagcagagcccccgccggaaagaggtggaatcccgtctgtctcccggtgaatccgcttaccagaaactggggctgactgaggcccataagtggagacccgacagcagggaatcccaggagcaaagcctggtgcagttggaggctactgagtggcgattacggtcgggtgaggagcgacaggattatagtgaagagtgtggccggaaggaggaatggcctgtgccaggtgtggctcctaaagagacagcagaattgagcgaaaccctcacccgcgaggcacaaggaaattcttctgccggtgtggaagctgctgaacaaagaccggttgaagatggggagaggggaatgaagccgaccgaagggtggaaatggactctaaactccaggaaggctagggaatggactcctcgtgatattgaagctcagacgcaaaaacccgaacctccggagagtgctgagaagctgctggaaagcccgggggtggaggcgggcgaaggcgaggccgagaaggaggaggctggcgctcagggaaggcccctgcgagccttgcagaactgctgctccgtgcctagcccactgccccctgaggatgcggggactgggggcctccgacagcaagaggaggaagctgtcgaactgcaacctccaccgcctgcaccacttagtcctccccctcccgctccaacagccccacagccacctggcgatcctcttatgtctcgcctgttctatggagttaaggctggtcctggagtgggggccccacgcagatccggccatacctttacagtgaatccgaggagatcggtgcccccagcgaccccagcaacccctacaagccccgcgactgtggacgccgctgtgcctggagccggaaagaagcgttaccccaccgcagaggagatcctggtgctgggtggttatcttcggctcagcaggagctgtctggccaaagggtctccggagaggcatcacaaacagctgaaaataagctttagcgagactgcccttgagaccacttaccagtatccaagtgaaagtagtgtactggaagagctaggacctgagcccgaggtccctagtgcccccaatccgcccgccgcccaacccgatgacgaggaggacgaggaggagctactcctactgcagccagagctccagggtgggctgcgtactaaggccctgattgtggatgagtcttgccgccggtag

SEQ ID NO: 49928 - DNA, 1842 bp, Artificial Sequence
  derived and/or modified sequence
atggctaccattcctgattggaagttacagctactggctagacgccgacaggaggaagcatcagtgagaggccgggagaaggccgaaagggaacgcctgagccagatgcctgcttggaagcgggggctcctcgaaaggcgcagagctaaactgggacttagtcccggagagccatctccagtcctggggaccgtcgaggccgggccacctgaccctgatgagtcagccgtgctgcttgaggctatcggtcctgtgcaccaaaatcgatttattcgacaagaaagacagcagcagcagcaacagcagcagaggtccgaggagctgttggcagagagaaaacctggtcccctggaggctcgggagcggcgaccctcaccgggcgaaatgagggatcaatcccccaaaggccgggaatctagagaggagcggctaagcccacgggagactagagagcggcgccttgggatcggcggcgctcaggaactttccctcagaccccttgaagccagagactggagacagtcacccggagaggtgggggacagatcaagcagactgtccgaagcctggaaatggcgcctatctccgggggaaacccctgaacgctcccttcgacttgcggagagtcgagagcagagtcccagacggaaggaggtagagtcccgacttagcccaggggaaagtgcctaccaaaaacttggcctcaccgaggcacacaagtggcgcccggacagccgggagagtcaggagcagagtcttgtccaactggaggcgacagaatggaggttacgatcaggagaggagaggcaagattactccgaagagtgtggcagaaaggaagaatggcctgtgcccggtgtggcacctaaagaaaccgcggagctctctgaaacccttacacgggaagctcaaggtaactcctctgctggcgttgaggccgctgagcagaggcccgtcgaggatggagagcgaggtatgaaacctaccgagggctggaagtggaccctcaactctcggaaagctcgagaatggacacccagggatatagaggctcaaacccagaaacccgagccccccgaatctgcggaaaagcttctggaaagtcctggagtggaagccggggaaggagaggccgaaaaggaagaggctggggctcagggtagaccgctgagagctctacagaactgttgcagtgtgccttcacccctgcctcctgaggatgcgggaaccggtggccttcgccaacaggaagaagaggcagtggaactgcaacctccgccacctgcccccttgtcacctccccccccagccccgacagctccccaacctcccggagatccactaatgagccgattattttacggcgtgaaggcgggccctggcgttggcgcaccccggagatccggccataccttcaccgtgaacccaagacggtctgtcccgcccgccacccccgctacccccacgtcacccgccactgtggacgccgccgttccaggagctggaaaaaaacgctacccaacagcagaggagatcctggtattaggtggttacctcagactgtcccggtcgtgtctggcaaaagggtcccccgaacgacaccacaaacagctcaagatcagtttttcagagactgctctcgagacaacatatcagtatcccagcgagtccagtgtcctggaggagctgggccccgagcctgaagtgccatctgcccccaaccctcccgccgcgcagccagatgatgaggaagacgaggaggaactcctccttttgcagcccgaactgcaggggggactacggaccaaggctctgattgttgacgagtcttgcaggcgctag

SEQ ID NO: 49929 - DNA, 1134 bp, Artificial Sequence
  derived and/or modified sequence
atggctaccattccagactggaagcttcagctgctggcgcgcaggcgccaggaagaagctagcgtgcgcggccgtgagaaggccgaacgggaaagactcagccagatgcccgcatggaagaggggtctcctagaaagacgacgtgcaaagctcggcctgagccctggggagccaagtcctgtcctcggaactgtagaagctggcccaccagacccagatgagagtgccgtcctgctggaggccatcgggccagtacatcaaaatcgattcatacgtcaggagagacaacagcagcaacaacaacagcagcggtccgaagagcttctggccgagaggaagcctggtcccctggaagcacgggaacgtcgaccgagtcctggcgaaatgagagaccagtcacccaaaggacgcgagagccgcgaggaacggcttagccctcgcgaaacacgtgagcggcgattgggaattggaggggcccaagaactgtctcttagacccctggaggcacgagattggaggcagtcaccaggcgaagttggcgatcgctccagccgcttgagcgaagcctggaagtggcgcctgtcacccggcgagactcctgaaagatccctgcgactcgccgaatcccgcgagcagagcccaagaagaaaagaagtcgagagtagattgagccctggcgagtccgcctatcaaaagttgggcctgactgaggcgcacaaatggaggccagacagccgcgagtctcaggaacaatcccttgtgcaattggaggcgacggaatggaggctgaggagtggcgaagaacgccaggactactccgaagagtgtggaagaaaagaggaatggcccgtgccgggcgtcgccccaaaagagacggcagagcttagcgagaccctgacacgagaggctcagggaaactcatctgctggggtagaggccgccgaacagagacctgtcgaagacggtgagaggggcatgaaaccgaccgaaggatggaagtggacccttatcatgagtcttgcgggcaagggcaaccaacaccttgtgacgtgttttccccacccagtttccggcgggcgggctaattgccccattagtactctgatacaatccccatggtgcggttgggggtag

SEQ ID NO: 49930 - DNA, 1134 bp, Artificial Sequence
  derived and/or modified sequence
atggccacaatcccggactggaagctccagctgctggctagacgccgacaagaagaagcatccgtcaggggcagagaaaaggcagagcgcgaacggctctctcagatgccagcttggaaacgtggcctgttagaaaggcggagggcaaagctcggtttgagcccgggagaacctagccctgttttggggaccgtcgaggctgggcctccagatcctgacgaaagcgctgtcctcctggaggcaatcggccctgtgcaccagaacaggttcattaggcaggaaagacagcagcagcagcaacagcagcaaaggtcagaagagctgttggctgagcgtaagcccggcccccttgaggcgagagagagacgaccctcccctggcgaaatgagggaccaaagcccgaagggcagggagagcagagaggaaaggctgtccccacgcgagacccgtgaaaggcgactgggtattggtggcgcccaggagctctcattacgcccgctggaagctagggattggcgccagagtccaggcgaggtaggcgatcgcagctccagattatctgaggcctggaagtggcggctgtccccaggggaaacccccgagaggtctctgcggttagctgaaagcagagagcagagcccccgcaggaaagaggtcgagagcggtctctctccaggcgaaagtgcttatcaaaagctgggtctcactgaggcccacaagtggcgcccagacagcagagagtctcaagaacagtcattagtccagctagaagctacggaatggagactccgctccggggaggaacgccaggattatagcgaagagtgcggacgaaaggaggagtggccagtgccaggcgtggcccctaaagagacggctgaactaagcgaaaccttgaccagagaggcccagggaaattcctctgccggggtcgaggccgccgaacagcgccctgtggaagacggcgagagaggaatgaagccaacggaaggttggaagtggaccttaattatgtctctggccggaaaaggcaatcagcacctggtcacatgtttcccccacccagtgtccggcggcagggctaactgtcccattagcacactgattcagtcaccatggtgcgggtggggttag

SEQ ID NO: 49931 - DNA, 1842 bp, Artificial Sequence
  derived and/or modified sequence
atggccaccatcccagactggaagctgcagctgctggcccggcggcggcaggaggaggcctctgtgcggggccgggagaaggccgagcgggagcggctgagccagatgcctgcctggaagaggggcctgctggagaggagaagagccaagctgggcctgagccctggagagcccagccctgtgctgggcaccgtggaggccggccccccagaccctgatgaatctgctgtgctgctggaggccatcggccctgtgcaccagaaccgcttcatccggcaggagcggcagcagcagcagcagcagcagcagaggtctgaggagctgctggccgagaggaagccaggccccctggaggcccgggagcggcggcccagccctggagagatgagggaccagagccccaagggccgggagagccgggaggagcggctgagcccccgggagacccgggagcggcggctgggcatcggcggggcccaggagctgagcctgcggcccctggaggcccgggactggaggcagagccctggagaggtgggggacaggagcagccggctgtctgaggcctggaagtggaggctgagccctggagagaccccagagaggagcctgcggctggccgagagccgggagcagagccccaggaggaaggaggtggagagcggcctgagccctggagagagcgcctaccagaagctgggcctgacagaggcccacaagtggaggccagacagccgggagagccaggagcagagcctggtgcagctggaggccacagagtggaggctgcggtctggagaggagcggcaggactacagtgaagaatgtggcaggaaggaggagtggcctgtgcctggggtggcccccaaggagacagctgagctgtctgagaccctgacccgggaggcccagggcaacagcagcgctggggtggaggccgctgagcagaggcctgtggaggatggagagcggggcatgaagcccacagagggctggaagtggaccctgaacagcggcaaggcccgggagtggaccccccgggacatcgaggcccagacccagaagccagagcccccagagagcgctgagaagctgctggagagccctggggtggaggccggggagggggaggccgagaaggaggaggccggggcccagggccggcccctgcgggccctgcagaactgctgcagcgtgcccagccccctgcccccagaagatgctggcaccggcggcctgcggcagcaggaggaggaggccgtggagctgcagcccccacctccagcccccctgagccccccacctccagcccccacagccccccagcccccaggggaccccctgatgagccgcctcttctacggcgtgaaggccggccctggggtgggcgccccccggcgcagcggccacaccttcaccgtgaaccccaggagatctgtgcccccagccaccccagccacccccaccagccctgccaccgtggatgctgctgtgcctggagctgggaagaagcgctaccccacagctgaggagatcctggtgctgggcggctacctgcggctgagccgcagctgcctggccaagggcagccctgagcggcaccacaagcagctgaagatctccttcagcgagacagccctggagaccacctaccagtaccccagcgagagctctgtgctggaggagctgggccctgagcctgaggtgcccagcgcccccaaccccccagctgcccagccagatgatgaggaggatgaggaggagctgctgctgctgcagcctgagctgcagggcggcctgcggaccaaggccctgattgtggatgagagctgcagaagatag

SEQ ID NO: 49932 - DNA, 1842 bp, Artificial Sequence
  derived and/or modified sequence
atggccaccatcccagactggaagctgcagctgctggcccggcggcggcaggaggaggcctctgtgcggggccgggagaaggccgagcgggagcggctgagccagatgcctgcctggaagaggggcctgctggagaggagaagagccaagctgggcctgagccctggagagcccagccctgtgctgggcaccgtggaggccggccccccagaccctgatgaatctgctgtgctgctggaggccatcggccctgtgcaccagaaccgcttcatccggcaggagcggcagcagcagcagcagcagcagcagaggtctgaggagctgctggccgagaggaagccaggccccctggaggcccgggagcggcggcccagccctggagagatgagggaccagagccccaagggccgggagagccgggaggagcggctgagcccccgggagacccgggagcggcggctgggcatcggcggggcccaggagctgagcctgcggcccctggaggcccgggactggaggcagagccctggagaggtgggggacaggagcagccggctgtctgaggcctggaagtggaggctgagccctggagagaccccagagaggagcctgcggctggccgagagccgggagcagagccccaggaggaaggaggtggagagccggctgagccctggagagagcgcctaccagaagctgggcctgacagaggcccacaagtggaggccagacagccgggagagccaggagcagagcctggtgcagctggaggccacagagtggaggctgcggtctggagaggagcggcaggactacagtgaagaatgtggcaggaaggaggagtggcctgtgcctggggtggcccccaaggagacagctgagctgtctgagaccctgacccgggaggcccagggcaacagcagcgctggggtggaggccgctgagcagaggcctgtggaggatggagagcggggcatgaagcccacagagggctggaagtggaccctgaacagcaggaaggcccgggagtggaccccccgggacatcgaggcccagacccagaagccagagcccccagagagcgctgagaagctgctggagagccctggggtggaggccggggagggggaggccgagaaggaggaggccggggcccagggccggcccctgcgggccctgcagaactgctgcagcgtgcccagccccctgcccccagaagatgctggcaccggcggcctgcggcagcaggaggaggaggccgtggagctgcagcccccacctccagcccccctgagccccccacctccagcccccacagccccccagcccccaggggaccccctgatgagccgcctcttctacggcgtgaaggccggccctggggtgggcgccccccggcgcagcggccacaccttcaccgtgaaccccaggagatctgtgcccccagccaccccagccacccccaccagccctgccaccgtggatgctgctgtgcctggagctgggaagaagcgctaccccacagctgaggagatcctggtgctgggcggctacctgcggctgagccgcagctgcctggccaagggcagccctgagcggcaccacaagcagctgaagatctccttcagcgagacagccctggagaccacctaccagtaccccagcgagagctctgtgctggaggagctgggccctgagcctgaggtgcccagcgcccccaaccccccagctgcccagccagatgatgaggaggatgaggaggagctgctgctgctgcagcctgagctgcagggcggcctgcggaccaaggccctgattgtggatgagagctgcagaagatag

SEQ ID NO: 49933 - DNA, 1134 bp, Artificial Sequence
  derived and/or modified sequence
atggccaccatcccagactggaagctgcagctgctggcccggcggcggcaggaggaggcctctgtgcggggccgggagaaggccgagcgggagcggctgagccagatgcctgcctggaagaggggcctgctggagaggagaagagccaagctgggcctgagccctggagagcccagccctgtgctgggcaccgtggaggccggccccccagaccctgatgaatctgctgtgctgctggaggccatcggccctgtgcaccagaaccgcttcatccggcaggagcggcagcagcagcagcagcagcagcagaggtctgaggagctgctggccgagaggaagccaggccccctggaggcccgggagcggcggcccagccctggagagatgagggaccagagccccaagggccgggagagccgggaggagcggctgagcccccgggagacccgggagcggcggctgggcatcggcggggcccaggagctgagcctgcggcccctggaggcccgggactggaggcagagccctggagaggtgggggacaggagcagccggctgtctgaggcctggaagtggaggctgagccctggagagaccccagagaggagcctgcggctggccgagagccgggagcagagccccaggaggaaggaggtggagagcggcctgagccctggagagagcgcctaccagaagctgggcctgacagaggcccacaagtggaggccagacagccgggagagccaggagcagagcctggtgcagctggaggccacagagtggaggctgcggtctggagaggagcggcaggactacagtgaagaatgtggcaggaaggaggagtggcctgtgcctggggtggcccccaaggagacagctgagctgtctgagaccctgacccgggaggcccagggcaacagcagcgctggggtggaggccgctgagcagaggcctgtggaggatggagagcggggcatgaagcccacagagggctggaagtggaccctcatcatgagcctggccgggaaaggaaaccagcacctggtgacctgcttcccccaccctgtgtctgggggccgggccaactgccccatcagcaccctcatccagagcccctggtgtggctggggctag

SEQ ID NO: 49934 - DNA, 1842 bp, Artificial Sequence
  derived and/or modified sequence
atggccaccatccccgactggaagctgcagctgctggcccggcggcggcaagaggaagcctctgttcgcgggagggagaaggcggaaagggagcgtttgagccaaatgcctgcctggaaacggggcctgctcgagcggcgtcgtgcaaaactgggactctcacccggtgagccgtcacctgtccttggaactgtcgaggccgggccccccgaccctgatgaaagcgcggtgctgctggaggctatagggcccgtccaccagaatcggtttataaggcaggagcgacaacaacagcagcaacagcagcagagatccgaggaactgttggccgagagaaaacctggtccccttgaggcccgggagcgacgtccctcacctggggaaatgcgggatcagagccccaaaggccgggagtctagagaggaaaggctgtcgccccgggaaaccagggagagaagactcggtatcggaggagcacaggaactgtccctccgcccactcgaggccagagactggcgtcagagcccgggcgaggtgggggacaggtctagcaggctctccgaagcctggaaatggcgactatcccccggcgaaacaccggagcggagcttacggctggccgaaagccgggagcaatcgccacggagaaaggaggtggaatcaggtttatcgcctggagaatccgcataccagaagcttggactcacagaagcccacaaatggcgaccagatagtcgggagtcccaagaacagagtctggtccagctggaggccacggaatggagactgcggagcggggaagagcgccaggactattctgaagaatgtggaagaaaggaggagtggcctgtgccgggtgtggctcctaaggagactgcagaactgagcgaaacgctgacccgggaggcacaggggaacagctctgcaggcgtggaggctgctgagcagcgccccgtcgaagacggagaaagaggcatgaaacctaccgaaggctggaaatggaccctgaactccgggaaagcacgcgagtggaccccacgggacattgaagcccagacccagaagccggagcccccagagagtgccgagaagctactggagtctccaggcgtagaggcaggagagggggaggctgaaaaggaagaagcgggtgcacaagggagaccactgcgagctctccaaaactgctgttctgtaccgagcccacttcctcctgaagacgccggcactggcggtttaagacaacaggaggaggaggccgttgaactccagccacccccccctgcaccactgagcccaccacctcccgccccaacggcaccacagcctccgggtgacccactgatgtcaaggctcttctatggagtcaaagccggacctggggttggcgctcctcgcagaagtgggcacactttcaccgtgaaccctcggaggtcggttccgccggccacgcctgcaaccccaacctctcctgcgactgtagatgcagccgtgcccggcgctggaaagaaaagatatcccaccgcagaggaaatcctggtgctcggcggatatttaagattgagcagatcttgtctggcaaaagggtctccagaacgccaccataagcagttgaagattagcttctccgagactgcgcttgaaacaacttaccagtatccatccgaaagctccgtcctggaggagctcggccctgagcccgaagtgccgtccgccccaaatccaccagccgcccagccagacgatgaagaagacgaggaggaactattgctgctgcagcctgagctgcagggtgggcttcgaaccaaagctttgatcgtagacgagtcttgccgacgatag

SEQ ID NO: 49935 - DNA, 1842 bp, Artificial Sequence
  derived and/or modified sequence
atggccaccatccccgactggaagctgcagctgctggcccggcggaggcaggaggaagcgtccgtccgcggaagggaaaaggctgaaagggagaggctgagccagatgccagcttggaagaggggactgctggagcgccgacgagctaagcttggattaagccctggcgagccctctcctgttttaggcactgtggaagccggccctccggacccagatgagtccgcggtgctgctggaggcgatcggccctgtgcatcagaatagattcattcgccaggagcgacagcagcagcagcagcagcagcaacgttccgaagagttgctcgctgagagaaaaccagggccactcgaggcccgcgagcggcggccctcccccggagagatgagagatcagagtccaaaggggagggaatcccgggaagagagactatccccacgggagacccgggaaaggagactgggcatcggcggcgctcaggaactttccctccgtccgcttgaggctcgcgattggcgacaaagtcctggtgaggttggagataggtccagccggctgtccgaagcatggaagtggaggttgtccccgggggaaacccctgagaggtcactgcgccttgccgagtcccgagaacagtcccccaggcggaaagaggtggaaagcggcctgagtcccggcgagtccgcttaccaaaaattggggctcaccgaggcccacaagtggaggcccgactccagggagtctcaggagcagtctctcgtgcagcttgaggctaccgagtggcggttgcgcagcggtgaggagagacaggactattcagaggaatgcggccgtaaggaagagtggccggtcccgggggtggcacccaaagaaacggctgaattgtcagaaacgctgaccagggaggcccaaggtaactccagcgcaggggtagaggccgctgagcagagacccgtagaggatggagagaggggaatgaaaccgaccgaggggtggaagtggacactgaattccggcaaggcacgggaatggacccctcgcgacattgaagcccagacccaaaaaccagaaccccccgagagcgccgaaaagctcctggagtcccctggcgttgaggcgggagagggcgaggccgagaaagaagaagcgggggcgcaggggcgcccactccgagcattacaaaactgttgtagcgtgccatcccccctgccaccagaggatgccggcaccgggggcctgcgccagcaggaagaggaggctgtggaattgcagccaccgccacccgctcctctctctcctccgccacccgctccgacggccccgcagccgccaggtgacccactgatgagcaggctgttttatggtgtaaaagccggacctggagtgggggctccacggaggtctgggcacacgtttaccgtcaatcctcggaggtccgtcccccccgccactccagccacacctacatctcccgctaccgtcgacgcggctgtgccaggcgccggtaaaaagagatatcccacagccgaagaaatcctagttcttggagggtacctgcgattatcaaggagttgtcttgccaaggggtcacccgagcggcaccacaaacagcttaaaatttcttttagcgaaactgcgctggagacgacctatcagtacccctctgaatccagcgtgctggaagagctgggccctgagccggaagtgcccagcgctcctaacccaccagcagctcagcccgatgacgaagaggacgaggaggaactccttctgctgcagccagaactacagggaggcttgaggactaaggcacttattgtcgacgaatcctgccggcggtag

SEQ ID NO: 49936 - DNA, 1842 bp, Artificial Sequence
  derived and/or modified sequence
atggccaccatccccgactggaagctgcagctgctggcccggcggcgccaggaggaagccagtgttaggggtcgagaaaaagctgaaagagagcgcctgtctcagatgccagcatggaagagggggcttctggaacgcagaagagccaaactgggtcttagtccaggagaaccctcccccgtactaggtactgtggaggcagggcctcctgatccagacgagtcagctgtgctgttagaagccataggtcctgttcatcagaaccgctttatcaggcaggagcgccaacaacaacaacaacagcagcaacggtcagaggaattactagccgagcgcaaacctggaccactggaagctagggaacggaggccaagtcccggcgagatgcgtgaccagtctcctaagggaagagaatcaagggaagagcgcctgtccccaagggagacgagggagaggagacttggcattgggggcgcccaggagcttagcctgcgacctcttgaagcccgggactggaggcaatcaccaggtgaggtcggcgaccggtcatccaggctgtccgaggcttggaagtggcgcctgtcgcctggcgagactcctgaacgctccctgcgtctggcagagagtcgggagcagtccccaaggcggaaggaggtggagtcaaggctgagcccaggggagagcgcataccagaagctggggctgacagaagctcacaaatggaggccggattctagggaatcccaggaacagagcctggtccagttggaagccacagagtggcgcttaaggtccggagaggagaggcaagattactccgaggagtgcggtcgcaaggaggaatggcctgttcccggtgtcgcccctaaggagacagcagaactcagcgaaacactgaccagagaggcccagggtaatagcagcgccggtgtggaagccgcagagcaacgcccagtggaggatggggagcgaggcatgaaacccacagagggatggaaatggacactaaattccaggaaggctcgtgagtggactcctcgggacattgaagcccaaacccaaaagcccgagccacccgaatcagctgagaaactgttggaaagccccggcgttgaggcaggggagggcgaggccgagaaggaagaagctggggctcagggtcgacccctgagggccctgcagaactgttgcagcgtgcctagcccactccccccagaggatgccggcacgggggggctgcgccagcaagaggaggaggctgttgagctacaaccccctcctccagctccactttccccacccccccccgcccccactgccccacagccccctggcgacccgctgatgagcaggctgttttacggggtgaaggctggtcccggcgttggggctccgaggcggtctgggcatacatttacggtgaatccaaggcgctctgttcctcccgcaactcccgctacaccgacttccccagcaaccgtcgatgctgcagtgcccggggccggcaagaaaaggtatcccaccgccgaggagattctggtcctgggcggttacctccggctatctcgctcatgccttgctaagggatcaccagaacgccaccataaacagctgaaaatctcctttagtgaaacagctctggagaccacttaccaatatcctagcgaaagcagcgtcctggaggaactgggcccggagccagaggtccccagtgctcccaatccccctgcagcacagcccgatgatgaagaggatgaagaagagttacttctgcttcagcccgagcttcagggaggactgaggacaaaggccctgatcgtggacgagtcctgccggagatag

SEQ ID NO: 49937 - DNA, 1842 bp, Artificial Sequence
  derived and/or modified sequence
atggccaccatccccgactggaagctgcagctgctggcccggcggcggcaggaggaagcatccgtccgaggcagagaaaaggctgagagagagcgcctctctcaaatgccagcttggaaaaggggtctcctcgagcggagaagagccaagctcgggctgtctcccggcgaaccgagcccagtattgggaaccgtagaagccggtccacctgacccagacgagagtgcagtcttgctagaggccatcggccccgtgcatcagaatagattcattcgacaggagaggcagcaacaacaacagcagcagcagaggtctgaggaactgctagcggaaaggaaaccggggcccctagaggcccgggaacgcagaccttcccctggcgaaatgagggaccaaagtccaaaagggagggaaagtagagaggaacgcctgagtccacgagaaacaagagagcggaggctggggatcggcggtgcccaggagctttctctccggcctctggaggcccgtgattggaggcagagcccaggggaggtcggggatcgctcatcacgattaagtgaggcctggaaatggcggctgagcccaggagagactcccgagcgctctctgcgccttgccgagtcacgtgaacagtcccctaggagaaaagaagttgagtcacgcttgagtcctggcgaaagtgcctatcaaaagcttgggctgaccgaggcccacaagtggcgccccgactcgcgcgaaagccaggaacaaagtctggtgcagctggaagcgacagagtggaggttgcggagtggagaggagcggcaggattactcagaggagtgtggacgcaaagaagaatggcccgtccccggggtggcccccaaggaaacggctgaactctcggaaaccctgacaagggaggctcaaggaaactcttctgccggggtggaggctgccgagcagcggcctgttgaggacggggaaaggggcatgaaacccactgaagggtggaaatggaccttaaattcacggaaggcgcgcgagtggacccctagagacatcgaagcccagacacaaaagcccgaaccccctgagtccgcggagaagctgctggagtcaccaggagttgaagcgggagagggagaggccgagaaagaggaggcaggagctcaaggtcggcctctcagggcgcttcagaattgctgtagtgtgcctagtcctctgccccccgaagacgccggcaccggcggtctgaggcagcaggaggaggaggctgtcgagttacaacctcccccgccggctccactgagcccgcccccaccggccccaaccgccccacagcctccaggggatcctctgatgtctaggctcttctatggagtcaaagccggaccaggagttggggccccgcgccgctcaggccacacttttactgtgaacccaaggcgcagcgtccccccagctactccggcaacccccacatccccggcgacggtggatgcggctgttcccggggccgggaagaagcgttaccccaccgcagaggaaatcttagttctgggaggatatcttagacttagcaggtcctgtctggcaaaggggagccccgaaagacaccataagcagcttaaaatttccttctctgaaacggctctggaaactacttaccagtaccctagcgaatcctcggtgctggaggagttgggcccggagcctgaagtcccttccgctcctaacccccccgccgcacaaccggatgacgaggaggacgaggaagagctcctgctgctacagccagaactgcaaggagggctgagaacgaaagctcttatcgtggacgagagttgccggagatag

SEQ ID NO: 49938 - DNA, 1134 bp, Artificial Sequence
  derived and/or modified sequence
atggccaccatccccgactggaagctgcagctgctggcccggcggagacaggaagaagcctctgtccgaggccgggagaaagctgagcgggagcgactctctcagatgcctgcctggaaacgggggctgctggagaggcgcagggctaagttaggactgtctcccggggagccctcccccgtgctcggaactgtggaagccggtcctccagatccggatgaaagcgctgtgctgctggaagccatcggaccagttcatcaaaaccggtttatcagacaggaaaggcagcagcagcaacaacagcagcaaagatcagaggaactgctggccgaaaggaagcctggaccactggaagccagggaaaggagacctagccctggcgaaatgcgcgatcagtccccgaagggtcgggaatcgagggaggagagactgagccctagagagacgcgagaacgaaggctgggaattggaggggctcaggagttgtccttacgtcctttggaggcccgtgactggcgccagtctccaggggaagttggagatagaagtagccgactttctgaagcatggaagtggcggctttcgcccggcgagactcccgagcgttcgctgaggctcgctgagtcacgtgagcaaagtccccggaggaaggaggttgagtcccgcctgtctcctggcgagtctgcttatcagaagctcggactcacagaggctcacaagtggcggcctgacagccgggagtcacaggaacaaagtcttgtccaattagaggccaccgagtggcggctgcgaagtggagaggagcggcaggactacagtgaggagtgcggacggaaagaggagtggccagtgcctggcgttgccccgaaagagaccgccgaactgagtgagacactgactcgggaggcacaaggtaactcatcagctggagtcgaggctgcagaacagcgacccgtggaggacggcgaacgaggtatgaagcccactgaaggctggaagtggacgctgatcatgagcctcgccggcaaggggaaccagcacctcgttacatgctttcctcaccccgtctcaggaggtagggctaactgtcccatcagtacccttatacagtcaccatggtgtggctggggctag

SEQ ID NO: 49939 - DNA, 1134 bp, Artificial Sequence
  derived and/or modified sequence
atggccaccatccccgactggaagctgcagctgctggcccggcggcggcaagaagaggctagcgtacggggcagagagaaggccgaacgggaaagactatcccagatgcctgcctggaagagaggtctccttgagcgtaggcgggctaaactgggcctaagccctggtgaaccctctccagttctgggaacagtggaagcgggtcctccagaccccgacgagtcggcagttcttctcgaggctatcggtcccgtccaccaaaatcggttcattcgccaggaacgccagcagcagcagcagcaacagcagaggagcgaagaactgctggcagaacgaaagcctggacctctcgaggccagagaacgccggccatctcccggcgagatgagggatcaatcccccaagggcagagaatcaagggaggagcggctgagccctagagagaccagagaaaggcggttgggcataggaggcgcacaagaattgtcattaagaccactggaagcgagagattggaggcaatcccctggtgaggtgggcgaccgttcttcacgcctgtctgaggcttggaagtggcgcctgtctcctggagagacccccgaaagaagcctgaggctggctgagtcccgcgagcagtccccacgtagaaaagaggtcgagtccggactgagtccaggcgagagtgcataccagaagctggggcttacagaagcccataagtggagacctgatagcagggaatcccaggagcaatccctcgtgcagttagaggctacagaatggcgtctgcgatccggggaggaaaggcaagattacagcgaggaatgcggtcggaaggaagaatggccagttcccggtgtagccccaaaggagactgcagaactctccgagaccttgactagggaagctcagggcaactcctccgccggtgttgaggccgctgaacagcgtcctgtggaggatggcgaaagaggcatgaaaccaacagaggggtggaaatggaccctgatcatgagcctcgcgggcaagggaaaccagcatttagtgacctgctttccccacccagtcagcggaggtagagccaattgccccatcagcactctgatacagtctccctggtgcggttggggttag

SEQ ID NO: 49940 - DNA, 1842 bp, Artificial Sequence
  derived and/or modified sequence
atggctacgattccagactggaagctccagctcttggcccgtcggcgacaggaggaagcctctgtccgagggcgagagaaagcggagcgcgagcgtctcagtcagatgcctgcctggaagagaggattattggagagacgtagagcaaagctggggctgagccccggtgagccttctccagtactgggcactgttgaagcaggcccacccgaccctgatgagtccgccgtgctcttagaagccattgggccagtgcaccagaacagatttattcgtcaagagcggcagcaacagcagcagcagcagcagaggagcgaagagctcctagcggaacgaaaaccagggccactggaggcacgcgaacgcagaccctcccccggagagatgagggatcagagccccaaagggagggagagccgagaggaacgcttatcccccagggaaactcgagaacgaagactgggtatcggcggtgcacaggaactgtccttgagacctctggaagctcgcgactggcgtcagtcacctggagaagtcggggatcgcagcagccgcctgtcagaagcttggaagtggcgcctctcacctggagagaccccagaaaggagccttagactggcggaaagtagagaacagtcacccaggcgcaaagaggtcgagtcgggccttagtcccggtgagagcgcgtaccagaagctaggcctgaccgaagcacacaaatggcggcctgacagtcgcgaatctcaagaacagtcactggtccaactggaggccacagaatggcgactgagaagcggagaggaacggcaggactatagcgaagagtgcggcaggaaggaggagtggcccgtccctggcgtggcgccaaaagaaactgcagagctatcagagaccctcacaagggaagcacagggtaactctagtgcgggtgtcgaggccgcagaacagaggccggtagaagatggtgagagagggatgaagcccacagaggggtggaaatggacgctgaatagcggcaaagccagggagtggacgccaagggatattgaggcccagactcaaaaaccagagcccccagagtcagcagagaagttgcttgagtcccccggagtagaggcaggggagggcgaggccgagaaagaggaggcaggcgctcaggggagacctcttagagccttacagaactgctgttcggtgccctctccattaccccctgaagatgccggtacagggggactgcgccagcaggaagaagaggccgtggaactgcagccacctccgcctgctccattgagcccccctccaccggcacctaccgccccacagcccccaggagatcccttgatgtctagactcttttacggcgtgaaggcaggtcctggcgtgggggcacctcggaggtcagggcataccttcacagtgaatcccagaagatcagtgcctcccgcaacccctgccacaccaacctcccctgcgaccgtggatgccgcagtccctggagcagggaaaaaaagataccctactgccgaggaaatactggtcctgggcggatatctgcgcttaagccggagctgtttggcaaagggctcccctgaacggcaccacaagcaactgaagattagcttcagtgagacagccctggaaaccacctaccaatacccgagtgagagttccgtgctcgaggaactgggccctgaaccagaagtgccttccgcacccaatccaccagccgcacagcccgacgacgaggaagacgaagaagaactcctcctgttgcagcctgagcttcagggagggctgagaaccaaggccctgatagtggacgagtcatgcagacgatag

SEQ ID NO: 49941 - DNA, 1842 bp, Artificial Sequence
  derived and/or modified sequence
atggccaccatccctgactggaaactgcaactgctggccaggcggcgacaagaggaagcgtctgtgagaggccgagagaaggccgagcgcgaaaggctaagccagatgcccgcttggaaaaggggcttgctagaaagaagacgggctaagctaggcctttcgcccggagagccgtcccccgtgttagggacagtcgaggcgggtccccctgatccagatgaaagcgccgttctcctcgaggccatcggtccagtgcatcaaaatagattcatcagacaagaaagacaacagcaacagcagcagcagcagaggtcagaggagcttttagctgaacgcaaacccggacctctcgaggcccgtgagagacgtcccagtcctggcgagatgcgggaccagtcacccaaggggcgagagtcccgggaggagagactgagtccacgcgaaacacgtgagcgacgtctggggatcggaggtgcccaggagctgagtctgcggccactggaggcaagagattggagacagtcaccaggagaggtgggtgaccgatcctcccggctgtccgaagcatggaaatggagattatcacccggtgagactcccgagaggtcattacgcttggccgagtcccgtgagcagagcccccgtaggaaagaagtggagagcggcctctcccccggagaatctgcctatcagaaactgggactgactgaagctcacaagtggcgacctgactctagggagtcccaggagcagtctttggtccagctcgaggccaccgagtggaggctccggtctggggaagaacgtcaagactattcagaggagtgtggccgtaaggaggagtggcccgtgcctggagtggcccctaaagaaacagcagaattgtccgagactctcactagagaagcacagggcaatagttctgctggggtggaagcggctgagcagcggccagtggaggacggtgaaagggggatgaagcccaccgagggatggaagtggaccctgaatagcgggaaggcccgtgagtggacgccgagggacatcgaggctcagacacaaaaacccgaacctcccgaatcagccgagaagctgctagagtctcccggtgtggaggctggtgaaggtgaggctgaaaaggaagaggcaggcgcacaggggcgacctctgagagctctccaaaactgctgcagtgtgccttcgcccctcccccctgaggacgcagggacggggggtttaagacagcaagaagaagaggctgttgagctgcagccaccgccaccagctccacttagcccgcctccccctgcacccaccgcccctcagcccccaggtgaccccctcatgagccgtctattttatggggttaaagctggcccaggagtcggcgctcctcgcaggagcggacacacattcacggttaatcctcggaggagcgttccccctgcaacgccggctactccaacctcccccgcaaccgtcgacgccgcagtcccgggtgctggcaagaagcgataccctacggccgaggaaatactggttttgggcggttatctacggctgtccaggtcatgtctcgcaaagggttcacctgagcgccatcataagcaactgaagatttcctttagcgaaacagccctggagactacatatcaatacccgtctgagtcctcggtgctggaggagttaggccctgaaccagaagttcccagtgctcctaatccaccagccgcacagcccgacgatgaagaagatgaagaggagctgctgctcctgcagcctgagctccaaggcggtttgaggacgaaagctcttatcgtggacgagagttgcagacggtag

SEQ ID NO: 49942 - DNA, 1842 bp, Artificial Sequence
  derived and/or modified sequence
atggctacgataccggattggaaactgcagcttttggctaggcgtcggcaagaggaggcttcagtaagaggtagggaaaaagccgagagagagagattaagccagatgcctgcatggaagcgaggcctcctggagagaaggcgagcgaagctggggctgagtccaggtgagccgtctcctgtgttggggactgtcgaagcaggccctccagaccccgacgagtccgcagtcctccttgaagccattggccctgtccaccagaataggttcattagacaggagaggcaacagcagcaacagcaacagcaacggagcgaagagctcttggccgagaggaaacccggacctctggaagctcgtgaaagacgccctagccccggagaaatgcgtgaccagtcccccaaaggtagagaaagccgggaggaacggctctcacctcgggagacccgcgagagacgactgggcatcggaggagcacaggaactgagtctgcgccctctcgaagcgagagactggcgccaaagtccaggtgaggtcggggatagaagctcaaggctgtctgaagcttggaagtggcggctatctcccggtgagaccccggagagatctctcaggctggcagaaagccgagagcaaagcccaagacggaaagaggtcgaatcccgcttatcacccggagagtccgcttatcagaagctcgggctgacggaagcccacaaatggaggcctgatagccgggagagccaggaacagagtctggtgcagctagaagctaccgagtggagactgcggagtggagaagagcgccaggattatagcgaagagtgcgggcgaaaagaggaatggcccgtaccaggagtggctccaaaagaaaccgccgagctttcagagaccctcactagggaagcacagggaaattccagtgcaggcgtggaggcagcagagcagcgtccagtcgaagatggcgaaagaggtatgaaacctacagagggttggaagtggactctgaatagtagaaaagccagggagtggacccctagggatatcgaagctcagacacagaaaccagaaccaccagagtcagccgaaaagctcctggagagcccaggtgtggaagccggagagggagaggctgagaaagaggaggccggagcccaggggagaccactgagggccctccaaaactgctgttctgtgccttctccgcttccacccgaagacgcaggcacgggaggactccgccaacaggaggaggaagccgtggaactgcagcctccgcctccagcaccccttagccccccacctcctgcccctacagccccacagccccctggggatcccctcatgtcccgcctgttctacggggtcaaggcaggcccaggagtgggagcccctcgccgaagtggacatacttttacggtgaacccgagaaggagtgtccccccagccacccctgctacacctacgagtccagccaccgtggacgccgcagtgcctggagctggtaagaaaaggtacccgactgcagaggagatcttagtgctggggggttacctccgcctctctagaagctgcctggctaaaggaagtcccgagaggcaccacaagcagttgaagatcagcttttcagaaaccgccctggagacgacctaccagtatccctccgagagcagcgtgctagaagagctgggtcccgagccagaggttccctctgctccaaacccacctgccgcacagcccgacgatgaagaagacgaagaggaactgctcctgctacagccggaactgcagggcggactccggacaaaagccctgattgtcgacgagtcttgtaggcgatag

SEQ ID NO: 49943 - DNA, 1842 bp, Artificial Sequence
  derived and/or modified sequence
atggctacaatcccggactggaaactccagcttctggcacgaaggcggcaagaggaagcgtccgtacgaggcagagagaaggcggaacgcgagaggctgagccagatgcccgcatggaagagggggcttttagagaggcgccgagcaaagctcggcttgagccctggcgagccctctcccgtgctaggcacagtggaagcaggtcctcccgatcccgacgagtctgcagttcttctcgaagctattgggcctgtgcatcagaaccggttcatcagacaggagcgccaacagcagcagcaacaacaacagaggagcgaagaacttctggctgagaggaagcctggccctcttgaagcccgagagcgaaggcctagccccggagagatgagggaccaatctccgaaaggacgggaatctagggaagaacgtctctctccacgcgaaacaagggaacgtcgactgggcatcgggggtgcccaagagttaagcctccgccctctggaggcacgggactggaggcagtctcctggcgaggttggggaccggtcttcccgccttagtgaggcgtggaaatggaggttgagccctggagaaacccctgaaaggagcttgcgcttggcagagtcccgcgagcagagccccaggcgcaaagaagtcgaaagcagactctctcctggtgaatccgcgtaccaaaagctcggactgactgaggcccataagtggcggccagattccagggagtcacaggaacagtccctcgtccaactggaggctacggagtggaggttgaggtcaggagaggagcggcaggactatagcgaggaatgcggtcggaaagaggaatggccagttccgggagtggcccctaaagaaacggctgagttgtccgagaccctcacaagggaagctcaggggaattcctctgctggcgtggaagcggcagaacagcggcctgtggaggatggggaaagaggaatgaaacccacagaaggctggaaatggactctgaactcccgcaaggccagagagtggacaccaagagacattgaggcgcagacgcagaagcccgaacctcctgagagtgctgaaaaactcctggagagcccaggcgtcgaagccggagagggcgaggccgagaaagaagaagcgggagcccaagggagacctctgagggccctccaaaattgctgttccgtcccaagccccttgccccctgaggatgcaggaacggggggtcttcggcagcaggaggaagaggccgtggagttacagccccctcctccagctcccctgtcaccccctcccccagccccaacagctccccaacccccaggggatccactcatgagccgtctgttctacggggtgaaagctgggccaggggtcggagccccacgacggagcggccacactttcaccgtaaacccaaggcgtagcgtgccaccagccacccccgcaacccccacttccccagccacggttgacgccgcagttccaggtgctggcaagaaaagatatcccactgctgaggagatcttagtgctgggaggttatctccggctttcaagatcctgtctcgctaaagggtccccggagaggcaccataaacaactcaagatctctttttctgagactgccctggaaactacttaccagtacccctccgaatcatctgtgttagaagagcttgggcctgaacccgaagtcccctcagcaccgaacccacccgctgcccaacccgacgacgaggaggatgaggaagagctgttgctgttacagcctgagctgcagggtggcctgagaactaaggctctcatcgtggacgaaagttgtaggcggtag

SEQ ID NO: 49944 - DNA, 1134 bp, Artificial Sequence
  derived and/or modified sequence
atggcaacaatccctgactggaagctccagcttctggccagaagacggcaggaagaggccagcgtgcgcggacgggaaaaagcagagagggaacgcctgagccagatgcctgcgtggaaaaggggacttctagagcggagacgggcaaagctgggattatctcccggagagccgagcccagtgctgggaactgtggaggccggtccacctgaccccgatgaaagcgctgtactcctggaggccatcggcccagtgcaccaaaaccggttcattcgacaggaacggcagcagcaacagcaacagcagcaacgctccgaagagcttctggcagagcgtaaacccggacctctcgaggctcgggaacggaggcctagcccgggtgagatgcgcgatcagtcgccaaaaggcagagagtctcgagaggaaagactgtctcccagggagacccgagaacgtaggcttgggatcgggggtgctcaggaactgtctctgaggcccctggaagcacgcgactggcgccagagccccggtgaggtgggcgaccggtcctctcggctctccgaggcttggaagtggcggctctccccaggcgaaaccccagaacgatcactacgcctggctgagtctagggaacagtctccccgacggaaagaggttgaatcaaggctttctccaggggaatcagcttatcagaagctagggctgactgaagcccataagtggcggcctgatagcagggagtcccaggaacagagcctagtccaactggaggcgactgaatggcgactgaggtcaggcgaagagcgacaggactactctgaagagtgcggccgaaaggaggaatggccagtacccggtgttgctcctaaagaaacagccgagctttcagagacattgacccgcgaggcgcagggcaatagctctgctggggtagaggctgcagagcagaggcctgtggaggatggcgaacgcggtatgaagcccactgaaggttggaagtggacattgatcatgagtttggctggcaaaggcaaccaacacctcgttacgtgttttccgcacccagtctcgggtggtagggctaattgtccaattagcacccttatacaaagtccttggtgcggctggggatag

SEQ ID NO: 49945 - DNA, 1134 bp, Artificial Sequence
  derived and/or modified sequence
atggcaacaatccctgattggaagctgcagttgcttgcgcgtcgcagacaggaagaagctagcgtacggggaagggagaaagccgaacgagagcggctgtcgcagatgccagcttggaagcgagggttactcgaacggcgaagggccaaactggggctgtcaccgggagaaccttctcctgttctgggcaccgtggaggcagggccaccagatcccgacgagtctgcagtgctgttagaggcaattgggcctgtgcaccagaacagatttattaggcaagagagacagcagcaacaacaacagcagcaacgcagtgaggagctgctggcagagagaaaaccaggtccactggaggccagggaacgcagaccctccccgggagagatgcgggaccagtctcccaaaggcagggagtctcgggaggagcgtctttcacccagggagacgcgagagagacggctcggtattgggggtgcccaggaactgtctctccgccctttagaggccagggactggcgccagtcccccggagaagtgggcgacagatcttcaagattatctgaggcttggaagtggcgcttgtcccccggagagacacctgagaggtcacttaggttggccgaatctcgagagcagtctcctcgcaggaaagaggtggaaagcggattgtcgcccggagagagcgcttaccagaaactggggctgacagaagctcacaaatggaggccagattcaagagaatcacaggagcaaagccttgttcagctggaggccactgagtggcggctcaggagcggagaggaaagacaagactacagtgaagagtgcgggcgaaaagaggagtggccggttcccggagtggcgcctaaggagacagccgaactcagcgaaacactgacacgcgaagcacaggggaactcctcagcaggcgtggaggctgccgagcaacggcctgtggaagatggagagcgtggaatgaagccaactgaaggatggaaatggacactcataatgagcctcgcaggaaaggggaaccaacacctggtcacctgcttcccccatccagtctctggcggaagggctaactgccctatctccactttgatacagagcccttggtgtggatgggggtag

SEQ ID NO: 49946 - DNA, 2853 bp, Artificial Sequence
  derived and/or modified sequence
cctccctccagtctccggatctccctcggtccctctctcctcctcttcctctctctggacgcccggctcctccgcaccccctcccccgggggtcccgcggccttgctccctaccctcacctcaagacgaccatggccaccatcccagactggaagctacagctgctagcccggcgccggcaggaggaggcgtccgttcgaggccgagagaaagcagaacgggagcgcctgtcccagatgccagcctggaaacgagggctcctggagcgccgccgggccaagcttgggctgtcccctggggagcctagccctgtgctagggactgtagaggctggacctccagacccggatgagtctgcggtccttctggaggccatcgggccagtgcaccagaaccgattcatccggcaggagcggcagcagcagcagcagcaacaacaacggagtgaagagctgctagcagagagaaagcctgggcctctggaggcccgggagcggagacccagccctggggagatgcgggatcagagccccaagggaagagagtcaagagaagagagactaagtccgagggagaccagagagaggaggctggggatagggggagcccaagagttgagcctgaggcctctggaggctcgggactggaggcaaagcccaggagaggtgggagacaggagctcccgactgtcagaggcatggaaatggaggctgagtcctggagaaactccagagcggagtctgagactagcagagtctcgagagcaaagccccaggagaaaagaggtggaaagtggactgagcccaggggaatctgcctaccagaagttgggcctgacagaggcccataaatggagacctgactccagagagtctcaggaacagagtttggtacaactggaggcaacagagtggaggctgaggtcaggagaagaaagacaagactactcggaagaatgtgggagaaaagaagagtggccagttccaggggtagctccaaaagagactgcagagctgtccgagaccctgacaagggaggcccaaggcaacagttccgcaggagtggaggcagcagagcagaggcctgtggaagatggcgagaggggcatgaagccaacagaagggtggaaatggaccctgaactccgggaaggctcgagaatggacacccagggacatagaggctcaaactcagaaaccagaacctccagagtcagcagagaagcttctggaatctcccggtgtggaggctggagaaggggaggctgagaaggaggaggcgggggctcagggcaggcctctgagagccctgcagaactgctgctctgtgccctcccccctcccaccagaggacgctgggactggaggcctgagacagcaggaagaggaagcagtggagctccagcccccaccaccagcccctctgtctcccccacccccagccccaactgccccccaacctcctggggatcccctcatgagccgcctgttctatggggtgaaggcagggccaggggtgggggccccccgccgcagtggacacaccttcaccgtcaacccccggcggtctgtgccccctgcgaccccagccaccccaacctctccagccacagttgatgctgcagtcccgggggctgggaagaagcggtacccaactgccgaggagatcttggttctggggggctacctccgtctcagccgcagctgccttgccaaggggtcccccgaaagacaccacaaacagcttaagatctccttcagcgagacagccctggagaccacgtaccaatacccctccgagagttcggtactggaggagctgggcccggagcctgaggtccccagtgcccccaaccctccagcagcccaacccgacgacgaagaggatgaggaagagctgctgctgctgcagccagagctccagggcgggctgcgcaccaaggccctgattgtggatgagtcctgccggcggtgaccatcttccaacatagggatatacctccctccttcttataactgaagatcctggagcccggaagattcagggcagacagaccctgataatgagcctggcagggaagggcaaccaacatcttgtaacttgctttccccaccctgtttctgggggcagagccaattgcccaatttctaccctaatccaaagtccctggtgtgggtggggttaaacgtgctggtgcatcctaggtcatccaagagtgagcgccaagtcctgagaaggggcacagaactccctggagggtggagatggagcacctgccccccatggcagggtacactctccccacagccttcctccccaccatcccgtggggactctcgggatttaagcactcgtctctctgggaggcccagaccccactccatttataggcacatctccttcatttcctaggtcactgcccctttgtttacagctcctgcctcctcccttgaccacagcctggtttacaaattccatcagctcccagccccacctgccaaagtcccaggtttacaagccacgcttacttgctgtgtctgcgtggaattctctcctctgtcccctccagtctcctcattggagtgacctgaaggtgtggcttcctccactttttctcagtattactttgccttagttttccccaagagggaaggctggaactcttaactctgtaccccttgatagttatttaattctgtttctcctagtggttcacaattgaactgaattgagatggtgtcgggtggctaaggagacacctcacctctccttccccattgtgccgcctttatcaattgcctgttttgttttgtttgttttttaactttccataataaaatggagttctcttcaa

SEQ ID NO: 49947 - DNA, 4599 bp, Artificial Sequence
  derived and/or modified sequence
actttgccagagcggccgggtccccattcccattccttcaaatcccctttttcccggcagccgacctgtagacccaagggagacaggttgaagctagaaagagtcggggcagcagctctggtaggggagggagcatccaaaacctctggcttctgagcgcctctcctgccgcccatccacaaagccccccacagcctggcggctgccctcgaccccgcaaaacaaaggacttcagaggctggacctacagacccagatgagaaggcaaaagcgtagggaggagcggcaggagatgggaagggcgggccccgctcggagcagctgccgcttcctcccaaagtcccacgaggggcctgagtcacgggccaccgccctgggtcggcgagctgggggaagggatctggacacctggcgtgtccgggcgggaagctggtgagggcccctggggacagagcggaggaccagtggttggggcgagaagagggcagtcccgcagcgagtcccacgcggggtgggagggatctaggccccgccctctcctcggctccgccctgcgcccccttccctctcctcattgtccttagacaaagcggtcgccgcccccgcccggccccctggtctctgtctccgtccctcctcctttgctgcctctttccctcctcctctccctccctcctcccctccctccagtctccggatctccctcggtccctctctcctcctcttcctctctctggacgcccggctcctccgcaccccctcccccgggggtcccgcggcctgtgagttgactgaggggctcagacttggggagtgggtgtctcctcgcccctgtccttgctcccgtccctggcccggaccttggctgtctcctctttgtgccgagattgtcagtctgtgcggctacagcggggtggagacggccggctctgtcacggcttcatgagagcggggacggggcgcaggacttgcaggcgccggggagaagagacatggagccggcccttggcactctggggtcgcgtggggcagtcggtgggggaggcaggcggtggtgacaggacagggtgggggtggacgccagggttctgggaacgcgctggcagccctgacgcccgggttccgaaagtctcgggggtgggtatttcccccgacccgcctcgggggcggagtgcggggcagaggggtgggggctggggagaggcgtggcccgagcggtgctggaagcggagccgggacctttggggcccgcgctgagacgcgcccggctgctgccgccgccctcctttcccctcttccctggtttcccttctcctctagacctgttcgctctccgcccctccttgcctccccaacaccccctcaggtcccgttgcctcctggtcctttcagggattcctggtccttccttcccacactagcctccctggggtatcgctgaggcagcctggcctgcacccaggttcccctcacccctgccacatttctctcttctccctcacgccaactttccttttcgcccttctctctctttctcacatcctagagacggtctttaatacgcattaaccctgtgctgccacatctggctcctgccctcattgcctccaatccggactcttcctctcacatcacccccaccacccccaacttgggctcacaacttctcttcactttttccatttccccagttctctgccttccgtctttccctctgtcctcatccttagcccctctgccctgctttgtgtcccacctctccccctccacttcctctcctcccaccctcagtctcacccccgggctgtctcactctctggagcctctccttcctgttctctgtccccagtgctccctaccctcacctcaagacgaccatggccaccatcccagactggaagctacagctgctagcccggcgccggcaggaggaggcgtccgttcgaggccgagagaaagcagaacgggagcgcctgtcccagatgccagcctggaaacgagggctcctggagcgccgccgggccaagcttgggctgtcccctggggagcctagccctgtgctagggactgtagaggctggacctccagacccggatgagtctgcggtccttctggaggccatcgggccagtgcaccagaaccgattcatccggcaggagcggcagcagcagcagcagcaacaacaacggagtgaagagctgctagcagagagaaagcctgggcctctggaggcccgggagcggagacccagccctggggagatgcgggatcagagccccaagggaagagagtcaagagaagagagactaagtccgagggagaccagagagaggaggctggggatagggggagcccaagagttgagcctgaggcctctggaggctcgggactggaggcaaagcccaggagaggtgggagacaggagctcccgactgtcagaggcatggaaatggaggctgagtcctggagaaactccagagcggagtctgagactagcagagtctcgagagcaaagccccaggagaaaagaggtggaaagtggactgagcccaggggaatctgcctaccagaagttgggcctgacagaggcccataaatggagacctgactccagagagtctcaggaacagagtttggtacaactggaggcaacagagtggaggctgaggtcaggagaagaaagacaagactactcggaagaatgtgggagaaaagaagagtggccagttccaggggtagctccaaaagagactgcagagctgtccgagaccctgacaagggaggcccaaggcaacagttccgcaggagtggaggcagcagagcagaggcctgtggaagatggcgagaggggcatgaagccaacagaagggtggaaatggaccctgaactccgggaaggctcgagaatggacacccagggacatagaggctcaaactcagaaaccagaacctccagagtcagcagagaagcttctggaatctcccggtgtggaggctggagaaggggaggctgagaaggaggaggcgggggctcagggcaggcctctgagagccctgcagaactgctgctctgtgccctcccccctcccaccagaggacgctgggactggaggcctgagacagcaggaagaggaagcagtggagctccagcccccaccaccagcccctctgtctcccccacccccagccccaactgccccccaacctcctggggatcccctcatgagccgcctgttctatggggtgaaggcagggccaggggtgggggccccccgccgcagtggacacaccttcaccgtcaacccccggcggtctgtgccccctgcgaccccagccaccccaacctctccagccacagttgatgctgcagtcccgggggctgggaagaagcggtacccaactgccgaggagatcttggttctggggggctacctccgtctcagccgcagctgccttgccaaggggtcccccgaaagacaccacaaacagcttaagatctccttcagcgagacagccctggagaccacgtaccaatacccctccgagagttcggtactggaggagctgggcccggagcctgaggtccccagtgcccccaaccctccagcagcccaacccgacgacgaagaggatgaggaagagctgctgctgctgcagccagagctccagggcgggctgcgcaccaaggccctgattgtggatgagtcctgccggcggtgaccatcttccaacatagggatatacctccctccttcttataactgaagatcctggagcccggaagattcagggcagacagaccctgataatgagcctggcagggaagggcaaccaacatcttgtaacttgctttccccaccctgtttctgggggcagagccaattgcccaatttctaccctaatccaaagtccctggtgtgggtggggttaaacgtgctggtgcatcctaggtcatccaagagtgagcgccaagtcctgagaaggggcacagaactccctggagggtggagatggagcacctgccccccatggcagggtacactctccccacagccttcctccccaccatcccgtggggactctcgggatttaagcactcgtctctctgggaggcccagaccccactccatttataggcacatctccttcatttcctaggtcactgcccctttgtttacagctcctgcctcctcccttgaccacagcctggtttacaaattccatcagctcccagccccacctgccaaagtcccaggtttacaagccacgcttacttgctgtgtctgcgtggaattctctcctctgtcccctccagtctcctcattggagtgacctgaaggtgtggcttcctccactttttctcagtattactttgccttagttttccccaagagggaaggctggaactcttaactctgtaccccttgatagttatttaattctgtttctcctagtggttcacaattgaactgaattgagatggtgtcgggtggctaaggagacacctcacctctccttccccattgtgccgcctttatcaattgcctgttttgttttgtttgttttttaactttccataataaaatggagttctcttcaa

SEQ ID NO: 49948 - DNA, 4599 bp, Artificial Sequence
  derived and/or modified sequence
actttgccagagcggccgggtccccattcccattccttcaaatcccctttttcccggcagccgacctgtagacccaagggagacaggttgaagctagaaagagtcggggcagcagctctggtaggggagggagcatccaaaacctctggcttctgagcgcctctcctgccgcccatccacaaagccccccacagcctggcggctgccctcgaccccgcaaaacaaaggacttcagaggctggacctacagacccagatgagaaggcaaaagcgtagggaggagcggcaggagatgggaagggcgggccccgctcggagcagctgccgcttcctcccaaagtcccacgaggggcctgagtcacgggccaccgccctgggtcggcgagctgggggaagggatctggacacctggcgtgtccgggcgggaagctggtgagggcccctggggacagagcggaggaccagtggttggggcgagaagagggcagtcccgcagcgagtcccacgcggggtgggagggatctaggccccgccctctcctcggctccgccctgcgcccccttccctctcctcattgtccttagacaaagcggtcgccgcccccgcccggccccctggtctctgtctccgtccctcctcctttgctgcctctttccctcctcctctccctccctcctcccctccctccagtctccggatctccctcggtccctctctcctcctcttcctctctctggacgcccggctcctccgcaccccctcccccgggggtcccgcggcctgtgagttgactgaggggctcagacttggggagtgggtgtctcctcgcccctgtccttgctcccgtccctggcccggaccttggctgtctcctctttgtgccgagattgtcagtctgtgcggctacagcggggtggagacggccggctctgtcacggcttcatgagagcggggacggggcgcaggacttgcaggcgccggggagaagagacatggagccggcccttggcactctggggtcgcgtggggcagtcggtgggggaggcaggcggtggtgacaggacagggtgggggtggacgccagggttctgggaacgcgctggcagccctgacgcccgggttccgaaagtctcgggggtgggtatttcccccgacccgcctcgggggcggagtgcggggcagaggggtgggggctggggagaggcgtggcccgagcggtgctggaagcggagccgggacctttggggcccgcgctgagacgcgcccggctgctgccgccgccctcctttcccctcttccctggtttcccttctcctctagacctgttcgctctccgcccctccttgcctccccaacaccccctcaggtcccgttgcctcctggtcctttcagggattcctggtccttccttcccacactagcctccctggggtatcgctgaggcagcctggcctgcacccaggttcccctcacccctgccacatttctctcttctccctcacgccaactttccttttcgcccttctctctctttctcacatcctagagacggtctttaatacgcattaaccctgtgctgccacatctggctcctgccctcattgcctccaatccggactcttcctctcacatcacccccaccacccccaacttgggctcacaacttctcttcactttttccatttccccagttctctgccttccgtctttccctctgtcctcatccttagcccctctgccctgctttgtgtcccacctctccccctccacttcctctcctcccaccctcagtctcacccccgggctgtctcactctctggagcctctccttcctgttctctgtccccagtgctccctaccctcacctcaagacgaccatggccaccatcccagactggaagctacagctgctagcccggcgccggcaggaggaggcgtccgttcgaggccgagagaaagcagaacgggagcgcctgtcccagatgccagcctggaaacgagggctcctggagcgccgccgggccaagcttgggctgtcccctggggagcctagccctgtgctagggactgtagaggctggacctccagacccggatgagtctgcggtccttctggaggccatcgggccagtgcaccagaaccgattcatccggcaggagcggcagcagcagcagcagcaacaacaacggagtgaagagctgctagcagagagaaagcctgggcctctggaggcccgggagcggagacccagccctggggagatgcgggatcagagccccaagggaagagagtcaagagaagagagactaagtccgagggagaccagagagaggaggctggggatagggggagcccaagagttgagcctgaggcctctggaggctcgggactggaggcaaagcccaggagaggtgggagacaggagctcccgactgtcagaggcatggaaatggaggctgagtcctggagaaactccagagcggagtctgagactagcagagtctcgagagcaaagccccaggagaaaagaggtggaaagtagactgagcccaggggaatctgcctaccagaagttgggcctgacagaggcccataaatggagacctgactccagagagtctcaggaacagagtttggtacaactggaggcaacagagtggaggctgaggtcaggagaagaaagacaagactactcggaagaatgtgggagaaaagaagagtggccagttccaggggtagctccaaaagagactgcagagctgtccgagaccctgacaagggaggcccaaggcaacagttccgcaggagtggaggcagcagagcagaggcctgtggaagatggcgagaggggcatgaagccaacagaagggtggaaatggaccctgaactccaggaaggctcgagaatggacacccagggacatagaggctcaaactcagaaaccagaacctccagagtcagcagagaagcttctggaatctcccggtgtggaggctggagaaggggaggctgagaaggaggaggcgggggctcagggcaggcctctgagagccctgcagaactgctgctctgtgccctcccccctcccaccagaggacgctgggactggaggcctgagacagcaggaagaggaagcagtggagctccagcccccaccaccagcccctctgtctcccccacccccagccccaactgccccccaacctcctggggatcccctcatgagccgcctgttctatggggtgaaggcagggccaggggtgggggccccccgccgcagtggacacaccttcaccgtcaacccccggcggtctgtgccccctgcgaccccagccaccccaacctctccagccacagttgatgctgcagtcccgggggctgggaagaagcggtacccaactgccgaggagatcttggttctggggggctacctccgtctcagccgcagctgccttgccaaggggtcccccgaaagacaccacaaacagcttaagatctccttcagcgagacagccctggagaccacgtaccaatacccctccgagagttcggtactggaggagctgggcccggagcctgaggtccccagtgcccccaaccctccagcagcccaacccgacgacgaagaggatgaggaagagctgctgctgctgcagccagagctccagggcgggctgcgcaccaaggccctgattgtggatgagtcctgccggcggtgaccatcttccaacatagggatatacctccctccttcttataactgaagatcctggagcccggaagattcagggcagacagaccctgataatgagcctggcagggaagggcaaccaacatcttgtaacttgctttccccaccctgtttctgggggcagagccaattgcccaatttctaccctaatccaaagtccctggtgtgggtggggttaaacgtgctggtgcatcctaggtcatccaagagtgagcgccaagtcctgagaaggggcacagaactccctggagggtggagatggagcacctgccccccatggcagggtacactctccccacagccttcctccccaccatcccgtggggactctcgggatttaagcactcgtctctctgggaggcccagaccccactccatttataggcacatctccttcatttcctaggtcactgcccctttgtttacagctcctgcctcctcccttgaccacagcctggtttacaaattccatcagctcccagccccacctgccaaagtcccaggtttacaagccacgcttacttgctgtgtctgcgtggaattctctcctctgtcccctccagtctcctcattggagtgacctgaaggtgtggcttcctccactttttctcagtattactttgccttagttttccccaagagggaaggctggaactcttaactctgtaccccttgatagttatttaattctgtttctcctagtggttcacaattgaactgaattgagatggtgtcgggtggctaaggagacacctcacctctccttccccattgtgccgcctttatcaattgcctgttttgttttgtttgttttttaactttccataataaaatggagttctcttcaa

SEQ ID NO: 49949 - DNA, 2853 bp, Artificial Sequence
  derived and/or modified sequence
cctccctccagtctccggatctccctcggtccctctctcctcctcttcctctctctggacgcccggctcctccgcaccccctcccccgggggtcccgcggccttgctccctaccctcacctcaagacgaccatggccaccatcccagactggaagctacagctgctagcccggcgccggcaggaggaggcgtccgttcgaggccgagagaaagcagaacgggagcgcctgtcccagatgccagcctggaaacgagggctcctggagcgccgccgggccaagcttgggctgtcccctggggagcctagccctgtgctagggactgtagaggctggacctccagacccggatgagtctgcggtccttctggaggccatcgggccagtgcaccagaaccgattcatccggcaggagcggcagcagcagcagcagcaacaacaacggagtgaagagctgctagcagagagaaagcctgggcctctggaggcccgggagcggagacccagccctggggagatgcgggatcagagccccaagggaagagagtcaagagaagagagactaagtccgagggagaccagagagaggaggctggggatagggggagcccaagagttgagcctgaggcctctggaggctcgggactggaggcaaagcccaggagaggtgggagacaggagctcccgactgtcagaggcatggaaatggaggctgagtcctggagaaactccagagcggagtctgagactagcagagtctcgagagcaaagccccaggagaaaagaggtggaaagtagactgagcccaggggaatctgcctaccagaagttgggcctgacagaggcccataaatggagacctgactccagagagtctcaggaacagagtttggtacaactggaggcaacagagtggaggctgaggtcaggagaagaaagacaagactactcggaagaatgtgggagaaaagaagagtggccagttccaggggtagctccaaaagagactgcagagctgtccgagaccctgacaagggaggcccaaggcaacagttccgcaggagtggaggcagcagagcagaggcctgtggaagatggcgagaggggcatgaagccaacagaagggtggaaatggaccctgaactccaggaaggctcgagaatggacacccagggacatagaggctcaaactcagaaaccagaacctccagagtcagcagagaagcttctggaatctcccggtgtggaggctggagaaggggaggctgagaaggaggaggcgggggctcagggcaggcctctgagagccctgcagaactgctgctctgtgccctcccccctcccaccagaggacgctgggactggaggcctgagacagcaggaagaggaagcagtggagctccagcccccaccaccagcccctctgtctcccccacccccagccccaactgccccccaacctcctggggatcccctcatgagccgcctgttctatggggtgaaggcagggccaggggtgggggccccccgccgcagtggacacaccttcaccgtcaacccccggcggtctgtgccccctgcgaccccagccaccccaacctctccagccacagttgatgctgcagtcccgggggctgggaagaagcggtacccaactgccgaggagatcttggttctggggggctacctccgtctcagccgcagctgccttgccaaggggtcccccgaaagacaccacaaacagcttaagatctccttcagcgagacagccctggagaccacgtaccaatacccctccgagagttcggtactggaggagctgggcccggagcctgaggtccccagtgcccccaaccctccagcagcccaacccgacgacgaagaggatgaggaagagctgctgctgctgcagccagagctccagggcgggctgcgcaccaaggccctgattgtggatgagtcctgccggcggtgaccatcttccaacatagggatatacctccctccttcttataactgaagatcctggagcccggaagattcagggcagacagaccctgataatgagcctggcagggaagggcaaccaacatcttgtaacttgctttccccaccctgtttctgggggcagagccaattgcccaatttctaccctaatccaaagtccctggtgtgggtggggttaaacgtgctggtgcatcctaggtcatccaagagtgagcgccaagtcctgagaaggggcacagaactccctggagggtggagatggagcacctgccccccatggcagggtacactctccccacagccttcctccccaccatcccgtggggactctcgggatttaagcactcgtctctctgggaggcccagaccccactccatttataggcacatctccttcatttcctaggtcactgcccctttgtttacagctcctgcctcctcccttgaccacagcctggtttacaaattccatcagctcccagccccacctgccaaagtcccaggtttacaagccacgcttacttgctgtgtctgcgtggaattctctcctctgtcccctccagtctcctcattggagtgacctgaaggtgtggcttcctccactttttctcagtattactttgccttagttttccccaagagggaaggctggaactcttaactctgtaccccttgatagttatttaattctgtttctcctagtggttcacaattgaactgaattgagatggtgtcgggtggctaaggagacacctcacctctccttccccattgtgccgcctttatcaattgcctgttttgttttgtttgttttttaactttccataataaaatggagttctcttcaa

SEQ ID NO: 49950 - DNA, 1134 bp, Artificial Sequence
  derived and/or modified sequence
atggccaccatcccagactggaagctacagctgctagcccggcgccggcaggaggaggcgtccgttcgaggccgagagaaagcagaacgggagcgcctgtcccagatgccagcctggaaacgagggctcctggagcgccgccgggccaagcttgggctgtcccctggggagcctagccctgtgctagggactgtagaggctggacctccagacccggatgagtctgcggtccttctggaggccatcgggccagtgcaccagaaccgattcatccggcaggagcggcagcagcagcagcagcaacaacaacggagtgaagagctgctagcagagagaaagcctgggcctctggaggcccgggagcggagacccagccctggggagatgcgggatcagagccccaagggaagagagtcaagagaagagagactaagtccgagggagaccagagagaggaggctggggatagggggagcccaagagttgagcctgaggcctctggaggctcgggactggaggcaaagcccaggagaggtgggagacaggagctcccgactgtcagaggcatggaaatggaggctgagtcctggagaaactccagagcggagtctgagactagcagagtctcgagagcaaagccccaggagaaaagaggtggaaagtggactgagcccaggggaatctgcctaccagaagttgggcctgacagaggcccataaatggagacctgactccagagagtctcaggaacagagtttggtacaactggaggcaacagagtggaggctgaggtcaggagaagaaagacaagactactcggaagaatgtgggagaaaagaagagtggccagttccaggggtagctccaaaagagactgcagagctgtccgagaccctgacaagggaggcccaaggcaacagttccgcaggagtggaggcagcagagcagaggcctgtggaagatggcgagaggggcatgaagccaacagaagggtggaaatggaccctgataatgagcctggcagggaagggcaaccaacatcttgtaacttgctttccccaccctgtttctgggggcagagccaattgcccaatttctaccctaatccaaagtccctggtgtgggtggggttaa

SEQ ID NO: 49951 - protein, 333 aa, Artificial Sequence
  derived and/or modified sequence
MGTRKKVHAFVRVKPTDDFAHEMIRYGDDKRSIDIHLKKDIRRGVVNNQQTDWSFKLDGVLHDASQDLVYETVAKDVVSQALDGYNGTIMCYGQTGAGKTYTMMGATENYKHRGILPRALQQVFRMIEERPTHAITVRVSYLEIYNESLFDLLSTLPYVGPSVTPMTIVENPQGVFIKGLSVHLTSQEEDAFSLLFEGETNRIIASHTMNKNSSRSHCIFTIYLEAHSRTLSEEKYITSKINLVDLAGSERLGKSGSEGQVLKEATYINKSLSFLEQAIIALGDQKRDHIPFRQCKLTHALKDSLGGNCNMVLVTNIYGEAAQLEETGSRLWL

SEQ ID NO: 49952 - DNA, 2373 bp, Artificial Sequence
  derived and/or modified sequence
atgggtacacggaagaaggtgcatgccttcgtccgcgtgaagccaactgatgatttcgctcatgaaatgatccggtatggggatgataagcgtagtattgacatccacctcaagaaggatatcaggcgaggggtcgtgaacaatcagcagacagactggagttttaagctagacggagttctccacgatgcatcacaggatctggtttacgaaaccgtcgccaaagacgtggtgtcacaggccctggacggttacaatggaaccatcatgtgctacggtcaaaccggcgccggcaaaacatatacaatgatgggagctactgagaactacaaacaccgcggcatcttgcctcgggcactccagcaggtatttcgcatgatcgaagaacgaccaactcatgctatcacggtacgcgtttcctaccttgaaatttataatgagtctctcttcgacctgctatctacgctcccttatgttggtccctctgttactcctatgaccattgttgagaaccctcagggagtgttcataaaaggcctttcagtgcacctcacttctcaggaggaggacgcattcagcttgctgttcgaaggagaaacgaatcgaatcattgcctcgcatacgatgaacaagaactcatctagatcccactgtatatttacaatttacctggaagcacactctcgaactttatccgaagagaaatatatcacctcaaaaatcaatttagtcgatctcgctggctctgagagactaggaaaatctggatctgaggggcaagtcctgaaggaggctacttatatcaacaagagtctgagcttccttgaacaggctatcatcgcactgggtgatcagaagagagaccacatcccttttcggcagtgcaaattgactcacgccctgaaagacagcctcggcggaaactgcaatatggtgctggtgacgaatatctacggagaggccgcgcaactggaggaaactctgtcttccctacgcttcgccagcagaatgaagctggtaaccacagaacctgcaataaatgagaagtacgacgctgagcgcatggtgaagaacctggagaaagagctggcactattaaaacaggagctggccattcacgatagcctgacaaatagaactttcgttacatatgacccaatggacgaaattcagatcgccgagattaacagtcaggtcagaagatacctagagggcacgctggacgaaattgatattatcagcctgagacaaataaaggaggtgtttaaccagtttcgggtagtactgtcccagcaggagcaagaagtcgagtccacactgcgtcgaaaatacacgctcatagataggaacgattttgccgcgatctccgcaatccagaaagcggggctcgtggacgtggatggccacctggtaggagagccagagggacaaaatttcgggctgggggttgccccgttttcgactaaaccaggtaaaaaggctaaatcaaagaagacctttaaggaacctctgtccagcctggcacgcaaggagggggcgtctagccctgttaacgggaaggacctggactacgtgagcacctccaaaactcaattggtccctagcagcaaggatggggatgttaaagacatgctatcgcgagacagagagacatcctccatcgagcccctcccttctgattctccaaaggaagaattaagacctattagaccggacacaccccccagcaagccggtggccttcgaagagtttaaaaacgagcagggatccgagatcaaccgcatcttcaaagaaaataaatcaatacttaacgagaggcggaaaagagcatctgagactacccagcacatcaacgctataaagcgggaaatcgacgtgactaaagaagcgcttaattttcagaaatccctgcgtgagaaacagggcaagtacgaaaataagggcttaatgattattgacgaagaagagtttcttctcatcttgaaattaaaagacctcaagaaacagtaccggtctgagtaccaggacctacgtgatctgcgagcggaaatccagtactgccaacacctggtggaccaatgtaggcatagactcctgatggagtttgatatatggtataacgagagttttgttatcccagaagacatgcaaatggccctgaagcctggagggtctatacggccaggcatggtccctgtgaatagaatcgtttccctgggcgaggatgaccaggacaagttctctcagctgcagcagagggtgctgcctgaagggcccgacagtatctcgttctataacgccaaggtgaagatcgagcaaaaacacaattacctgaaaacaatgatgggtctgcagcaagcccatcggaagtag

SEQ ID NO: 49953 - DNA, 2373 bp, Artificial Sequence
  derived and/or modified sequence
atgggtaccagaaagaaggtgcacgcttttgtgcgcgtcaaacccacagacgattttgcacacgaaatgatccgctatggagacgataagagatcgatcgacattcatcttaaaaaagacattagaaggggcgtagtcaataatcagcagaccgattggagcttcaagctagatggagtccttcatgacgctagccaggacctggtctacgaaacagttgcaaaggatgtggtctctcaggcgcttgacggctacaatggcacaatcatgtgctatgggcagactggcgctggtaagacgtatacgatgatgggcgcaaccgagaattacaaacatcgaggaatactacccagggcactccagcaggttttcaggatgatcgaggaacgtcccacccacgcgattacagtgcgcgtgagctatctggaaatttacaacgaatccttgttcgatctactgagcaccctgccctatgtagggcctagcgtgacgccgatgaccatcgtggaaaatccccagggcgttttcatcaaaggtttaagtgtgcatctcacttcacaggaagaggacgcattcagcttacttttcgagggcgaaaccaatcggattattgctagccacactatgaataagaatagttcaaggagtcattgtatttttactatttacttagaagctcatagccggaccctgtccgaagagaagtacattacctcaaagatcaacctggtcgatctggccggcagcgaaaggcttgggaaatctgggtcagaaggacaggtgctgaaggaagccacctacataaataaaagtctatcctttttggaacaggctatcatcgcactgggtgaccagaagcgtgaccacataccgtttagacagtgtaagctcacccacgctctgaaagattccctagggggtaactgcaatatggtgctggtgaccaatatttacggggaagcagcccagctcgaggaaacactgtcatccttgaggttcgcgagtcggatgaagctagtcacaacagagccagccattaacgagaagtatgacgctgaacgcatggtaaaaaatttagagaaggagttggctcttctgaaacaggagttagcgattcacgacagcctgacaaacaggacatttgtgacctatgatcctatggacgagatccaaatcgcagagattaattctcaggtgaggaggtatctggaaggcacacttgatgagattgacatcatcagcctccggcagatcaaggaagtgttcaaccagtttcgtgtggtactctcgcagcaggaacaggaagtcgagtccacccttagaagaaagtataccctcatcgacaggaatgatttcgctgccattagtgccatccagaaggccgggttggttgacgtcgacgggcatcttgtgggggaaccggagggacaaaactttggcctgggcgtcgccccattctccactaaaccaggtaagaaggcaaaaagtaagaagacgtttaaggaaccccttagcagtttggcccggaaggagggtgcaagctcaccagtcaacgggaaggatttggattacgtgtctacttccaaaactcagctggtgcccagcagcaaagatggagatgtgaaagatatgctgtcaagagacagggagacttcatcaattgaacctctgccgagtgatagccccaaagaggaattgcggcctatcaggcccgatacccccccatcaaagcctgtagcctttgaggagttcaagaatgaacagggaagtgaaatcaataggatctttaaggagaataaatctatactcaatgagcgtcgtaagcgcgcttcagaaacaacacaacatattaatgcgatcaagcgggaaatcgacgtgaccaaggaggccctgaacttccagaaaagccttcgagaaaagcaaggcaagtacgagaacaaaggtctgatgattatcgacgaagaggagttcctgcttatcctcaagctgaaagatctgaagaagcagtaccgcagcgagtaccaggacctccgcgacctgcgcgccgagattcagtactgccaacatctcgttgaccagtgccgtcaccggctgctgatggaattcgatatatggtataatgagagtttcgtgattcccgaagacatgcaaatggcactcaaacccgggggatcaattaggcctgggatggtccccgtgaaccgcatcgtgtcactgggagaggacgatcaagacaagttttcacaattacaacagcgggtgctacctgaagggccagatagtatttcgttttacaacgccaaggtcaaaatcgaacaaaaacataactacctcaagacaatgatgggcttgcagcaagctcacagaaagtag

SEQ ID NO: 49954 - DNA, 2373 bp, Artificial Sequence
  derived and/or modified sequence
atggggacccgtaagaaggtacacgcctttgttcgcgtgaaaccgactgacgacttcgcacacgaaatgattcggtacggagacgacaagagaagtatcgacatccacctcaagaaagatatcagaagaggcgtggtgaacaatcagcaaacggactggagctttaagctggacggagttctccatgatgccagtcaggacctggtttatgaaaccgtcgccaaggatgtcgtttctcaggccctggacggatataacggtaccattatgtgctatggccagacaggcgctggcaagacgtacacgatgatgggcgctacagagaattataagcatcgagggatcctgccgagagctctgcagcaggtgttcagaatgattgaggaaaggccaacgcacgcgattacagtccgggttagttatttagagatctataacgaaagcctgttcgacctgctctcaactctaccttatgtcggccccagcgtcaccccaatgaccattgtggaaaacccccagggggtattcattaaagggttgtccgtacatttaaccagccaggaggaagatgcgttcagtttgttgtttgaaggggagacaaacaggattattgccagtcataccatgaataagaatagcagtaggtctcactgcatattcacaatctatcttgaggctcacagtcggacgcttagtgaggaaaagtacattacttctaaaattaacttagttgacctcgccggatccgagcggttgggtaaatccggctccgaagggcaggtgctcaaggaggccacctatattaacaagtcactgagttttctggagcaagcgattatcgcacttggggatcagaaaagagatcatatcccttttaggcagtgtaagctaacccacgcacttaaggactcactgggcggcaactgtaacatggtcctggtgaccaacatttacggggaggccgcccagctagaagaaactctgtcttcactaaggttcgcatctagaatgaagttagtaactaccgagcctgcaattaatgaaaaatatgacgcagagcgcatggtgaaaaatcttgaaaaggagctggcactgctaaaacaggagctcgccatccatgattctctgactaaccgcacattcgtgacctacgatcctatggacgagatccagatcgcagaaattaacagtcaggttcggcggtatttagaaggcaccctggacgagattgacattatcagcctgcgtcaaattaaggaagtattcaaccagtttagggttgtgcttagccagcaagagcaagaagttgaaagcactctgcggaggaagtacacacttatcgaccggaatgactttgccgccatttcagcgatacaaaaagcaggcctggtggacgtggatggccatctcgtgggggagccggaagggcagaatttcggtttgggcgtggctcctttttcaacgaagccaggaaagaaagccaaaagcaagaaaaccttcaaggaaccactgagctcactggcccggaaagagggcgctagctcacccgtgaacggtaaagatctcgactatgtgtcgacatctaaaactcagttggtacctagttccaaagatggggacgtgaaggatatgctgagtcgtgaccgcgagaccagctctattgaacctctcccgtcagactcccctaaagaagagctgagaccaatccgaccggatacaccacctagcaagcccgtggctttcgaagaattcaagaacgagcaagggtccgaaatcaatagaatatttaaagagaataaaagtattcttaacgagagacggaaacgggccagcgaaactacacagcacatcaatgccataaagagggagatagacgtcacaaaagaggcactaaactttcagaagtcacttcgcgaaaagcagggcaagtacgagaacaagggcctgatgattattgacgaagaagaattcctgttgatcctgaagctcaaggatctgaaaaaacaatacaggagtgaatatcaagacctccgtgatctgcgcgccgagattcagtattgtcagcatctggttgatcagtgccggcacaggctgctcatggagttcgatatctggtacaacgagtccttcgtgatcccagaagatatgcagatggccctgaagcctggcggatcaattcgaccaggcatggtgcctgtgaaccgcatcgtgtccctcggtgaggatgatcaggacaagtttagtcagttgcagcaacgggtgctgcccgaaggtccagactctatatccttctacaacgccaaggtgaagatcgagcagaaacataactacctgaaaaccatgatgggcctccaacaggcgcatcggaaatag

SEQ ID NO: 49955 - DNA, 2373 bp, Artificial Sequence
  derived and/or modified sequence
atgggcaccaggaagaaggtgcacgcctttgtgcgggtgaagcccacagatgactttgcccacgagatgatccgctatggagatgacaagaggagcattgacatccacctgaagaaggacatccggcggggcgtggtgaacaaccagcagacagactggagcttcaagctggatggagtgctgcatgatgccagccaggacctggtgtatgagaccgtggccaaggatgtggtgtcccaggccctggatggctacaacggcaccatcatgtgctacggccagacaggagctgggaagacctacaccatgatgggcgccacagagaactacaagcaccggggcatcctgccccgggccctgcagcaggtgttcaggatgattgaggagcggcccacccacgccatcaccgtgcgggtgtcctacctggagatctacaatgaaagcctgtttgacctgctgagcaccctgccctacgtgggccccagcgtgacccccatgaccatcgtggagaacccccagggcgtcttcatcaagggcctgtctgtgcacctgaccagccaggaggaggatgccttcagcctgctgtttgaaggagagaccaaccgcatcatcgccagccacaccatgaacaagaacagcagccgcagccactgcatcttcaccatctacctggaggcccacagcaggaccctgtctgaggagaagtacatcaccagcaagatcaacctggtggacctggccggcagcgagcggctgggcaagagcggcagcgagggccaggtgctgaaggaggccacctacatcaacaagagcctgtccttcctggagcaggccatcatcgccctgggggaccagaagagggaccacatccccttccggcagtgcaagctgacccacgccctgaaggacagcctgggcggcaactgcaacatggtgctggtgaccaacatctacggggaggccgcccagctggaggagaccctgagcagcctgcgctttgccagcaggatgaagctggtgaccacagagcccgccatcaatgagaagtatgatgctgagaggatggtgaagaacctggagaaggagctggccctgctgaagcaggagctggccatccatgacagcctgaccaacagaacatttgtgacctatgaccccatggatgagatccagattgctgagatcaacagccaggtgcggcgctacctggagggcaccctggatgaaattgacatcatcagcctgcggcagatcaaggaggtgttcaaccagttccgggtggtgctgagccagcaggagcaggaggtggagagcaccctgcggaggaagtacaccctgattgacagaaatgactttgctgccatcagcgccatccagaaggccggcctggtggatgtggatggccacctggtgggggagcctgagggccagaactttggcctgggcgtggcccccttcagcaccaagccaggcaagaaggccaagagcaagaagaccttcaaggagcccctgagcagcctggccaggaaggagggcgccagcagccctgtgaatggcaaggacctggactatgtgtccaccagcaagacccagctggtgcccagcagcaaggatggagatgtgaaggacatgctgagccgggaccgggagaccagcagcattgagcccctgcccagcgacagccccaaggaggagctgcggcccatccggccagacaccccacccagcaagcctgtggcctttgaggagttcaagaatgagcagggcagcgagatcaaccgcatcttcaaggagaacaagagcatcctgaatgaaagaaggaagagggccagcgagaccacccagcacatcaatgccatcaagcgggagattgatgtgaccaaggaggccctgaacttccagaagagcctgcgggagaagcagggcaagtatgaaaataaaggcctgatgatcattgatgaggaggagttcctgctgatcctgaagctgaaggacctgaagaagcagtacagaagtgagtaccaggacctgcgggacctgcgggcagagatccagtactgccagcacctggtggaccagtgccgccaccggctgctgatggagtttgacatctggtacaatgaaagctttgtgattcctgaggacatgcagatggccctgaagccaggcggcagcatccggcccggcatggtgcctgtgaaccgcatcgtgtccctgggagaagatgaccaggacaagttcagccagctgcagcagagggtgctgcctgagggccctgacagcatctccttctacaatgccaaggtgaagattgagcagaagcacaactacctgaagaccatgatgggcctgcagcaggcccacaggaagtag

SEQ ID NO: 49956 - DNA, 2373 bp, Artificial Sequence
  derived and/or modified sequence
atgggcacccggaagaaggtgcacgccttcgtgcgggtgaagcccacggatgactttgctcacgagatgatccgctacggcgacgataagaggtcaattgacatccacttgaagaaagacatacgacgcggcgtcgtgaacaatcagcagactgactggagtttcaagctggacggagtccttcacgatgcttctcaggatctggtatacgaaactgtagccaaagatgtcgtaagtcaagctctggatgggtataatgggaccatcatgtgctacggtcaaacgggcgcagggaagacctacactatgatgggcgccactgaaaactacaaacatagaggcattctgccccgcgcgcttcaacaggtttttcgcatgatcgaagagcgacccacacatgcaatcacagtaagggtgtcatatctggagatttacaatgagtccctgtttgacctcctttctactctcccttacgtgggtccctccgtaacgccgatgactattgtagagaatccacagggggtgtttatcaaagggctgtccgtgcacctgacctctcaggaagaagacgcattttcactgctattcgaaggggaaactaacaggattatcgctagtcataccatgaacaagaactctagtcgctcacattgtatatttacaatttacctcgaagctcattctcgcacgttgtccgaagaaaagtacatcactagtaagattaacctcgtggatctagctggatctgaaagactcggaaaatccgggtctgaaggtcaggtgttgaaggaagccacctacattaataaatccctgtccttcctggagcaggcaatcattgctctcggcgaccagaagcgggatcatattccattccgccagtgcaagttgacccatgccctgaaggacagtctgggggggaattgcaacatggtcctagtgactaacatctacggagaggccgcccagctggaggagactctgtctagcctgcgcttcgccagcaggatgaaactggtgacaactgagcctgcaattaacgagaagtatgacgccgagaggatggtgaaaaatctggaaaaagagttggccctccttaagcaagaattagcaatccatgacagcctaaccaatcggacgttcgtgacttacgatcctatggacgagatccagatcgcagaaataaatagtcaggtgcggcgctatctggagggtacccttgatgaaatcgacataatttcactgcgccagattaaagaggtttttaaccaattcagggtagttctgtctcagcaggagcaggaagtggagagcacattgcgacgcaagtacaccctcatcgataggaatgattttgcagctatcagtgctatccagaaagctgggctggttgacgtggacgggcatctcgttggcgagcccgagggtcagaactttggactgggggttgcacctttctccaccaagcccggaaaaaaagcaaagtcgaaaaagacattcaaagagccactgtcatcgttagccagaaaagaaggagctagttccccagtcaatggcaaagatcttgactacgtatccacttctaagactcaactggtcccttcctcaaaagacggagatgtgaaggatatgctgagtcgagatagggaaacaagttcaatcgaaccgcttccctcagactctccaaaggaggaacttaggccaattcggcctgataccccgccctcaaaacctgtggcctttgaggagttcaaaaatgagcagggctcagaaatcaacagaattttcaaggaaaataaatcaattctcaacgagcgaaggaagcgtgccagcgaaacaacacagcatattaacgcgattaaacgggagatcgacgtgacaaaagaagccttgaatttccaaaaatccttacgggagaaacagggaaaatatgagaataagggcctaatgatcattgacgaggaggagtttctacttatactgaaactcaaagacctgaagaagcaataccgctcggaatatcaggatctgcgtgacttaagggctgagatccaatattgtcagcatctagtcgaccagtgtcgtcataggctgctgatggaattcgatatctggtataatgagtcttttgtgattcctgaggacatgcagatggcattaaaaccagggggctccatcagacccggaatggttcccgtaaaccggatagtctctttgggagaggacgaccaggacaaattctcacaattgcaacagagggtgcttccagaaggtccagacagcatctctttttataacgctaaagtcaaaattgagcagaagcacaattacttaaagacgatgatgggcctgcagcaggcccacagaaaatag

SEQ ID NO: 49957 - DNA, 2373 bp, Artificial Sequence
  derived and/or modified sequence
atgggcacccggaagaaggtgcacgccttcgtgcgggtgaagcccactgacgactttgcccacgagatgatacggtacggggatgacaaaagaagtatcgacatacatctgaagaaggacatccgcaggggggtggtgaacaatcagcagaccgattggtcttttaagctggatggagtgctccacgatgcaagccaggatctggtttatgagaccgtcgccaaggatgtggtctctcaggcactggacggatacaatggcaccattatgtgctatgggcaaacaggtgcaggcaagacttacactatgatgggagccacagagaattacaagcacaggggcattctgccaagagcactacaacaggtgtttagaatgatagaggagagacctacccatgccatcaccgtgcgcgtttcttatctggagatctacaacgaaagcctatttgatctgctgtccacattgccatatgtaggtccgtccgtcactcctatgaccatcgtggaaaaccctcagggcgtgtttattaaaggtctatctgtgcacttgacttctcaagaagaggacgctttcagcctgctcttcgaaggggagacgaatagaattatagcctcacacactatgaataaaaattcttctcgatctcactgcatcttcaccatctacctagaggcacactcgaggactctgagtgaggaaaaatacataacgtcaaagatcaacctcgtagatctggcaggttccgagcgactgggcaagtccggaagcgagggacaggtgctcaaagaggccacttacattaataagtccctatccttccttgaacaggccatcattgcgttgggcgaccaaaaaagggaccacattcccttccggcagtgtaaactgacccacgccctgaaagacagtctgggagggaactgtaacatggtcctcgttaccaatatctacggggaggccgctcagctcgaagaaaccttgtcgagtctaaggtttgcttcccggatgaagttagtgaccacggaaccagctatcaacgaaaaatacgatgcagaaaggatggtgaagaacttagaaaaagaactagccctcctgaagcaggaactcgcgatccacgattctttaaccaaccgcacctttgtgacttacgatcccatggatgagatccagatcgccgaaattaatagtcaggtcaggcggtacttggaaggaaccctagacgaaatcgatatcatcagcctgcgtcagatcaaagaggtttttaaccagtttagagtcgtgctcagtcagcaagagcaggaggtggagtctacgttaagaaggaagtataccctgatagaccgaaatgattttgcagccataagtgcaatacagaaagcaggactcgtagacgtggatggtcacctggtcggcgagccagagggtcagaacttcggactgggcgtggcgccgttttctaccaagccggggaagaaggctaaaagcaaaaagaccttcaaggagccgctctcctccctagcgagaaaagagggcgcttcatctcccgtaaacggaaaagatctggactatgtgagtacgtctaagacccagttggtgccttcgagcaaagatggggacgttaaagacatgctatcccgcgatagagagaccagcagcattgaacctctgccgtccgacagtcctaaggaagaactgcgccctatcagacccgacaccccgccttcaaagccagtcgccttcgaggaattcaagaatgaacaaggcagtgagatcaacaggattttcaaagagaataaaagcattttaaacgagagaaggaagcgcgccagtgaaacaacgcagcacatcaacgcaattaagcgcgagatcgacgtgacaaaggaagcactgaactttcagaaatcattaagagaaaagcagggtaagtacgaaaataagggactgatgatcatcgatgaagaggaattcttgcttatccttaagctgaaggatcttaaaaaacagtatcggtctgagtaccaagacctgagggacttacgcgccgagatccaatactgtcagcatcttgttgatcagtgccggcatcgcctgctgatggaatttgatatatggtacaacgaatccttcgtaattcctgaggacatgcaaatggcccttaaacccggaggctcaataagacctgggatggttccggtgaaccggatcgtaagcctgggggaagacgaccaggataagttctcgcaacttcaacagcgggtgctgcccgagggtcccgactctataagtttttataatgccaaggtaaagattgagcaaaagcacaattacttgaaaacaatgatggggcttcagcaagcccatcgaaaatag

SEQ ID NO: 49958 - DNA, 2373 bp, Artificial Sequence
  derived and/or modified sequence
atgggcacccggaagaaggtgcacgccttcgtgcgggtgaagcccaccgatgatttcgcgcacgagatgatacggtatggcgatgataagagaagtatagacattcatctcaagaaagatatccgccgcggcgtggttaacaatcaacagaccgattggagttttaaactggacggcgttctacatgacgcttcacaggatctggtttacgaaaccgtggctaaagacgtggtatcacaagccctggacggctacaatggaactataatgtgttatggtcaaacaggggcggggaaaacatatactatgatgggtgccactgagaactataaacatagaggaattcttcctcgggctctccagcaggtcttccgaatgattgaagagcgccctacccatgccatcaccgtccgcgtgtcgtatctcgagatctataacgaatctcttttcgacttacttagtaccctgccatacgttgggccaagtgtaactccaatgactatcgtagagaatccccagggcgtatttatcaaaggcctatctgttcaccttacctcacaagaggaggacgccttctctttactattcgaaggggaaacaaaccgcataatagcctctcatacgatgaataagaattcctcaaggtcccactgtatcttcactatctacctcgaggcacatagtagaactctatctgaagaaaagtacatcacctctaagataaacctcgtcgatcttgcaggatcagaaagactcggaaaatctgggagcgaagggcaagtactcaaggaggcaacctatatcaacaagagcctttcattcctggaacaggccattatcgctcttggcgatcagaagagggaccacatcccattccggcagtgcaagctcacccatgcacttaaagactctttaggcggcaattgtaatatggtcttggtgacgaatatctacggggaggcagcacagctcgaggaaaccctctcctccctgcgattcgcaagtagaatgaagctggtaactaccgagcccgctataaacgaaaagtacgatgcggagcggatggtcaagaatctggaaaaggaactcgctttgcttaagcaagagctggccatccacgattcactaacgaatagaacatttgttacatatgaccccatggatgagatccaaatcgccgagatcaactctcaggtgaggcgatatctcgaaggcactctcgatgagatagacattatctctcttaggcagataaaagaagtgttcaaccaatttagggttgtacttagtcagcaagaacaggaggtggaaagtaccctcagacgaaaatacacgcttattgacaggaatgactttgcggctatttccgccatccagaaggccgggttagttgacgtcgacggacacctcgttggggagcctgaggggcagaatttcgggctcggagttgctcccttctccacaaaacctgggaagaaggcaaaaagcaagaagacatttaaggaaccactctctagcctggctcggaaggagggagcttctagccctgtgaacggtaaggatctggactacgttagcaccagtaagacgcagctcgtgcctagttctaaagacggggatgtcaaagacatgctctcgagagacagagaaacaagctccatcgaaccactgccgtctgatagtccaaaggaggagctcaggcctatccgcccagataccccccccagcaagcctgtggccttcgaagagttcaagaacgagcaggggtccgagattaacaggatctttaaggagaacaaaagtatcctaaacgaacggcgtaaaagggcttccgaaactacccagcatatcaacgcaatcaagcgagaaatagacgtgaccaaagaagccctaaacttccagaaaagtctgcgtgaaaagcagggtaaatacgaaaacaagggtctcatgatcatagatgaggaggagtttctactgatcctgaaattaaaagatctcaaaaagcagtaccgttccgagtatcaagacctgagagatcttcgcgctgagattcagtattgtcagcatttagtggatcaatgcaggcacagattactgatggaatttgatatttggtataatgagtctttcgtgattccggaagacatgcagatggcgctgaagcccggcggaagcattagaccaggaatggttccagttaacaggattgtcagtctgggtgaggacgatcaggacaagttctcccagctgcagcagcgcgtgctcccggagggaccggatagcatttctttttataacgccaaggtgaaaatcgagcaaaaacacaattacctgaagacgatgatgggcttacagcaggcccacaggaaatag

SEQ ID NO: 49959 - DNA, 2373 bp, Artificial Sequence
  derived and/or modified sequence
atggggactcggaaaaaagtgcacgccttcgttagggtcaaaccaacagacgactttgcacacgagatgatccgttacggggatgacaaaagatcaatcgatattcatctcaaaaaggatattcgtcggggtgtcgtgaataatcaacagacagattggtcttttaagctggacggcgtgctgcacgacgccagtcaggacctagtctatgagacagtggcaaaggatgtggtgtctcaagctctggacgggtacaatggcactatcatgtgttatggccaaactggagccggaaaaacctataccatgatgggagcgacagagaactataaacaccggggaatcttaccgagggccttgcagcaggtgtttcggatgattgaagaacgcccaacacatgcaattacagtcagagtttcatacctggagatctacaatgaatcgctttttgaccttctctccacgctgccttatgtgggaccatctgttaccccaatgacaatagtcgaaaatcctcagggagtgtttattaaggggctctcagttcatttaacaagtcaggaagaggatgcatttagtctcctgtttgaaggcgaaaccaaccggatcatcgccagtcataccatgaacaaaaacagcagtcgtagccattgtatctttacaatctacctcgaggcgcattctaggacccttagcgaagaaaagtacattacgtccaagatcaaccttgtggatttggctggatcggagcgtctgggcaaatccggaagtgaagggcaggtgcttaaggaggctacgtacatcaataagagcttgtctttcctggaacaggccatcatcgcactgggagaccaaaaacgcgatcacatcccctttcgacagtgcaaactgacccatgcactcaaagactccctgggtgggaattgcaacatggtgttggtgacaaacatctacggtgaggcagctcagctggaggagacgctatcaagcctccgcttcgccagccgtatgaaattggtgacaaccgaacctgccataaatgaaaagtacgatgccgagaggatggtcaagaacctggagaaagagttggccctgctgaagcaagagctggctatccatgattcactcaccaatcggactttcgtcacgtatgatcctatggacgagattcagatcgcagaaatcaactctcaggtcagacgctatctcgaaggtactctggacgagatcgacatcatctcattgagacagataaaagaggtcttcaaccagtttagagtagttctgagccagcaggaacaggaggtcgaatccactctaagaaggaaatacacactgattgaccgcaacgactttgccgctatatcggctatacagaaggcgggtctggtggatgtcgatggccacctggtaggagagcctgaggggcagaattttgggctgggggtggctccatttagcactaaacctggcaagaaggccaaatcaaagaagaccttcaaagagcccctgagctcccttgccaggaaggagggagccagcagtcctgttaatggcaaggacctggactacgtctctacatctaaaacgcagttggtgccttcgagcaaggacggcgatgtgaaagacatgctgagccgcgatagagagacgagtagcattgagccccttccatcggacagtcccaaggaagaattacgacccatacggcctgatactcctcctagcaagcctgttgcctttgaggaattcaagaatgagcagggctcggagattaaccgtatatttaaggaaaataagtcgatcctgaacgaaaggcgtaagcgtgcttccgagaccactcagcacatcaacgccattaagcgtgaaattgatgtgaccaaggaggctctgaacttccagaagtctttacgggagaaacaaggaaaatatgagaataagggtttgatgattatagatgaagaggaatttctcttgatcctgaagctaaaagacctcaaaaaacagtataggtctgagtaccaggacctacgagacctaagggccgagatccagtactgtcagcacctcgttgaccagtgcagacatagactgctgatggagtttgacatctggtacaacgagagcttcgtaattcctgaagatatgcaaatggctctgaagcctggtggtagtattaggcctgggatggtaccagttaacagaatcgtgtctttgggcgaggatgatcaagacaaattcagtcagctgcagcagcgtgtcttacccgaaggacctgattctatatcgttctataacgcaaaggtgaaaatcgagcaaaagcataattacctaaaaacaatgatgggtctccaacaggctcataggaagtag

SEQ ID NO: 49960 - DNA, 2373 bp, Artificial Sequence
  derived and/or modified sequence
atgggaacgaggaaaaaggttcatgcatttgtgagggtgaagccaactgatgattttgcccatgaaatgattagatacggagatgataaaagatccattgacatccatctgaagaaggatattaggcgcggagtcgtgaacaatcagcagacggactggagctttaaattagacggtgttctgcatgacgccagccaagatctcgtgtacgagaccgtggctaaggacgttgtgtctcaagcgttggatggttacaacggaaccataatgtgttacggtcaaactggtgctggaaagacctatacaatgatgggcgcaacggagaattacaagcatcggggaattttgcctcgggctctccagcaggtgtttagaatgattgaggagagaccaacccacgcaattacggtgagagtgagttatctggagatctacaatgagagcttgttcgatttacttagcactctgccttacgttggtcctagtgtgaccccgatgaccatcgttgaaaatccacagggagttttcataaagggattatcagttcatttaaccagtcaggaagaagacgcattctccctgttattcgagggtgagaccaaccggattatcgcctcgcacacaatgaataagaatagcagccgatcacactgtatattcaccatatacttggaggcacattcgaggactctatctgaagagaagtatattacctctaagatcaacctcgtggatctggctggatcagagcggctcggcaagtccggctccgagggacaggtcctcaaagaggcgacctacatcaacaagtccctgagctttctggaacaggcgattatcgcattaggagaccagaaaagggatcatataccattcagacagtgcaagctaacacatgctttaaaggacagcctgggcggaaattgtaacatggtactggtaaccaacatttacggagaggctgcacagctcgaagagactctgtcttctttgaggttcgcctcaagaatgaaattggtgaccaccgaaccagctatcaacgaaaaatacgacgccgagcgcatggtgaagaaccttgaaaaggaactggctctcctcaaacaagaactggccatccatgattctcttaccaacagaacattcgtgacttacgatccaatggacgaaatccagatagctgagatcaactcgcaggtgcgaaggtatcttgaaggaacacttgacgaaatcgacattatttctctgaggcagattaaagaggtcttcaatcagtttagggtggtgctgagccagcaggagcaggaagttgagagcactctcaggcgcaaatatacactcattgatcgtaacgactttgcagctattagcgcaattcagaaggctggtctggtcgacgtggacggtcacctggtgggcgagcccgagggtcagaatttcgggcttggcgtggccccattcagcaccaagcctggaaagaaggccaagagcaaaaaaacgtttaaagagcctctgagctcactagcccgtaaggagggcgcaagtagcccagtgaacggaaaagatttagactatgtctccaccagcaaaactcagctggtgccttctagcaaggacggcgatgttaaagacatgctgtctcgtgaccgcgagaccagttcaatcgagccattgcccagcgatagtccaaaagaggagctccgcccaatccgcccagataccccccctagcaaacccgtggcctttgaggagtttaagaatgaacaaggttcagaaattaataggatcttcaaagagaacaagagcatactgaatgaacgccgtaagcgtgccagcgagactactcagcatataaatgcaatcaaacgagaaattgatgtgaccaaagaagccctgaacttccagaagagcctgagagagaaacaaggcaagtacgaaaacaaagggctgatgatcattgatgaagaagaattcctccttatcttaaagctgaaggacctgaagaagcaatatcggagcgagtatcaagacctcagagacctgcgcgcagagatccagtactgccagcaccttgtggaccagtgtagacaccgcttgctcatggagttcgacatttggtataacgagagcttcgttatcccagaggacatgcagatggcactgaagcccggaggatccatcagaccaggcatggtacccgtaaaccgtatcgtctctctcggggaagacgatcaggacaaatttagccagctgcaacaaagagtgttgccagagggtccagactcaatctcattctataacgctaaggtcaagattgagcagaagcacaattaccttaagaccatgatgggcctgcagcaggcacatcgaaagtag

SEQ ID NO: 49961 - DNA, 2373 bp, Artificial Sequence
  derived and/or modified sequence
atggggacccgtaaaaaggtacacgcatttgtgcgcgtaaaacccacagacgacttcgctcatgaaatgattcggtacggtgatgacaaaaggagtattgacattcacctcaaaaaggatatacggcgtggggtcgtaaacaatcagcagacagattggtctttcaagctggacggagtcctgcacgatgctagtcaggatctcgtgtacgagaccgtagccaaagacgtggtgtcccaggccctggatggctacaacggcactataatgtgctacgggcagacgggagccggtaaaacatacacaatgatgggagcaaccgagaactataaacatagaggtatactaccacgtgccctgcagcaggtttttaggatgatagaagagagacccacccacgcaatcaccgtgagggtaagttatctggaaatatataacgagtccctattcgatctactttctactctcccgtatgtaggcccttctgtgactcccatgacaatcgttgagaacccccagggagtttttatcaaagggcttagcgtccacctgacctctcaggaagaggacgccttctccctactctttgagggtgagacgaaccgcatcatcgcatctcatactatgaacaaaaactcttcgcgctcacattgcattttcaccatctatctcgaagctcacagccgcacgcttagcgaggagaaatatatcacctctaaaattaatctggtggacctggcgggatccgagagattgggcaagtcggggtctgaaggccaggtactaaaagaggccacatacatcaataaaagcctctccttcctggaacaggcaataatcgcccttggtgaccagaagagggaccacattccattcaggcagtgcaagttaactcatgctctgaaggactctctgggcggaaattgcaacatggttttggtgactaatatttacggagaagcagcccaacttgaagaaaccttatcttcattgcgatttgcgagcaggatgaagctagtgacaaccgaacccgctatcaacgaaaagtacgacgcggaacgcatggtgaaaaatctcgaaaaggagctcgccttgctaaaacaggagttagcaattcatgattccctgacaaaccggacattcgttacttatgatcctatggacgaaatccaaatcgctgaaattaatagccaagtgagacgataccttgaggggaccctcgacgagattgatatcatttcactccgacagataaaggaggtttttaaccagtttcgagttgtcctgagtcagcaggaacaagaggttgaaagtacgctccggaggaaatacacgctgattgaccgaaacgactttgcggcaatctctgcaatccaaaaagccggtctcgtggacgtggatggccatttagtgggcgagcccgaggggcaaaacttcggcttgggagtagccccattctcaaccaaacctgggaaaaaggctaaatctaaaaagactttcaaggagccgttgagctccttggctcgtaaagagggggcttcatcccctgtcaacggaaaagatctcgactatgtgtcaaccagcaagactcagctcgtcccttccagcaaggatggcgatgtaaaagatatgctatcgcgcgacagggagacttccagcattgagcctcttccgtccgacagccccaaagaggaactgcggccaatcagacctgatacaccgccatccaaacctgtcgctttcgaggagtttaaaaatgagcagggctccgagatcaatcgaatttttaaggagaacaagtcaatcctcaatgagcggagaaaacgggctagcgagacgacacagcacatcaacgccattaaaagggaaattgatgtaacaaaggaggccctgaattttcagaagagcttacgcgaaaagcaaggaaagtatgaaaataaaggactcatgatcattgatgaagaagagttcctactcatcctgaaactcaaggaccttaagaagcaatatagatccgaataccaggatttgcgggacctgcgagcagaaatccagtactgccagcaccttgtcgatcaatgtcggcatcgactgctcatggaattcgacatttggtataacgagagctttgtcattcctgaagacatgcagatggcccttaagccaggaggaagtatcagacctggcatggtgcctgtgaatagaatcgtgtcgctaggtgaagacgatcaagataaattcagccagctccaacagcgggtgctgcctgagggaccagattccatatctttctataacgcaaaagtgaaaattgagcagaaacataactatctgaaaacaatgatgggcctgcagcaggcccaccggaaatag

SEQ ID NO: 49962 - DNA, 2373 bp, Artificial Sequence
  derived and/or modified sequence
atgggcaccagaaagaaggtgcacgccttcgtgagagtgaagcccaccgacgacttcgcccacgagatgatcagatacggcgacgacaagagaagcatcgacatccacctgaagaaggacatcagaagaggcgtggtgaacaaccagcagaccgactggagcttcaagctggacggcgtgctgcacgacgccagccaggacctggtgtacgagaccgtggccaaggacgtggtgagccaggccctggacggctacaacggcaccatcatgtgctacggccagaccggcgccggcaagacctacaccatgatgggcgccaccgagaactacaagcacagaggcatcctgcccagagccctgcagcaggtgttcagaatgatcgaggagagacccacccacgccatcaccgtgagagtgagctacctggagatctacaacgagagcctgttcgacctgctgagcaccctgccctacgtgggccccagcgtgacccccatgaccatcgtggagaacccccagggcgtgttcatcaagggcctgagcgtgcacctgaccagccaggaggaggacgccttcagcctgctgttcgagggcgagaccaacagaatcatcgccagccacaccatgaacaagaacagcagcagaagccactgcatcttcaccatctacctggaggcccacagcagaaccctgagcgaggagaagtacatcaccagcaagatcaacctggtggacctggccggcagcgagagactgggcaagagcggcagcgagggccaggtgctgaaggaggccacctacatcaacaagagcctgagcttcctggagcaggccatcatcgccctgggcgaccagaagagagaccacatccccttcagacagtgcaagctgacccacgccctgaaggacagcctgggcggcaactgcaacatggtgctggtgaccaacatctacggcgaggccgcccagctggaggagaccctgagcagcctgagattcgccagcagaatgaagctggtgaccaccgagcccgccatcaacgagaagtacgacgccgagagaatggtgaagaacctggagaaggagctggccctgctgaagcaggagctggccatccacgacagcctgaccaacagaaccttcgtgacctacgaccccatggacgagatccagatcgccgagatcaacagccaggtgagaagatacctggagggcaccctggacgagatcgacatcatcagcctgagacagatcaaggaggtgttcaaccagttcagagtggtgctgagccagcaggagcaggaggtggagagcaccctgagaagaaagtacaccctgatcgacagaaacgacttcgccgccatcagcgccatccagaaggccggcctggtggacgtggacggccacctggtgggcgagcccgagggccagaacttcggcctgggcgtggcccccttcagcaccaagcccggcaagaaggccaagagcaagaagaccttcaaggagcccctgagcagcctggccagaaaggagggcgccagcagccccgtgaacggcaaggacctggactacgtgagcaccagcaagacccagctggtgcccagcagcaaggacggcgacgtgaaggacatgctgagcagagacagagagaccagcagcatcgagcccctgcccagcgacagccccaaggaggagctgagacccatcagacccgacaccccccccagcaagcccgtggccttcgaggagttcaagaacgagcagggcagcgagatcaacagaatcttcaaggagaacaagagcatcctgaacgagagaagaaagagagccagcgagaccacccagcacatcaacgccatcaagagagagatcgacgtgaccaaggaggccctgaacttccagaagagcctgagagagaagcagggcaagtacgagaacaagggcctgatgatcatcgacgaggaggagttcctgctgatcctgaagctgaaggacctgaagaagcagtacagaagcgagtaccaggacctgagagacctgagagccgagatccagtactgccagcacctggtggaccagtgcagacacagactgctgatggagttcgacatctggtacaacgagagcttcgtgatccccgaggacatgcagatggccctgaagcccggcggcagcatcagacccggcatggtgcccgtgaacagaatcgtgagcctgggcgaggacgaccaggacaagttcagccagctgcagcagagagtgctgcccgagggccccgacagcatcagcttctacaacgccaaggtgaagatcgagcagaagcacaactacctgaagaccatgatgggcctgcagcaggcccacagaaagtag

SEQ ID NO: 49963 - protein, 1358 aa, Artificial Sequence
  derived and/or modified sequence
MIEPSEDSFETMMEHKNPSSKQMESSEGSSNTTEATSGSGVRGEAGPASGPAQEKKEPPSGPLQEMEELPTDLLQDMEEPSSGPRKEIEDPPNDLLQDLEESCNGSHQARGDPLSGASDRMKEASVNPSGAREEQEAHTDLKESGREETPQEQNQTEHSTAELMAMVRSIISLYFRMQDLKEQQRVAEEILIKGINAGQLPAPKHFSGDRREFHEFIVLCQLTLQSYPRMFYNDRLRVGYVINHLSGLALEWAKALLQENSPLIGDFPAFLEAMSEVFEYRQALRVAEEAMFTIRQGGRSATEYIDEFQSLVPILGWPDEVLQAHLCQGLNEEIRHYLFRVPQPDSLDSLIVLILQIEEKLAERRAMLRLPPEARPRNLTWIDSPAPERWMVSSWLPSEVHPDINRAHLFLLLMVRVNPYHSVAVQALVDSGADGNFMDEKFAQEHYVELYEKPYPQPVQSVDGSLIGNEPVWLYTEPLVCIHQNHQESIEFDIVPSPNFSVVLGIRWLRVHAPEVDWIKGRCTFHSPYCLKNCFRPPPPCIALERHGMSLLPGLPHPYSDLADVFNPKEADDETSDQPSSDGSDDLSESEPSELQQAGDSDHSETFYECPSTAPWEPVGARMQERARLQEEYWDLQDMLTNRQDYIQMIPELFDQLHGAEWFTKLELRGTIVEESVNGHRTEDVWKAAFGLELEEMKSYQPFALSPDPIIPQNVIHFILKDMLGFFVLSYGQEVLIYSMSQEEHLHHVRQVLVRFRHHNVYCSLDKSQFHRQTVEFLGFVVTPKGVKLNKNVMTIITGYPTPGSKLSLRNFIEFVFPYRHFVERFSIIAEPLVRQLLSSYQFYWGVEEQEAFECLKRAFRKAPLLHHPKPQNPFYLETGVTGTALHASLIQIDDQTGKRACCAFYSRNISPIEVEYSQAEMKILPIRAAFMVWCRYLENTEEPIMILLNTEDLASLNNDRLTVLLPGHWVFFFSHFNFDVMELPEQDGGRALPPVRNLRWRRAFQRNTAARQTLLLASRGFPRDPSTESGEEENEEQDELNEQILRQELLAMIPIDQILNSFLAHFSMAQIRAVILHFFRGLLYWKNTLALAAILVLLRVRQCLSLRPAPAMRVARPQPQRSLRLILDSSLIAGSSITTAITQLLTQMPALVGANTIPAQELAELFLGPGRWQRNALHSQAHRGLQFTPGFWLTLCEFFGVRVTPQEGHLPALRQNRYLELHVVGDEDVVLREALQDDLQRYRQCGLHDGLQDTSQDKQDNDVQEAPPSHTAATHPPRPRHLMDPQVLEFLGSRLLHIHSADGQLHLLSREQAARALSQFLTLIYRRALPIPAWESQPREQARLEELPDEDEDANLD

SEQ ID NO: 49964 - DNA, 4077 bp, Artificial Sequence
  derived and/or modified sequence
atgatcgaaccaagcgaggatagcttcgaaaccatgatggagcacaaaaatccgagttccaagcaaatggagagttctgagggctccagcaatacgacagaggctacctctggttccggggttcggggcgaggcaggccccgcttccggccccgctcaagagaagaaagagcctcccagtggacccctgcaggagatggaggagctgcctactgacctgctccaggacatggaggagccctcttccgggcccagaaaagagattgaagacccacccaacgaccttctgcaggacctggaggagtcatgcaatggctctcaccaggctcggggagatccgctctccggagcaagcgaccgcatgaaggaggccagtgtaaatccatccggcgcgcgcgaagaacaggaagctcataccgacctgaaggagagcgggagagaggagacaccacaggaacagaatcaaaccgaacattccacagcagaattgatggcaatggtgcgaagcatcatttcattgtattttcggatgcaagatctaaaggagcaacagagggttgccgaagagatcttgataaagggcataaacgccgggcaattgcctgccccaaagcatttctcgggagatcggagagagttccacgaattcatcgtgctgtgccagctcacactgcagagctatccaagaatgttctacaatgatcgcctgcgcgtgggatacgtaatcaatcatttgtctggtttggcccttgagtgggctaaagctttgcttcaggagaacagccctctgattggggacttccccgcattcttagaagcaatgtccgaggtttttgaataccggcaggccctcagggtggccgaagaagctatgttcaccatccgtcagggcggcaggtctgctactgaatatatcgatgaatttcagagcctagtgccgatcttagggtggcctgatgaagtcctccaggcacatctctgtcagggacttaacgaggagatccgacactacctattccgagtcccccagcctgatagcttggactctctgatagtgttgatcctccaaatagaagaaaaattggccgagcgcagggccatgctgcggttacctcccgaagcaagaccacggaatctcacttggatagactcaccagctccggaacggtggatggtctctagctggctgccaagcgaggtgcatcctgacatcaacagagcccacctcttcctactcctcatggttagggtgaatccctaccacagcgtggcagttcaggcactggtcgattcaggagccgacggcaactttatggacgagaagttcgcccaggagcactacgtggaactttacgaaaagccataccctcagcccgtgcagtccgtggatggatctttaattggaaatgaacctgtctggttgtatacagaaccgctagtttgcattcatcagaatcatcaggagagtatcgagttcgatatagtgcccagtccaaattttagtgtggtgctgggtatccggtggctcagagtgcacgcccccgaagtggactggatcaaagggagatgtacctttcactcgccttattgcctcaagaactgtttcaggccccctccgccctgcattgccttggagaggcacggaatgtccctcctgccaggcctgccccacccctactccgacttggccgacgtttttaaccccaaagaagcggatgacgagactagcgatcaaccgtcatccgacgggtccgacgacctctcagagtccgagcctagtgagcttcaacaggctggggactctgatcattccgaaaccttttatgaatgccccagtacagcaccttgggaacccgttggtgcacgcatgcaagagcgcgccagactgcaagaagaatattgggatctccaggatatgctcacgaatcgacaggattacatccagatgatacctgaactctttgaccaattgcacggggccgagtggttcacaaagttagagttgcgcggcacaatcgtggaagagagcgtgaatggccatcggaccgaggatgtgtggaaagctgctttcggcttggagctagaggagatgaaatcctatcaaccgtttgcgttatctcccgatcccatcatacctcaaaacgtgatccactttatcttgaaggacatgcttgggttcttcgtgctgagctatggccaggaagtcctcatctatagtatgtctcaagaagaacacctccatcatgtccgccaggtcctggtgagatttagacatcacaatgtctactgcagtctggacaaatcgcagtttcacagacagaccgtggagttccttgggttcgttgtaactccgaagggggtcaagctcaacaagaatgtgatgacaatcatcacgggatatcctacccctggctcaaagttgtcactgagaaactttatcgagtttgtttttccctacaggcatttcgtcgagcgtttcagcatcatcgccgaacccctggtgcgtcagctcctatcttcataccaattttactggggcgtcgaagaacaagaagcatttgagtgcctaaagcgggcgtttcggaaggctccgctgttacaccatccaaagcctcagaatcccttttacttggagaccggagtgaccggtacagctctgcatgcttccctgatccagattgatgaccagacggggaaacgcgcatgctgtgcattctactcccgaaacatcagtcctattgaagtggaatattcccaagcggagatgaagatattgcctattagggctgctttcatggtctggtgtcgctacctggaaaatactgaagagcctatcatgattctgctgaacaccgaagaccttgcctccctgaataatgacaggttaacagtcttactacccgggcactgggttttctttttttctcacttcaatttcgacgtgatggaactgcccgaacaggacggcggtcgcgctttaccgccagtgaggaatttgagatggaggcgtgctttccaaaggaacactgccgcacggcagacacttttgttggcctctagaggatttcccagagacccatctactgaatccggggaggaagagaatgaagaacaggacgaattgaatgagcagatattaagacaggaactgttggctatgattcccattgaccagatcctcaatagtttcctggcacacttctccatggcccagattcgcgctgtgatactgcatttttttcgcggcctcctatattggaaaaatacattggcactggccgccatccttgtcctgctgagggtgagacagtgcctgagcttgaggccggcgcctgccatgcgagttgctcggccccagccacaaaggtctctccgcctgatccttgattcatctttaatcgccggctcctctatcactactgctatcactcagctacttacccagatgcccgccttggtgggggcaaacaccatccccgcgcaggaactagcggaactgttccttggcccaggaagatggcagaggaatgcgcttcacagccaagcccatcgtgggcttcagttcacccccgggttttggctgacactgtgcgaattttttggagtgcgcgtgaccccacaagaaggccacctgcctgctttgaggcaaaacagatatctcgagctgcatgtcgtcggggatgaagacgtggtgcttagggaggccctgcaggacgatctgcagcggtataggcagtgcgggctgcatgatggcttacaagacacctcacaggataagcaggataacgatgtccaggaggccccccccagtcacaccgccgcgacccacccaccgcgccctcgccatttaatggacccacaggtgctggagttcctggggagcagattgctgcacattcattctgccgatggacagttgcatctgctgagccgggaacaagcagccagagcattgtctcagttcttaacacttatctataggagggcgctgcctattccggcctgggagagccagccacgcgaacaagcgaggctcgaggagctgcccgatgaggatgaggatgctaaccttgattag

SEQ ID NO: 49965 - DNA, 4077 bp, Artificial Sequence
  derived and/or modified sequence
atgattgagcccagcgaggacagctttgagaccatgatggagcacaagaaccccagcagcaagcagatggagagcagcgagggcagcagcaacaccacagaggccaccagcggcagcggcgtgcggggggaggccggccctgccagcggccctgcccaggagaagaaggagccccccagcggccccctgcaggagatggaggagctgcccacagacctgctgcaggacatggaggagcccagcagcggccccaggaaggagattgaagatcctccaaatgacctgctgcaggacctggaggagagctgcaatggcagccaccaggcccggggggaccccctgagcggggccagtgacaggatgaaggaggcctctgtgaaccccagcggggcccgggaggagcaggaggcccacacagacctgaaggagagcggccgggaggagaccccccaggagcagaaccagacagagcacagcacagctgagctgatggccatggtgcgcagcatcatcagcctgtacttcaggatgcaggacctgaaggagcagcagagggtggccgaggagatcctgatcaagggcatcaatgccggccagctgcctgcccccaagcacttcagcggggaccggcgggagttccacgagttcatcgtgctgtgccagctgaccctgcagagctaccccaggatgttctacaatgaccggctgcgggtgggctacgtgatcaaccacctgagcggcctggccctggagtgggccaaggccctgctgcaggagaacagccccctcatcggggacttccctgccttcctggaggccatgtctgaggtgtttgagtaccggcaggccctgcgggtggccgaggaggccatgttcaccatccggcagggcggccgcagcgccacagagtacattgatgagttccagagcctggtgcccatcctgggctggccagatgaggtgctgcaggcccacctgtgccagggcctgaatgaggagatccgccactacctgttccgggtgccccagcctgacagcctggacagcctgattgtgctgatcctgcagatcgaggagaagctggccgagcggcgggccatgctgcggctgcccccagaggcccggcccaggaacctgacctggattgacagccctgcccctgagcgctggatggtgtcctcctggctgcccagcgaggtgcacccagacatcaacagagcccacctgttcctgctgctgatggtgcgggtgaacccctaccacagcgtggccgtgcaggccctggtggacagcggggctgatggcaacttcatggatgagaagtttgcccaggagcactacgtggagctgtatgagaagccctacccccagcctgtgcagagcgtggatggcagcctgattggaaatgaacctgtgtggctgtacacagagcccctggtgtgcatccaccagaaccaccaggagagcattgaatttgacatcgtgcccagccccaacttctctgtggtgctgggcatccgctggctgcgggtgcacgcccctgaggtggactggatcaagggccgctgcaccttccacagcccctactgcctgaagaactgcttccggcccccaccaccctgcatcgccctggagagacatggcatgagcctgctgcccggcctgccccacccctacagcgacctggctgatgtgttcaaccccaaggaggctgatgatgagaccagtgaccagcccagcagtgatggcagtgatgacctgtctgagagcgagcccagcgagctgcagcaggccggggacagcgaccacagcgagaccttctatgaatgtcccagcacagccccctgggagcctgtgggcgccaggatgcaggagcgggcccggctgcaggaggagtactgggacctgcaggacatgctgaccaaccggcaggactacatccagatgatccctgagctgtttgaccagctgcacggggctgagtggttcaccaagctggagctgcggggcaccatcgtggaggagagcgtgaatggccacaggacagaagatgtgtggaaggccgccttcggcctggagctggaggagatgaagagctaccagccctttgccctgagcccagaccccatcatcccccagaatgtcatccacttcatcctgaaggacatgctgggcttctttgtgctgtcctatggccaggaggtgctgatctacagcatgagccaggaggagcacctgcaccacgtgcggcaggtgctggtgcgcttccgccaccacaacgtgtactgcagcctggacaagagccagttccaccggcagacagtggagttcctgggctttgtggtgacccccaagggcgtgaagctgaacaagaatgtgatgaccatcatcaccggctaccccaccccaggcagcaagctgagcctgaggaacttcattgaatttgtgttcccctaccgccactttgtggagcgcttcagcatcatcgccgagcccctggtgcggcagctgctgagcagctaccagttctactggggcgtggaggagcaggaggcctttgagtgcctgaagagggccttcaggaaggcccccctgctgcaccaccccaagccccagaaccccttctacctggagactggagtgactggaacagccctgcacgccagcctcatccagattgatgaccagacaggcaagagggcctgctgtgccttctacagcaggaacatcagccccatcgaggtggagtacagccaggccgagatgaagatcctgcccatccgggccgccttcatggtgtggtgccgctacctggagaacacagaggagcccatcatgatcctgctgaacacagaggacctggccagcctgaacaatgaccggctgactgtgctgctgcccggccactgggtgttcttcttcagccacttcaactttgatgtgatggagctgcctgagcaggacggcggccgggccctgccccctgtgaggaacctgcgctggaggcgggccttccagaggaacacagctgcccggcagaccctgctgctggccagccggggcttcccccgggaccccagcacagagagcggggaggaggagaatgaggagcaggatgagctgaatgagcagatcctgcggcaggagctgctggccatgatccccatcgaccagatcctgaacagcttcctggcccacttctccatggcccagatccgggccgtcatcctgcacttcttccggggcctgctgtactggaagaacaccctggccctggccgccatcctggtgctgctgcgggtgcggcagtgcctgagcctgcggcctgccccagccatgagggtggcccggccccagccccagaggagcctgcggctcatcctggacagcagcctgattgctggcagcagcatcaccacagccatcacccagctgctgacccagatgcctgccctggtgggcgccaacaccatcccagcccaggagctggccgagctgttcctgggccctggccgctggcagagaaatgccctgcacagccaggcccaccggggcctgcagttcaccccaggcttctggctgaccctgtgtgagttcttcggcgtgcgggtgaccccccaggagggccacctgcctgccctgcggcagaaccgctacctggagctgcacgtggtgggagatgaagatgtggtgctgcgggaggccctgcaggatgacctgcagcgctaccggcagtgtggcctgcatgatggcctgcaggacaccagccaggacaagcaggacaatgatgtgcaggaggccccacccagccacacagctgccacccaccccccccggcccaggcacctgatggacccccaggtgctggagttcctgggcagccggctgctgcacatccacagcgcagatggccagctgcacctgctgagccgggagcaggccgcccgggccctgagccagttcctgaccctcatctacagaagagccctgcccatcccagcctgggagagccagccccgggagcaggcccggctggaggagctgcctgatgaagatgaagatgccaacctggactag

SEQ ID NO: 49966 - DNA, 4077 bp, Artificial Sequence
  derived and/or modified sequence
atgatcgagcccagcgaggacagcttcgagaccatgatggagcacaagaacccatcctccaagcagatggagtccagtgaaggaagttctaacactacagaggcaaccagcggcagcggggttagaggcgaagccggccccgcgtccggccccgcccaggaaaaaaaggaaccacctagcggtcccctccaggaaatggaagaacttcctacggacttactgcaagacatggaggagccatcaagtgggccccggaaggagattgaggaccctcctaacgacctgcttcaggacctcgaagagtcctgcaatggctctcatcaagcgaggggggacccactttccggcgcctcagaccgtatgaaagaagcatcagttaatccgagcggagcaagagaggagcaggaggcacacaccgacctgaaggagtccgggcgcgaggagacaccccaagagcagaaccagacagagcactctactgcagaacttatggcaatggtcagatcaattatttccttgtattttcgaatgcaggatctcaaagaacagcagcgcgtggctgaagaaattctgatcaagggcattaacgctggccagttgcctgcgccaaaacatttttctggggatcgaagggaatttcacgagttcatcgtgctgtgtcagctgacacttcagtcttatcctcggatgttttacaacgaccgtctccgggtagggtatgttattaaccatctgtccggcttagcccttgagtgggctaaagccctcctgcaagagaattccccgctgatcggcgatttccccgctttcttagaggctatgtctgaagtttttgagtacaggcaagctctgcgggtcgccgaggaagcaatgttcacgatccgacaggggggccggtccgccacggagtatatcgatgaattccaaagcttggtgcctatcttaggttggcctgacgaggtgctgcaggcccatttgtgccagggattgaacgaggaaattcggcattatctgttccgagttccacagcccgactcccttgatagtctgattgtgctgattctgcagatcgaagaaaaactggccgagaggcgggccatgctacggctacctcccgaagctcgaccgcgaaacctaacatggattgactcccctgcgcctgaacgctggatggtgagctcatggctccctagtgaggtgcatcctgatataaatcgggcgcacctctttctgcttcttatggtaagagttaacccgtatcacagcgttgccgtgcaggccctggtggattctggagctgatggcaatttcatggatgaaaaattcgcgcaggagcactatgtagagctctatgaaaagccgtatccgcagcccgtccagagcgtggacggatcattgattgggaatgaacccgtatggctatacaccgaaccacttgtctgcatccatcagaaccatcaggagtccatcgagtttgatatcgtgcctagcccaaacttcagtgtcgtgctgggcataagatggttgagagtgcacgctccagaggtcgattggatcaagggtcgctgtacgtttcacagcccatattgcctgaagaactgcttccgcccacccccaccttgtatcgctctggagcgccacggtatgtctctactgcccgggttgccacacccttactctgacctcgcagacgttttcaaccccaaggaggccgatgacgagacatccgatcagccctccagcgatggctccgacgatctctccgagtccgaaccctcggagctgcagcaggctggagactccgaccattctgagaccttctacgagtgcccaagtactgccccttgggagccggtcggcgcccggatgcaggagcgcgccagactgcaagaggaatactgggatctgcaagacatgctgacgaataggcaagattatattcagatgatccccgagctgtttgaccagctgcacggagccgagtggtttaccaagctggaactccgtgggacaatcgttgaagaatccgtgaatggccacaggacggaggatgtgtggaaggcagcctttggactagaactcgaagaaatgaagagttaccagcccttcgccctgtctccggatcctattatacctcagaatgttattcattttatactgaaagatatgttaggattcttcgttctaagctacggacaggaggtccttatttacagcatgagtcaggaggagcacctccatcacgtgagacaagtactggtcaggttccggcatcataatgtctattgttctctggacaaaagtcagttccaccggcagaccgtggagtttcttggctttgttgttacacccaagggcgttaagctgaataagaatgtaatgactataattacaggataccctacccctgggtctaaactgtccctgagaaattttattgagttcgttttcccttaccgacatttcgtggagcgctttagcattatagcagagccacttgtgaggcaactgctgtccagttaccagttctactggggcgtggaagaacaggaggcttttgaatgcctaaagcgggcgtttcgcaaagcccctcttctgcatcaccccaaaccacaaaatccattctacttggaaacaggcgtgacaggcacagccctgcacgcaagtctcatccagatcgatgaccagactggaaaaagagcttgttgtgctttttactctcggaatatctctcctattgaagttgagtatagccaagccgagatgaaaatcttacctatccgggctgcttttatggtgtggtgcaggtatctcgagaatacagaggaacccataatgattctgttgaatacggaggaccttgcaagcttaaataacgatcggctgaccgttctgctacctggccattgggtattcttcttcagccatttcaatttcgatgtgatggagctgccagagcaggatggtggtagggccctgccacccgttcggaatttgcggtggaggagagcgttccagaggaacacagctgctaggcagacacttttgttagcatcacggggattcccccgggatccttccaccgaatccggagaggaggagaatgaggagcaagatgagctaaatgagcagatcctgagacaggaactgttagccatgatccctatcgatcagatcctcaatagcttcttggctcacttctcaatggcgcagatccgggcagtgatcttgcacttctttcgcggactgctgtattggaaaaatacactggcactcgcagccatcttggtactgctgcgcgtccggcagtgtctgtctttacgtcccgcccctgcaatgcgtgtggctcggccacaaccccaaagatctctccggctgattctggactcttctcttattgccggatcatccattactaccgccatcacccagctgctgacacagatgccggccctggttggcgcaaacaccatccccgcacaggaacttgctgagctattcctggggccgggacgctggcagaggaatgccctgcattcccaagcccaccggggcttgcagttcacacccgggttttggcttactctgtgcgagtttttcggagtccgggtaacccctcaggaaggacaccttccagcgttgcgtcaaaatagatatctcgaactgcacgtggtcggggatgaagatgttgtgctccgggaggcgttgcaggacgatctccagaggtatagacagtgcgggcttcatgacggactgcaggatacatcgcaggacaagcaggataacgatgtacaggaagcacctccttcccatacagcagcgacccatcccccgcggcctagacacctgatggatccccaagtcttggaattcctgggaagtcggttgctgcatattcacagcgcggacgggcagctgcacctgcttagcagggagcaagccgcccgggcactctcccagttccttaccctcatataccgacgcgcgttacctatcccagcctgggaaagtcagcctagggaacaggcgagattggaggagttgccagatgaagacgaagatgccaatctagattag

SEQ ID NO: 49967 - DNA, 4077 bp, Artificial Sequence
  derived and/or modified sequence
atgattgagccaagcgaggactcattcgagaccatgatggaacacaagaacccatcttccaagcagatggagtccagtgagggtagctcgaacactacagaggcaacttccggaagcggcgtacgtggcgaggctggacccgcaagtggaccagcccaggagaagaaggagcccccttctggtccccttcaagaaatggaagagttacctaccgacctgctacaggacatggaagagccaagctctggcccaaggaaggagatcgaggatcccccaaacgacctcctgcaggacctggaagagagctgcaacggctctcaccaggctcggggagatcccctgagcggagcatccgacaggatgaaggaagcatccgttaacccttcaggcgctagagaggaacaggaggcccataccgatctgaaagagagtggacgagaagaaacacctcaagaacagaatcagacggaacatagcacagctgaactcatggctatggtcagatccattatctcactctactttagaatgcaggacctgaaagaacagcagcgcgtcgctgaagaaattttgattaaaggcataaatgctgggcaacttcccgcaccaaaacacttctccggggaccgcagagaatttcacgaatttatcgtgttatgtcagctgacccttcagagttatccaagaatgttttataacgatcgccttcgcgttggttacgtcattaatcatctgagtgggttggccctggagtgggcaaaggcacttctacaggaaaactctccgctgattggcgatttccctgcttttctcgaagctatgagcgaagtgttcgaataccgccaagccctccgagtagctgaagaggctatgtttacaattcggcaagggggacgatctgctacagagtatattgatgagtttcagtcccttgttcccatcttgggctggcccgatgaagttcttcaggctcatttgtgccagggcctgaatgaggaaatacggcactacctattcagagtgcctcagcccgacagtctggatagcttaatcgtgctgatactgcagatagaggaaaaacttgccgaacggagagctatgttaaggttgccacctgaagcccgacccagaaatctgacatggattgacagtcctgcccctgaacggtggatggtctcaagctggctccctagtgaggtgcatcctgacatcaaccgggctcacctcttcctgctcctgatggtgagggttaatccataccacagtgttgcggtccaagctctggtcgattccggagcagacggtaactttatggacgagaaatttgcccaggagcattacgtagagctctacgagaaaccatatcctcagccggtgcagagtgtagatggctcccttatcggtaacgagccagtgtggttgtacactgaaccattggtgtgtatacaccagaatcaccaagagtctattgaatttgatatcgttccttcacctaacttttctgttgtcctgggaatccgatggttacgggtgcatgcgccagaggtggattggattaaaggtcgttgcacgtttcattcgccttactgcctgaagaactgtttcaggccccctccaccttgcatcgcattagagagacacggtatgagccttctgcctggactgccccatccatatagcgacctcgccgatgtgttcaaccccaaggaggcagacgatgagactagcgaccagcctagctctgatggaagcgatgatctgtccgaatccgaacctagcgaactgcagcaggccggtgacagtgatcattcagagactttctatgaatgtccgagcacggccccatgggaaccagtgggcgctagaatgcaggaacgcgcaagactgcaggaggagtactgggatttgcaagacatgctgactaaccggcaggactatatacaaatgatccccgagctcttcgatcaactccatggtgccgagtggtttactaagctggaactcaggggcacgatcgtagaggagagtgtcaacggacacaggacagaagatgtgtggaaggccgcttttggcctggagctggaggaaatgaagtcttatcagcccttcgcattatccccggatcctatcatccctcagaatgtgatccacttcattctgaaagacatgctggggtttttcgtgctttcctatggccaggaggtcttgatatattccatgagccaggaggaacacctacatcacgtaaggcaggtcctagttaggttccggcatcataacgtgtactgtagtttggacaaatcacagtttcaccggcagaccgtggaatttctcggtttcgtggtcacacccaagggagtcaagctgaataagaacgtgatgacaatcattacgggctatcctacaccaggcagtaagctgtccctccgcaactttatcgaattcgtctttccctatcgccacttcgttgaacgatttagtattatcgctgagcccctggttagacaactcctctcgagttaccagttctattggggcgtggaggaacaggaagcatttgaatgccttaaaagggctttccgcaaagcccctctgctgcatcatcctaaacctcagaacccattttacttggaaaccggtgtcacaggtacagcactgcatgcttcattaatccagattgacgaccaaacgggcaagagggcttgctgtgccttctatagccgtaacatcagccctatcgaagtagagtatagccaggccgagatgaaaatcctccctattcgagccgcatttatggtttggtgccgatatctcgaaaatactgaggagcctatcatgatcctactgaacaccgaggatttagccagccttaataacgacaggcttaccgtcctgctcccagggcactgggtgtttttcttctcgcattttaattttgacgtgatggagctccccgaacaggatggagggagagccctccctcctgtcaggaaccttcggtggagacgtgctttccagcgcaatacagctgcccgtcagactttgctcctagcttccagaggcttcccaagggatccatccactgagagtggggaagaggagaacgaagagcaggacgaattaaacgaacagattctgcgccaagagctccttgctatgattcctattgatcagatcctcaattctttcctcgcccacttttccatggcccaaatacgggcagtgatcttgcatttcttcagggggttgctgtattggaagaacaccctggcgttggcagcaattttggtgctactgagggttagacagtgtctcagcctgcggcctgcacctgcaatgcgggttgctcggccacagccgcagcggtccctgcgacttattctggatagttcactgattgcgggatccagcatcactaccgcgataacacagctgctgactcagatgccggcattagttggcgcaaacacaatccccgctcaagagttagcagagttgttcctcggacccggtagatggcaaagaaatgccttacattcgcaagcccatcgtggccttcaattcacacccggtttttggttgaccctttgtgagttctttggcgtgagggtgacacctcaagaagggcacctgcccgctctgcgacagaaccggtatctcgaactgcacgtggtgggtgatgaggatgtggtgctacgcgaagctctgcaggatgatcttcagcgctatcggcagtgcggcctacatgatgggctgcaggatacaagtcaggataagcaagacaacgatgtgcaggaagctccaccttcccacacggccgcaacgcatcccccaagacccagacatctgatggaccctcaggtcttagagttcctcggatcccgattgttacacatccacagcgcggacggacagttgcatctactctcccgggagcaggctgcacgcgcactttcacagtttctcacattgatttaccgcagagctttgccaattcctgcatgggaaagtcaacctcgcgaacaagcgaggttggaggagctccccgacgaggacgaggacgcaaacctcgactag

SEQ ID NO: 49968 - DNA, 4193 bp, Artificial Sequence
  derived and/or modified sequence
gactggacgccatcacaaccttaccaatcttcagaatacactcctttccatccgacgaaatgatagaaccctctgaagactcatttgagacgatgatggagcataagaatccatcatcaaaacaaatggagtcctccgagggctcatccaacaccaccgaggcgacgtcgggcagtggagtgcggggagaggcagggccagccagcggcccagcccaggaaaagaaggagccccccagtggcccactccaggaaatggaagagctgcccactgatctactccaagacatggaggagccatccagtggcccacgtaaggaaatagaggatccacccaatgacctactccaagacctggaggagtcatgcaacggttcacaccaggcaaggggggatccactcagtggagcatctgataggatgaaagaagcatcagtcaacccatcgggagcccgagaagaacaagaggctcacactgacctgaaggaatcgggaagggaggagactcctcaagagcaaaaccagaccgagcactcaaccgcagaacttatggccatggtgaggtccatcatctcgctgtacttccgaatgcaagacctcaaagagcaacagagagtagcagaagagatcttgatcaaagggatcaatgcaggccaactgcccgccccaaagcacttctctggcgatcgcagagaattccacgagttcatcgtactctgccaactgaccttacagagctacccaagaatgttctataacgaccgtctgagagttggctatgtcatcaatcacctgtccggcttggcattagaatgggccaaagctctactgcaggaaaacagccccctgatcggagacttcccagccttcctggaggccatgtccgaagtgtttgagtaccgccaggcactgcgtgtggcagaagaggccatgttcaccatcaggcagggcggccgctctgccactgagtacatcgatgagttccagagcctggtacccatcttgggctggccagatgaagtcctgcaggcccacttgtgccaggggctcaacgaggagatcaggcactatctattccgggtccctcagccggattccctagacagtctgattgtgctcatcctgcaaatagaagagaagctggcagagagaagagctatgctcaggctgccccccgaggcccgcccccggaacctgacctggatcgactcacctgctccagagaggtggatggtcagcagctggttgcccagcgaagtccatccggacatcaatcgcgcccacctcttcctgctgctcatggtgagagtgaacccctaccacagcgtcgcggtccaggccctggtggattcgggagctgacggcaacttcatggatgagaagttcgcccaagagcactacgtcgagctctacgagaagccgtacccacagccggtccaatccgtggacggctcgctgattggcaacgagcctgtctggctctacacggagcccctggtgtgtatccaccagaaccaccaggagtccatcgaatttgacatcgtaccttcaccgaacttctctgtggtcctaggcatccgctggctccgagtccacgcccccgaagtcgactggatcaaaggccgctgcaccttccactctccctactgcctgaagaactgcttccgcccgcccccgccatgcattgccctagagaggcacggcatgagcctgctacccggactgccacacccatactcagacctggccgacgtgtttaacccgaaggaagcagatgatgagacttccgaccagccaagctcagacggatccgatgatctttctgaatcagagccctctgagcttcagcaggctggagacagtgatcacagcgagaccttttacgagtgtccctccaccgcgccttgggaacctgtgggtgccaggatgcaagaaagagccaggctacaggaggaatactgggacctgcaggacatgctgaccaacagacaggactacatacagatgattccggaactgtttgaccagttacacggagccgagtggttcacaaaactggagctgcgtgggaccattgtggaggaaagcgtgaacgggcaccgcaccgaagatgtgtggaaagcagcgtttggtttggagcttgaagagatgaagagctaccagccgtttgcgctctccccagaccctatcatacctcagaacgtgattcacttcatcctaaaggacatgctagggttctttgtgctttcttatggccaggaagtcctgatctactcaatgagtcaggaggagcacctccaccacgtccgccaagtcctggtccgcttccgccatcacaacgtctactgctccctggacaagagccagttccaccgccaaaccgtggaattcctgggcttcgtcgtcacccccaaaggggtgaaactgaacaagaacgtcatgaccatcataacagggtaccctacccctggctccaagctatctctgcgaaacttcatcgaattcgtcttcccctaccgccacttcgtggagcgcttcagcatcatcgcagagcccctggtgcggcagctgctgagctcctaccagttctactggggagtcgaggagcaagaggccttcgagtgcctgaagagggctttccgcaaggcgcctctcctccaccaccccaagccccagaacccattctacttggaaaccggcgtcaccggcacggccctgcacgcctccctgatccaaatcgacgaccaaaccggcaagagagcctgctgcgctttctactcccgcaacatctcccctatcgaggttgagtactctcaagcggagatgaagattcttccaatacgggctgccttcatggtgtggtgccgctacctggagaacaccgaggagcccatcatgatccttctcaacacagaggatctagcctctctgaataatgacaggctcaccgtacttctccccgggcattgggtcttcttcttctcccacttcaactttgacgtcatggagctgccagaacaagacggcggccgagctctgccacctgtgagaaacctccggtggaggagagccttccagaggaacactgccgccaggcaaaccctgctgctggcctcaaggggattccccagggatccatcgacggaatccggggaagaagagaatgaagaacaggatgagctcaatgaacagatcctacggcaagagctgctggccatgatacccatcgaccagatcctcaacagcttcctcgcccacttcagcatggcccagatcagggccgtcattctgcacttcttccgaggcctcctgtactggaagaacaccctagccctggcagccatcctcgtgctactgcgcgtgaggcaatgcctctcgctgcggccggcacccgccatgcgggtggctcggccccagccccagcgctccctacgactcatcctggattcgtccctcatcgcaggcagcagcatcacgacagccatcacccagctgctcacccagatgcccgctctcgtaggtgcaaacaccatcccagcccaggagctggctgagctgttcctgggccctggccgctggcagcgaaatgctctgcactcccaggcccaccgaggcctgcagttcacccctggcttctggctgacgctgtgtgagttcttcggtgtcagagtcaccccccaggagggccacctccctgccctgcgtcagaaccgctacctggagctgcacgtcgttggtgatgaggatgtcgtcttgcgagaagccctgcaagacgacctgcaacgttaccgtcagtgtggcctgcatgacggcctgcaagacacctcgcaggacaagcaggacaacgacgtgcaggaggccccacccagccacacagcagccacccacccaccccgcccacgccacctgatggatccccaggtcctggaattccttggtagccgcctgctccacatccacagtgcagatggccagctgcacctgctcagccgggagcaggcagccagggccctgagccagttcctgaccctgatctacaggcgggccctgcccatccccgcctgggagagccagcccagggagcaggcaaggctagaagagctgcctgatgaggacgaagatgctaacctcgactgaagacgcctccctgtctccagcaaagagtcccctctatttctcaccccaacacctccc

SEQ ID NO: 49969 - DNA, 4077 bp, Artificial Sequence
  derived and/or modified sequence
atgatcgagcccagcgaggacagcttcgagaccatgatggagcacaagaaccccagcagcaagcagatggagagcagcgagggcagcagcaacaccaccgaggccaccagcggcagcggcgtgagaggcgaggccggccccgccagcggccccgcccaggagaagaaggagccccccagcggccccctgcaggagatggaggagctgcccaccgacctgctgcaggacatggaggagcccagcagcggccccagaaaggagatcgaggacccccccaacgacctgctgcaggacctggaggagagctgcaacggcagccaccaggccagaggcgaccccctgagcggcgccagcgacagaatgaaggaggccagcgtgaaccccagcggcgccagagaggagcaggaggcccacaccgacctgaaggagagcggcagagaggagaccccccaggagcagaaccagaccgagcacagcaccgccgagctgatggccatggtgagaagcatcatcagcctgtacttcagaatgcaggacctgaaggagcagcagagagtggccgaggagatcctgatcaagggcatcaacgccggccagctgcccgcccccaagcacttcagcggcgacagaagagagttccacgagttcatcgtgctgtgccagctgaccctgcagagctaccccagaatgttctacaacgacagactgagagtgggctacgtgatcaaccacctgagcggcctggccctggagtgggccaaggccctgctgcaggagaacagccccctgatcggcgacttccccgccttcctggaggccatgagcgaggtgttcgagtacagacaggccctgagagtggccgaggaggccatgttcaccatcagacagggcggcagaagcgccaccgagtacatcgacgagttccagagcctggtgcccatcctgggctggcccgacgaggtgctgcaggcccacctgtgccagggcctgaacgaggagatcagacactacctgttcagagtgccccagcccgacagcctggacagcctgatcgtgctgatcctgcagatcgaggagaagctggccgagagaagagccatgctgagactgccccccgaggccagacccagaaacctgacctggatcgacagccccgcccccgagagatggatggtgagcagctggctgcccagcgaggtgcaccccgacatcaacagagcccacctgttcctgctgctgatggtgagagtgaacccctaccacagcgtggccgtgcaggccctggtggacagcggcgccgacggcaacttcatggacgagaagttcgcccaggagcactacgtggagctgtacgagaagccctacccccagcccgtgcagagcgtggacggcagcctgatcggcaacgagcccgtgtggctgtacaccgagcccctggtgtgcatccaccagaaccaccaggagagcatcgagttcgacatcgtgcccagccccaacttcagcgtggtgctgggcatcagatggctgagagtgcacgcccccgaggtggactggatcaagggcagatgcaccttccacagcccctactgcctgaagaactgcttcagacccccccccccctgcatcgccctggagagacacggcatgagcctgctgcccggcctgccccacccctacagcgacctggccgacgtgttcaaccccaaggaggccgacgacgagaccagcgaccagcccagcagcgacggcagcgacgacctgagcgagagcgagcccagcgagctgcagcaggccggcgacagcgaccacagcgagaccttctacgagtgccccagcaccgccccctgggagcccgtgggcgccagaatgcaggagagagccagactgcaggaggagtactgggacctgcaggacatgctgaccaacagacaggactacatccagatgatccccgagctgttcgaccagctgcacggcgccgagtggttcaccaagctggagctgagaggcaccatcgtggaggagagcgtgaacggccacagaaccgaggacgtgtggaaggccgccttcggcctggagctggaggagatgaagagctaccagcccttcgccctgagccccgaccccatcatcccccagaacgtgatccacttcatcctgaaggacatgctgggcttcttcgtgctgagctacggccaggaggtgctgatctacagcatgagccaggaggagcacctgcaccacgtgagacaggtgctggtgagattcagacaccacaacgtgtactgcagcctggacaagagccagttccacagacagaccgtggagttcctgggcttcgtggtgacccccaagggcgtgaagctgaacaagaacgtgatgaccatcatcaccggctaccccacccccggcagcaagctgagcctgagaaacttcatcgagttcgtgttcccctacagacacttcgtggagagattcagcatcatcgccgagcccctggtgagacagctgctgagcagctaccagttctactggggcgtggaggagcaggaggccttcgagtgcctgaagagagccttcagaaaggcccccctgctgcaccaccccaagccccagaaccccttctacctggagaccggcgtgaccggcaccgccctgcacgccagcctgatccagatcgacgaccagaccggcaagagagcctgctgcgccttctacagcagaaacatcagccccatcgaggtggagtacagccaggccgagatgaagatcctgcccatcagagccgccttcatggtgtggtgcagatacctggagaacaccgaggagcccatcatgatcctgctgaacaccgaggacctggccagcctgaacaacgacagactgaccgtgctgctgcccggccactgggtgttcttcttcagccacttcaacttcgacgtgatggagctgcccgagcaggacggcggcagagccctgccccccgtgagaaacctgagatggagaagagccttccagagaaacaccgccgccagacagaccctgctgctggccagcagaggcttccccagagaccccagcaccgagagcggcgaggaggagaacgaggagcaggacgagctgaacgagcagatcctgagacaggagctgctggccatgatccccatcgaccagatcctgaacagcttcctggcccacttcagcatggcccagatcagagccgtgatcctgcacttcttcagaggcctgctgtactggaagaacaccctggccctggccgccatcctggtgctgctgagagtgagacagtgcctgagcctgagacccgcccccgccatgagagtggccagaccccagccccagagaagcctgagactgatcctggacagcagcctgatcgccggcagcagcatcaccaccgccatcacccagctgctgacccagatgcccgccctggtgggcgccaacaccatccccgcccaggagctggccgagctgttcctgggccccggcagatggcagagaaacgccctgcacagccaggcccacagaggcctgcagttcacccccggcttctggctgaccctgtgcgagttcttcggcgtgagagtgaccccccaggagggccacctgcccgccctgagacagaacagatacctggagctgcacgtggtgggcgacgaggacgtggtgctgagagaggccctgcaggacgacctgcagagatacagacagtgcggcctgcacgacggcctgcaggacaccagccaggacaagcaggacaacgacgtgcaggaggccccccccagccacaccgccgccacccacccccccagacccagacacctgatggacccccaggtgctggagttcctgggcagcagactgctgcacatccacagcgccgacggccagctgcacctgctgagcagagagcaggccgccagagccctgagccagttcctgaccctgatctacagaagagccctgcccatccccgcctgggagagccagcccagagagcaggccagactggaggagctgcccgacgaggacgaggacgccaacctggactag

SEQ ID NO: 49970 - protein, 588 aa, Artificial Sequence
  derived and/or modified sequence
MSAGEVERLVSELSGGTGGDEEEEWLYGDENEVERPEEENASANPPSGIEDETAENGVPKPKVTETEDDSDSDSDDDEDDVHVTIGDIKTGAPQYGSYGTAPVNLNIKTGGRVYGTTGTKVKGVDLDAPGSINGVPLLEVDLDSFEDKPWRKPGADLSDYFNYGFNEDTWKAYCEKQKRIRMGLEVIPVTSTTNKITAEDCTMEVTPGAEIQDGRFNLFKVQQGRTGNSEKETALPSTKAEFTSPPSLFKTGLPPSRNSTSSQSQTSTASRKANSSVGKWQDRYGRAESPDLRRLPGAIDVIGQTITISRVEGRRRANENSNIQVLSERSATEVDNNFSKPPPFFPPGAPPTHLPPPPFLPPPPTVSTAPPLIPPPGIPITVPPPGFPPPPGAPPPSLIPTIESGHSSGYDSRSARAFPYGNVAFPHLPGSAPSWPSLVDTSKQWDYYARREKDRDRERDRDRERDRDRDRERERTRERERERDHSPTPSVFNSDEERYRYREYAERGYERHRASREKEERHRERRHREKEETRHKSSRSNSRRRHESEEGDSHRRHKHKKSKRSKEGKEAGSEPAPEQESTEATPAE

SEQ ID NO: 49971 - DNA, 2180 bp, Artificial Sequence
  derived and/or modified sequence
atgcgcagacggacctgcgctggaggcttcatctttgccgccgctgccgtcgccttcctgggattggagtctcgagctttcttcgttcgttcgtcggcgggttcgcgcccttctcgcgcctcggggctgcgaggctggggaaggggttggagggggctgttgatcgccgcgtttaagttgcgctcggggcggccatgtcggccggcgaggtcgagcgcctagtgtcggagctgagcggcgggaccggaggggatgaggaggaagagtggctctatggcgatgaaaatgaagttgaaaggccagaagaagaaaatgccagtgctaatcctccatctggaattgaagatgaaactgctgaaaatggtgtaccaaaaccgaaagtgactgagaccgaagatgatagtgatagtgacagcgatgatgatgaagatgatgttcatgtcactataggagacattaaaacgggagcaccacagtatgggagttatggtacagcacctgtaaatcttaacatcaagacagggggaagagtttatggaactacagggacaaaagtcaaaggagtagaccttgatgcacctggaagcattaatggagttccactcttagaggtagatttggattcttttgaagataaaccatggcgtaaacctggtgctgatctttctgattattttaattatgggtttaatgaagatacctggaaagcttactgtgaaaaacaaaagaggatacgaatgggacttgaagttataccagtaacctctactacaaataaaattacggccgaagactgtactatggaagttacaccaggtgcagagatccaagatggcagattcaatctttttaaggtacagcagggaagaactggaaactcagagaaagaaactgcccttccatctacaaaagctgagtttacttctcctccttctttgttcaagactgggcttccaccgagcagaaacagcacttcttctcagtctcagacaagtactgcctccagaaaagccaattcaagcgttgggaagtggcaggatcgatatgggagggccgaatcacctgatctaaggagattacctggggcaattgatgttatcggtcagactataactatcagccgagtagaaggcaggcgacgggcaaatgagaacagcaacatacaggtcctttctgaaagatctgctactgaagtagacaacaattttagcaaaccacctccgtttttccctccaggagctcctcccactcaccttccacctcctccatttcttccacctcctccgactgtcagcactgctccacctctgattccaccaccgggtattccaataactgtaccacctccaggttttcctcctccaccaggcgctccacctccatctcttataccaacaatagaaagtggacattcctctggttatgatagtcgttctgcacgtgcatttccatatggcaatgttgcctttccccatcttcctggttctgctccttcgtggcctagtcttgtggacaccagcaagcagtgggactattatgccagaagagagaaagaccgagatagagagagagacagagacagagagcgagaccgtgatcgggacagagaaagagaacgcaccagagagagagagagggagcgtgatcacagtcctacaccaagtgttttcaacagcgatgaagaacgatacagatacagggaatatgcagaaagaggttatgagcgtcacagagcaagtcgagaaaaagaagaacgacatagagaaagacgacacagggagaaagaggaaaccagacataagtcttctcgaagtaatagtagacgtcgccatgaaagtgaagaaggagatagtcacaggagacacaaacacaaaaaatctaaaagaagcaaagaaggaaaagaagcgggcagtgagcctgcccctgaacaggagagcaccgaagctacacctgcagaataggcatggttttggccttttgtgtatattagtaccagaagtagatactataaatcttgttatttttctggataatgtttaagaaatttaccttaaatcttgttctgtttgttagtatgaaaagttaactttttttccaaaataaaagagtgaatttttcatgttaagttaaaaatctttgtcttgtactatttcaaaaataaaaagacagcaatgacttta

SEQ ID NO: 49972 - DNA, 1767 bp, Artificial Sequence
  derived and/or modified sequence
atgagtgctggtgaagtcgagcgactggttagcgaactgtctggtggcacagggggagacgaagaggaggagtggctatacggggatgagaatgaagtagaacggcccgaggaggagaacgcttccgcgaacccgccatcaggcattgaagatgaaaccgctgagaatggtgtaccaaagccaaaagtgacagaaaccgaagatgacagcgactctgattctgacgacgacgaggatgacgtgcacgtcacaattggcgacatcaaaactggagccccacagtacggctcatacggcacagcacccgtgaaccttaatataaagactggcgggagggtctacggtaccacaggcactaaagtcaagggcgtcgacttggacgctcccgggagtatcaacggagttccgctgcttgaagtggatctcgatagtttcgaagataagccctggcgaaagcctggagcagacttgagcgactacttcaactacggcttcaatgaagacacctggaaggcctactgtgaaaaacagaagcggattaggatggggcttgaagttattccagtgacctcgaccaccaacaagatcacagcagaagattgcaccatggaggttacaccaggtgcagaaattcaggacggcaggttcaatctgtttaaggttcagcagggccgaacgggcaattccgagaaggaaaccgccctgccttcaaccaaggctgaattcactagcccacctagtcttttcaagaccggtctgccgcctagccgcaatagcactagctcacagtctcagacgtccacggcctcccgaaaagctaacagctccgtcggaaagtggcaggacaggtatggcagagccgaatccccagacctgcgacgccttccgggagcaattgatgtgatcgggcaaaccattaccattagcagagtggaaggccgccgcagagccaatgagaattcaaacatccaggttctatcggagcggtccgccaccgaagttgataataatttcagtaaacctccacctttcttcccacctggggcgcccccaacgcacctgccgcctcccccctttctgcctccacctcctacagttagcaccgcaccacctctgattcccccgcccggcattcccatcactgtgccccccccagggttcccaccccccccaggcgccccacctccttcactgatcccaaccatcgaatccgggcactccagtgggtacgacagtcggagcgcccgcgcttttccctacgggaacgttgcattcccccatctgcctggcagcgccccaagctggccgagtctggttgacacctctaagcagtgggactactatgctcgtcgggagaaagatagagaccgcgagcgagatcgcgaccgcgagcgggatagggaccgtgaccgggaaagagagaggacaagggaaagagaaagagagcgcgaccacagtccaactccaagcgtgtttaactctgacgaagaaaggtataggtatcgggagtacgccgagcgggggtacgagcggcaccgggcctctcgcgagaaggaggaaagacacagagagcggagacatcgagagaaagaagagactcgacacaagagcagccggagcaattcacgccggaggcatgagagtgaggagggcgacagtcaccgacgtcacaagcataagaaatctaaacgaagtaaggaaggcaaagaggccggttccgagcctgctcctgaacaggagtctacagaggctaccccagcggaatag

SEQ ID NO: 49973 - DNA, 1767 bp, Artificial Sequence
  derived and/or modified sequence
atgtctgctggggaggtggagcggctggtgtctgagctgagcggcggcactggaggagatgaggaggaggagtggctgtatggagatgaaaatgaggtggagaggcctgaggaggagaatgccagcgccaaccccccatctggaattgaagatgaaacagcagaaaatggagtgcccaagcccaaggtgacagaaacagaagatgacagcgacagcgacagtgatgatgatgaagatgatgtgcacgtgaccatcggggacatcaagacaggagccccccagtatggcagctatggaacagcccctgtgaacctgaacatcaagacaggaggccgggtgtatggcaccaccggcaccaaggtgaagggcgtggacctggatgcccctggcagcatcaatggagtgcccctgctggaggtggacctggacagctttgaggacaagccctggaggaagccaggagctgacctgagtgactacttcaactacggcttcaatgaagacacctggaaggcctactgtgagaagcagaagaggatccgcatgggcctggaggtgattcctgtgaccagcaccaccaacaagatcacagctgaggactgcaccatggaggtgaccccaggagctgagatccaggacggccgcttcaacctcttcaaggtgcagcagggccgcacaggcaacagcgagaaggagacagccctgcccagcaccaaggccgagttcaccagcccccccagcctcttcaagacaggcctgccccccagcaggaacagcaccagcagccagagccagaccagcacagccagcaggaaggccaacagctctgtgggcaagtggcaggacagatatggccgggcagagagcccagacctgcggcggctgcccggggccattgatgtgattggccagaccatcaccatcagccgggtggagggcagaagaagagccaatgaaaacagcaacatccaggtgctgtctgagaggtctgccacagaggtggacaacaacttcagcaagcccccacccttcttccccccaggggccccacccacccacctgcccccaccacccttcctgcccccaccacccaccgtgtccacagccccacccctcatccccccacctggcatccccatcaccgtgcccccacctggcttccccccacctcctggggcccccccacccagcctcatccccaccatcgagagcggccacagcagcggctatgacagccgcagcgcccgggccttcccctatggaaatgtggccttcccccacctgcccggcagcgcccccagctggcccagcctggtggacaccagcaagcagtgggactactatgcccggcgggagaaggaccgggaccgggagcgggaccgggaccgggagcgggaccgggaccgggaccgggagcgggagaggacccgggagcgggagcgggagcgggaccacagccccacccccagcgtcttcaacagtgatgaggagcgctaccgctaccgggagtatgcagagcggggctatgagcggcaccgggccagccgggagaaggaggagcggcaccgggagaggaggcaccgggagaaggaggagaccaggcacaagagcagccgcagcaacagcagaagaagacatgagagcgaggagggggacagccacagaagacacaagcacaagaagagcaagaggagcaaggagggcaaggaggccggcagcgagcccgcccctgagcaggagagcacagaggccaccccagctgagtag

SEQ ID NO: 49974 - DNA, 1767 bp, Artificial Sequence
  derived and/or modified sequence
atgagcgccggcgaggtggagcggctggtgagcgagctgagcggcggtactggcggcgatgaggaagaggagtggctgtacggggacgaaaatgaggtcgagcgtcctgaggaggagaacgcttccgccaatccaccatcaggtatcgaagacgagacagcggagaacggcgtgcccaaaccaaaggtgacggaaaccgaggacgacagcgactctgactcagacgatgacgaggatgatgtgcacgtcaccatcggtgatatcaagacaggcgccccgcagtatggcagttatggcaccgcacctgttaatctgaatattaaaaccggagggcgtgtgtacggcactaccggaaccaaagtgaagggagtggacctcgatgcccctgggtctatcaacggggttccgctgttggaagtggacctcgactctttcgaggataagccctggcgcaagcccggcgccgatttgtccgattatttcaattacggctttaacgaagacacatggaaggcctattgtgagaaacaaaagcggatcaggatggggctggaagtgattccagtcacctccaccacaaataagattacagctgaggactgcaccatggaagtcacacctggggctgagatccaggatggacggtttaatctctttaaagtgcaacagggcagaaccggaaattccgagaaagaaactgcactgcccagcaccaaggccgaattcacctcccccccatctctcttcaagaccggactgccaccaagtagaaactccacctcatctcaatctcaaacgtcaaccgccagtagaaaggccaactcctccgtggggaaatggcaggacaggtatggtcgagcagagtcccccgacctccggcggctgccgggggccatcgacgtaataggacagactatcacaatttcccgcgtggaggggcgtcgtagggccaatgaaaactcaaacatccaagtcttgagcgagagatccgctactgaagttgataataatttttccaagcccccacctttctttccccccggtgcgccccccacccatctgccacccccaccatttttgcctccccctcccactgtctccaccgcaccacccctgatcccacccccaggaatccctatcacagtacccccccctggtttccctccaccacccggcgcccctcctccctccctcataccgacaattgagtctggccactcttcagggtacgattcccgttccgccagggcctttccttatggtaacgtagcctttccccacctacccggcagtgctccgagctggccctccttggtcgatacctctaaacaatgggattattatgcccgacgggaaaaagatagggacagggagcgggatcgcgacagagagcgcgacagagatagggaccgcgagcgagagcgcacacgcgaacgggaacgggagagggatcacagtcctacacccagtgtattcaacagtgacgaggagcggtacagatatagagagtacgctgaaagaggttacgagcgccacagagcgagtagggagaaagaggagcgccaccgtgaaaggcgacaccgggaaaaggaggagacccggcataagtcgtcacgcagcaatagccgccggagacacgagagcgaggaaggggacagccatcgtcggcataagcacaagaagtctaaaagatctaaagagggcaaggaagccggcagcgaaccagctccagaacaggaatcgacagaggctacacctgccgaatag

SEQ ID NO: 49975 - DNA, 1767 bp, Artificial Sequence
  derived and/or modified sequence
atgtcagctggcgaagtggaacgactggtatcagagctctccgggggaaccgggggagacgaagaagaagaatggttatacggagacgaaaatgaggtggaacgccctgaggaggagaacgccagcgcaaatccgccatccggaatcgaggacgagaccgcagaaaatggtgtgcctaaaccaaaggtcaccgaaacagaggacgattctgatagtgatagcgatgacgacgaagacgacgttcacgtaaccattggtgacatcaaaactggagcaccacagtatggttcgtacggaacagcgcctgttaacctgaatatcaagaccggcggtagggtttatggtaccacggggacaaaggtgaagggtgtagatttggatgcacctggcagtatcaacggcgttccactgctggaggtcgatctcgacagttttgaagacaagccttggcgaaagccaggggcagatctgtccgattatttcaattatggctttaacgaagacacctggaaagcctattgtgagaagcagaagcgtatcagaatggggttggaagttatacccgtcacatctaccacaaacaagataaccgcagaggactgcactatggaggtgacccctggggcagagatccaggacggcaggtttaatctcttcaaggtgcagcagggacgcaccgggaattccgagaaggagacagccctgccctccactaaggccgaattcacgtccccgccatccttatttaaaacaggactgcctccatctcgcaattctacgtcctcccagtcacagacgagcactgcgagtcggaaggcgaattcctccgtgggcaagtggcaggaccgctacgggagagctgagtccccagatctcaggaggctacctggagccattgatgtcataggacaaacaatcacaataagtagagtagaaggaaggcgacgtgctaacgagaactcgaatattcaagtcctgagcgaaaggagcgctaccgaggtggataataatttttctaagccgccacccttcttcccccctggtgcccctcccacccacctcccgccaccacctttcctccccccacccccaaccgtaagcacagctccgccactgattccaccgcctggaatccccatcaccgtacctcccccaggtttccctccccctccgggtgctccccctccatccctcattcccaccatcgagtctggccattcttctgggtacgattctaggagtgccagggcatttccctacgggaatgtcgcttttccacacctacccggttcagctccttcttggccgagcctggtggacacatccaagcagtgggattactacgcccgtcgagagaaggatcgcgaccgagagagagatagagatcgcgaacgcgacagagatcgggaccgggagcgcgagcgaactcgtgagcgagaaagagaaagagatcactcccctacaccaagtgtttttaatagtgacgaagaacgatatcgctatcgggaatacgctgaacgaggatacgaaagacaccgcgcaagccgcgagaaggaagagcgccaccgggaaaggagacatcgcgagaaggaagagactaggcacaagagtagtcgctcgaattctaggaggcggcacgaatccgaagaaggtgacagccatagacgccataagcacaaaaagtcaaaacgctccaaggagggcaaagaagctggctccgagccggctccagaacaggagagtactgaggccacccccgcagagtag

SEQ ID NO: 49976 - DNA, 1767 bp, Artificial Sequence
  derived and/or modified sequence
atgagcgccggcgaggtggagagactggtgagcgagctgagcggcggcaccggcggcgacgaggaggaggagtggctgtacggcgacgagaacgaggtggagagacccgaggaggagaacgccagcgccaacccccccagcggcatcgaggacgagaccgccgagaacggcgtgcccaagcccaaggtgaccgagaccgaggacgacagcgacagcgacagcgacgacgacgaggacgacgtgcacgtgaccatcggcgacatcaagaccggcgccccccagtacggcagctacggcaccgcccccgtgaacctgaacatcaagaccggcggcagagtgtacggcaccaccggcaccaaggtgaagggcgtggacctggacgcccccggcagcatcaacggcgtgcccctgctggaggtggacctggacagcttcgaggacaagccctggagaaagcccggcgccgacctgagcgactacttcaactacggcttcaacgaggacacctggaaggcctactgcgagaagcagaagagaatcagaatgggcctggaggtgatccccgtgaccagcaccaccaacaagatcaccgccgaggactgcaccatggaggtgacccccggcgccgagatccaggacggcagattcaacctgttcaaggtgcagcagggcagaaccggcaacagcgagaaggagaccgccctgcccagcaccaaggccgagttcaccagcccccccagcctgttcaagaccggcctgccccccagcagaaacagcaccagcagccagagccagaccagcaccgccagcagaaaggccaacagcagcgtgggcaagtggcaggacagatacggcagagccgagagccccgacctgagaagactgcccggcgccatcgacgtgatcggccagaccatcaccatcagcagagtggagggcagaagaagagccaacgagaacagcaacatccaggtgctgagcgagagaagcgccaccgaggtggacaacaacttcagcaagcccccccccttcttcccccccggcgccccccccacccacctgccccccccccccttcctgccccccccccccaccgtgagcaccgccccccccctgatccccccccccggcatccccatcaccgtgcccccccccggcttcccccccccccccggcgcccccccccccagcctgatccccaccatcgagagcggccacagcagcggctacgacagcagaagcgccagagccttcccctacggcaacgtggccttcccccacctgcccggcagcgcccccagctggcccagcctggtggacaccagcaagcagtgggactactacgccagaagagagaaggacagagacagagagagagacagagacagagagagagacagagacagagacagagagagagagagaaccagagagagagagagagagagagaccacagccccacccccagcgtgttcaacagcgacgaggagagatacagatacagagagtacgccgagagaggctacgagagacacagagccagcagagagaaggaggagagacacagagagagaagacacagagagaaggaggagaccagacacaagagcagcagaagcaacagcagaagaagacacgagagcgaggagggcgacagccacagaagacacaagcacaagaagagcaagagaagcaaggagggcaaggaggccggcagcgagcccgcccccgagcaggagagcaccgaggccacccccgccgagtag

SEQ ID NO: 49977 - protein, 520 aa, Artificial Sequence
  derived and/or modified sequence
MSAGEVERLVSELSGGTGGDEEEEWLYGDENEVERPEEENASANPPSGIEDETAENGVPKPKVTETEDDSDSDSDDDEDDVHVTIGDIKTGAPQYGSYGTAPVNLNIKTGGRVYGTTGTKVKGVDLDAPGSINGVPLLEVDLDSFEDKPWRKPGADLSDYFNYGFNEDTWKAYCEKQKRIRMGLEVIPVTSTTNKITVQQGRTGNSEKETALPSTKAEFTSPPSLFKTGLPPSRRLPGAIDVIGQTITISRVEGRRRANENSNIQVLSERSATEVDNNFSKPPPFFPPGAPPTHLPPPPFLPPPPTVSTAPPLIPPPGFPPPPGAPPPSLIPTIESGHSSGYDSRSARAFPYGNVAFPHLPGSAPSWPSLVDTSKQWDYYARREKDRDRERDRDRERDRDRDRERERTRERERERDHSPTPSVFNSDEERYRYREYAERGYERHRASREKEERHRERRHREKEETRHKSSRSNSRRRHESEEGDSHRRHKHKKSKRSKEGKEAGSEPAPEQESTEATPAE

SEQ ID NO: 49978 - DNA, 1878 bp, Artificial Sequence
  derived and/or modified sequence
gccttcctgggattggagtctcgagctttcttcgttcgttcgtcggcgggttcgcgcccttctcgcgcctcggggctgcgaggctggggaaggggttggagggggctgttgatcgccgcgtttaagttgcgctcggggcggccatgtcggccggcgaggtcgagcgcctagtgtcggagctgagcggcgggaccggaggggatgaggaggaagagtggctctatggcgatgaaaatgaagttgaaaggccagaagaagaaaatgccagtgctaatcctccatctggaattgaagatgaaactgctgaaaatggtgtaccaaaaccgaaagtgactgagaccgaagatgatagtgatagtgacagcgatgatgatgaagatgatgttcatgtcactataggagacattaaaacgggagcaccacagtatgggagttatggtacagcacctgtaaatcttaacatcaagacagggggaagagtttatggaactacagggacaaaagtcaaaggagtagaccttgatgcacctggaagcattaatggagttccactcttagaggtagatttggattcttttgaagataaaccatggcgtaaacctggtgctgatctttctgattattttaattatgggtttaatgaagatacctggaaagcttactgtgaaaaacaaaagaggatacgaatgggacttgaagttataccagtaacctctactacaaataaaattacggtacagcagggaagaactggaaactcagagaaagaaactgcccttccatctacaaaagctgagtttacttctcctccttctttgttcaagactgggcttccaccgagcaggagattacctggggcaattgatgttatcggtcagactataactatcagccgagtagaaggcaggcgacgggcaaatgagaacagcaacatacaggtcctttctgaaagatctgctactgaagtagacaacaattttagcaaaccacctccgtttttccctccaggagctcctcccactcaccttccacctcctccatttcttccacctcctccgactgtcagcactgctccacctctgattccaccaccgggttttcctcctccaccaggcgctccacctccatctcttataccaacaatagaaagtggacattcctctggttatgatagtcgttctgcacgtgcatttccatatggcaatgttgcctttccccatcttcctggttctgctccttcgtggcctagtcttgtggacaccagcaagcagtgggactattatgccagaagagagaaagaccgagatagagagagagacagagacagagagcgagaccgtgatcgggacagagaaagagaacgcaccagagagagagagagggagcgtgatcacagtcctacaccaagtgttttcaacagcgatgaagaacgatacagatacagggaatatgcagaaagaggttatgagcgtcacagagcaagtcgagaaaaagaagaacgacatagagaaagacgacacagggagaaagaggaaaccagacataagtcttctcgaagtaatagtagacgtcgccatgaaagtgaagaaggagatagtcacaggagacacaaacacaaaaaatctaaaagaagcaaagaaggaaaagaagcgggcagtgagcctgcccctgaacaggagagcaccgaagctacacctgcagaataggcatggttttggccttttgtgtatattagtaccagaagtagatactataaatcttgttatttttctggataatgtttaagaaatttaccttaaatcttgttctgtttgttagtatgaaaagttaactttttttccaaaataaaagagtgaatttttcatgttaagttaaaaa

SEQ ID NO: 49979 - DNA, 1563 bp, Artificial Sequence
  derived and/or modified sequence
atgtccgcgggcgaagtcgaacggctagtctctgagctcagcggtggcaccgggggagatgaggaagaggagtggttgtacggggacgaaaatgaagtggaacgtcccgaggaggaaaatgcttctgccaacccgccaagtgggatcgaggacgagaccgcggagaacggagttccaaaacctaaggtcactgagaccgaagacgactccgattccgacagcgatgacgacgaagatgacgtgcacgtcactatcggagacattaaaacaggtgctccccagtatgggagttacggtactgctcctgttaacttgaacatcaaaacaggcggccgcgtgtacggcacgaccgggacgaaggtgaaaggcgtggaccttgacgctccgggatctatcaacggtgttccgctgctggaggtcgatctggattccttcgaagacaagccttggagaaagcccggcgcggacctaagcgattactttaattatggcttcaacgaggatacctggaaggcctactgcgaaaaacagaaacggattcgcatgggcttagaggttataccagtcacaagcaccacaaataaaattaccgtccaacagggccgaacaggtaacagcgaaaaagagacagcattgccgagcacaaaggccgagtttacaagcccccccagcctgtttaaaacgggactgccgccatcaaggaggttgccgggcgctattgacgtgatagggcaaacaatcacgattagtcgtgtcgaaggcagacggagggctaatgaaaactccaacattcaggtactctcagagcgcagtgccacagaggttgacaacaatttttccaaaccccctcccttcttcccacctggcgccccccctacgcatctcccacctccacccttcctgcccccacctcccacggtgagcacagcccctcctcttatccccccccctgggttcccacccccgcctggcgccccgcctcctagccttattccgactatcgaaagtggccacagctccgggtatgatagtaggtctgcccgggcgtttccctacggcaatgtggcctttccacacctcccaggctcggctccaagctggccttcgcttgtggacacctccaagcagtgggactactatgccagacgcgaaaaagatagggacagagagcgcgacagggaccgcgaacgagaccgagatcgggacagggaaagagagcgcacaagagaaagagagagagagcgcgatcattctcctacccccagtgtctttaattccgacgaggagaggtataggtaccgggagtatgctgagaggggatacgagaggcacagagccagtcgcgaaaaggaagagcggcacagagagagaagacaccgtgagaaagaagaaacacggcacaaatcaagcaggagtaacagtaggagacgccacgaaagtgaagaaggagattctcaccgcagacacaagcataaaaaatctaaacgctctaaggagggtaaggaggctggcagcgaacctgccccagaacaggagtcaactgaggcaacccctgccgagtag

SEQ ID NO: 49980 - DNA, 1563 bp, Artificial Sequence
  derived and/or modified sequence
atgtctgctggggaggtggagcggctggtgtctgagctgagcggcggcactggaggagatgaggaggaggagtggctgtatggagatgaaaatgaggtggagaggcctgaggaggagaatgccagcgccaaccccccatctggaattgaagatgaaacagcagaaaatggagtgcccaagcccaaggtgacagaaacagaagatgacagcgacagcgacagtgatgatgatgaagatgatgtgcacgtgaccatcggggacatcaagacaggagccccccagtatggcagctatggaacagcccctgtgaacctgaacatcaagacaggaggccgggtgtatggcaccaccggcaccaaggtgaagggcgtggacctggatgcccctggcagcatcaatggagtgcccctgctggaggtggacctggacagctttgaggacaagccctggaggaagccaggagctgacctgagtgactacttcaactacggcttcaatgaagacacctggaaggcctactgtgagaagcagaagaggatccgcatgggcctggaggtgattcctgtgaccagcaccaccaacaagatcaccgtgcagcagggccgcactggaaacagcgagaaggagacagccctgcccagcaccaaggccgagttcaccagcccccccagcctcttcaagacaggcctgccccccagccggcggctgcccggggccattgatgtgattggccagaccatcaccatcagccgggtggagggcagaagaagagccaatgaaaacagcaacatccaggtgctgtctgagaggtctgccacagaggtggacaacaacttcagcaagcccccacccttcttccccccaggggccccacccacccacctgcccccaccacccttcctgcccccaccacccaccgtgtccacagcccctcctctcatccccccacctggcttccccccacctcctggggcccccccacccagcctcatccccaccatcgagagcggccacagcagcggctatgacagccgcagcgcccgggccttcccctatggaaatgtggccttcccccacctgcccggcagcgcccccagctggcccagcctggtggacaccagcaagcagtgggactactatgcccggcgggagaaggaccgggaccgggagcgggaccgggaccgggagcgggaccgggaccgggaccgggagcgggagaggacccgggagcgggagcgggagcgggaccacagccccacccccagcgtcttcaacagtgatgaggagcgctaccgctaccgggagtatgcagagcggggctatgagcggcaccgggccagccgggagaaggaggagcggcaccgggagaggaggcaccgggagaaggaggagaccaggcacaagagcagccgcagcaacagcagaagaagacatgagagcgaggagggggacagccacagaagacacaagcacaagaagagcaagaggagcaaggagggcaaggaggccggcagcgagcccgcccctgagcaggagagcacagaggccaccccagctgagtag

SEQ ID NO: 49981 - DNA, 1563 bp, Artificial Sequence
  derived and/or modified sequence
atgagcgccggcgaggtggagcggctggtgagcgagctgagcggcggcacaggtggcgatgaagaggaagagtggctgtacggggatgaaaacgaagtggaaagacctgaagaggaaaacgccagtgcaaaccccccctcagggatagaagacgaaacagccgagaatggagtgcccaaacctaaagtaacagagacggaggatgacagcgattccgatagcgacgatgatgaggacgatgtgcacgtaaccatcggcgatattaagacgggagcacctcagtacggatcttatggcacagcacctgtgaacctgaacataaagaccggggggcgcgtttacggtaccacgggtaccaaggttaaaggagtggacctggatgcccctggatcgatcaacggcgtgccactgttggaagtggatctcgattcattcgaagacaagccttggcgcaaacccggcgcagacctatctgattacttcaactatggcttcaacgaagacacctggaaggcctattgcgagaaacagaaaagaattcggatgggcctggaggtcatccccgtgacttctacaactaacaagataacagtccagcagggacgtaccggtaactcagagaaagaaaccgctcttccgagcactaaagccgagttcacatcaccaccaagcctatttaaaacaggcttacccccgagcagacgactcccaggagccatcgacgtcattggacagacaataaccatttcccgggtggaggggcggcgtcgagcaaacgagaattctaacatacaagtactgagcgaaaggtccgcaacggaggtggacaacaacttcagcaagccaccccctttcttccccccaggcgcccctcctactcacctgcctccgccaccctttctacctcctccacctacagtgtccactgccccacctctgatcccccccccagggttccctccaccgccaggagctccccctccctcactgattcccacgatcgaatcagggcactcatcaggatacgatagtagaagcgcgcgcgccttcccatatggaaatgttgcttttcctcaccttcccggtagtgccccatcctggccgagtctggtggacacatcaaagcagtgggattattatgcacgtcgggaaaaggaccgagaccgtgaacgggacagagaccgtgaacgtgatcgggaccgggaccgagagcgggagcgaacgcgcgaacgggagagagaaagagaccacagtcccaccccttccgtgttcaacagtgatgaggaacgctataggtacagagaatacgccgagcgcggttatgagaggcatcgtgccagtcgggagaaggaagaacggcacagagagaggcggcatcgtgagaaggaggagaccagacataaaagttcaagaagtaattctcgcaggcggcacgagtccgaggagggcgacagtcaccggcgtcacaagcacaaaaagtcaaagcgctctaaggaggggaaagaggccggctccgagccagctcccgagcaggagtctacggaagccacgccggctgaatag

SEQ ID NO: 49982 - DNA, 1563 bp, Artificial Sequence
  derived and/or modified sequence
atgtctgctggggaggtggagcggctcgtatctgagctgtccgggggaactgggggtgacgaggaggaggagtggctctacggcgatgaaaacgaagtggaacgacccgaagaagagaacgcatcagcaaacccacccagtggcatagaagatgaaacagctgagaacggtgtaccaaaacccaaagtgactgagacagaggacgattctgattctgattctgacgacgacgaagatgatgtacatgtgaccatcggggacataaagaccggcgcaccgcagtacgggagctatggaaccgccccagtcaatctaaatatcaagacgggcggaagagtttacggaaccacagggactaaagtcaagggggtggaccttgacgcccctggctccataaatggcgtgccactccttgaggtggatcttgacagttttgaagataaaccatggcgcaaaccaggcgctgatctgtcagattacttcaactatggctttaacgaagatacctggaaggcttattgtgagaagcagaaacgcatccgcatggggcttgaagtaattcctgtcacctccactacaaacaaaattactgtgcagcaggggaggacaggcaatagcgaaaaagagactgcattacctagcactaaagccgagtttacgtcacccccatccttattcaagactggactccccccatcaagaaggctgccgggagcaatcgatgtgatagggcagactatcacgatcagccgagtcgagggacggaggcgcgcaaacgagaacagtaacattcaggtgctctccgagcgcagcgcaacagaggttgataataacttctccaagccccctcccttttttccaccaggagccccacccacgcatctgcctccacctccatttctgccccctcccccaactgtctctactgctccaccgctgattccgcctccaggctttccacccccacctggcgcacctccaccctcgctgatacctactatcgaatccggccactcctccggatacgactcgagatccgctcgagcttttccatacgggaacgtggcgtttccccatctgcccggtagcgcaccctcttggccctctctggtagacacttccaagcagtgggattattacgctcgtcgagaaaaagatcgtgacagggaaagagaccgggatcgggagagggacagagatagagatcgcgagcgagagcgcacccgagaaagagagagggaaagagaccactcgcccacacccagtgtgttcaactctgacgaagagcggtacaggtacagggagtacgcggaaagaggatacgaacggcaccgggcatcccgtgagaaggaggaacgccaccgcgagcggagacaccgcgagaaagaggagacgcggcacaagagcagtagaagcaacagcagacgaagacacgaatccgaggagggggactcccatcggagacacaagcataaaaaaagcaagagatcaaaggaggggaaagaggcaggctcagaacccgcacccgaacaggagtccacagaggccacgcctgccgaatag

SEQ ID NO: 49983 - DNA, 1563 bp, Artificial Sequence
  derived and/or modified sequence
atgagcgccggcgaggtggagagactggtgagcgagctgagcggcggcaccggcggcgacgaggaggaggagtggctgtacggcgacgagaacgaggtggagagacccgaggaggagaacgccagcgccaacccccccagcggcatcgaggacgagaccgccgagaacggcgtgcccaagcccaaggtgaccgagaccgaggacgacagcgacagcgacagcgacgacgacgaggacgacgtgcacgtgaccatcggcgacatcaagaccggcgccccccagtacggcagctacggcaccgcccccgtgaacctgaacatcaagaccggcggcagagtgtacggcaccaccggcaccaaggtgaagggcgtggacctggacgcccccggcagcatcaacggcgtgcccctgctggaggtggacctggacagcttcgaggacaagccctggagaaagcccggcgccgacctgagcgactacttcaactacggcttcaacgaggacacctggaaggcctactgcgagaagcagaagagaatcagaatgggcctggaggtgatccccgtgaccagcaccaccaacaagatcaccgtgcagcagggcagaaccggcaacagcgagaaggagaccgccctgcccagcaccaaggccgagttcaccagcccccccagcctgttcaagaccggcctgccccccagcagaagactgcccggcgccatcgacgtgatcggccagaccatcaccatcagcagagtggagggcagaagaagagccaacgagaacagcaacatccaggtgctgagcgagagaagcgccaccgaggtggacaacaacttcagcaagcccccccccttcttcccccccggcgccccccccacccacctgccccccccccccttcctgccccccccccccaccgtgagcaccgccccccccctgatccccccccccggcttcccccccccccccggcgcccccccccccagcctgatccccaccatcgagagcggccacagcagcggctacgacagcagaagcgccagagccttcccctacggcaacgtggccttcccccacctgcccggcagcgcccccagctggcccagcctggtggacaccagcaagcagtgggactactacgccagaagagagaaggacagagacagagagagagacagagacagagagagagacagagacagagacagagagagagagagaaccagagagagagagagagagagagaccacagccccacccccagcgtgttcaacagcgacgaggagagatacagatacagagagtacgccgagagaggctacgagagacacagagccagcagagagaaggaggagagacacagagagagaagacacagagagaaggaggagaccagacacaagagcagcagaagcaacagcagaagaagacacgagagcgaggagggcgacagccacagaagacacaagcacaagaagagcaagagaagcaaggagggcaaggaggccggcagcgagcccgcccccgagcaggagagcaccgaggccacccccgccgagtag

SEQ ID NO: 49984 - protein, 105 aa, Artificial Sequence
  derived and/or modified sequence
MFTCWWSYLRSTLAAVPGEASRVQQRKESKKPPAKLQPRALAGWLRPEDGGQAEGAEDELEVRFNAPFDVGIKLSGVQYQQHSQALGKFLQDILWEEAKEAPADK

SEQ ID NO: 49985 - DNA, 318 bp, Artificial Sequence
  derived and/or modified sequence
atgttcacctgttggtggtcctatcttcgtagcactctcgccgccgtgccgggcgaagcatcccgcgttcagcaacgcaaagaaagcaagaaaccccccgcaaaattgcagccccgcgccctggcaggatggctccgcccagaagatggtggacaggcagagggggctgaagacgagctggaagtgcgcttcaatgcaccttttgatgttggcatcaagctcagcggggtccagtaccaacagcatagccaagccctgggcaagtttctgcaagatattctgtgggaggaagccaaagaagcacccgctgacaaatag

SEQ ID NO: 49986 - DNA, 443 bp, Artificial Sequence
  derived and/or modified sequence
gtggatgtttacttgctggtggtcttatctaagatcaacattggcagctgtgcccggagaggcctccagggtccagcagagaaaggagtcgaagaagccaccagccaagctgcagccccgagctctagcaggctggctccgcccggaagatggaggtcaagcagaaggggcagaggatgaactggaagtccggttcaacgccccctttgatgttggaatcaagctgtcaggggttcagtaccagcagcacagccaggccctggggaagtttcttcaggacatcctctgggaagaggccaaagaggccccagccgacaagtgatcgcccacaagccttactcacctctctctaagtttagaagcgctcatctggcttttcgcttgcttctgcagcaactcccacgactgttgtacaagctcaggaggcgaataaatgttcaaac

SEQ ID NO: 49987 - DNA, 318 bp, Artificial Sequence
  derived and/or modified sequence
atgttcacctgctggtggagctacctgcggagcaccctggccgctgtgcctggagaggccagccgggtgcagcagaggaaggagagcaagaagcccccagccaagctgcagccccgggccctggccggctggctgcggccagaagatggcggccaggccgagggcgcagaagatgagctggaggtgcgcttcaatgccccctttgatgtgggcatcaagctgtctggagtgcagtaccagcagcacagccaggccctgggcaagttcctgcaggacatcctgtgggaggaggccaaggaggccccagctgacaagtag

SEQ ID NO: 49988 - DNA, 318 bp, Artificial Sequence
  derived and/or modified sequence
atgttcacctgctggtggagctacctgcggagcaccctggccgccgtccccggagaggcatcacgcgtgcagcagaggaaggaaagcaaaaagccgcctgccaagctgcagcctcgagcgttagccggctggctacgcccagaggatggtggacaggccgaaggtgcggaggatgaactggaggtcaggtttaatgctcctttcgatgtaggaatcaaactgagcggtgtgcaataccagcaacactcccaggccctggggaaatttctgcaggatattctatgggaagaggccaaggaggcacctgccgacaagtag

SEQ ID NO: 49989 - DNA, 318 bp, Artificial Sequence
  derived and/or modified sequence
atgttcacctgctggtggagttacttaaggagtacattagccgcagtgcctggcgaggccagtcgggtgcagcagagaaaagaatccaagaagccacctgctaaactgcagccgcgagccttggccggttggcttcgccctgaagacgggggtcaggctgagggtgcagaggatgagttagaagtacgctttaacgcccctttcgacgtcggaattaagctgtctggagtccagtaccaacagcattcacaggccctggggaagtttttacaggatatcttgtgggaggaagcgaaggaagctcccgctgacaagtag

SEQ ID NO: 49990 - DNA, 318 bp, Artificial Sequence
  derived and/or modified sequence
atgtttacttgctggtggagctacctgagatctaccctggcagctgtcccaggcgaagcctcccgtgtgcagcagcgcaaagagtcaaagaaacccccagcaaaactgcagccacgggcacttgctggatggttgagacctgaagacggcggacaggccgagggggccgaagatgagctggaagttcggttcaatgcgccattcgacgtggggatcaaactgtcaggcgtgcagtatcagcaacacagccaggcattaggcaaattccttcaagacatcctgtgggaggaagcaaaagaggctcccgctgataaatag

SEQ ID NO: 49991 - DNA, 318 bp, Artificial Sequence
  derived and/or modified sequence
atgttcacttgctggtggtcttatctgagatcaacactcgcagcagtcccgggcgaggccagccgggtgcagcaacgcaaagagtctaagaaacccccagccaaactccaaccccgcgcacttgccggatggctccgtcccgaggatggcgggcaggccgagggggcagaggatgagttagaggtaagattcaacgccccctttgacgtaggtatcaaactgtcaggagtccaatatcaacagcactcacaggctttagggaagtttctacaggacatcctttgggaggaggccaaagaggcccctgctgacaaatag

SEQ ID NO: 49992 - DNA, 318 bp, Artificial Sequence
  derived and/or modified sequence
atgttcacctgctggtggagctacctgagaagcaccctggccgccgtgcccggcgaggccagcagagtgcagcagagaaaggagagcaagaagccccccgccaagctgcagcccagagccctggccggctggctgagacccgaggacggcggccaggccgagggcgccgaggacgagctggaggtgagattcaacgcccccttcgacgtgggcatcaagctgagcggcgtgcagtaccagcagcacagccaggccctgggcaagttcctgcaggacatcctgtgggaggaggccaaggaggcccccgccgacaagtag

SEQ ID NO: 49993 - protein, 104 aa, Artificial Sequence
  derived and/or modified sequence
MFTCWWSYLRSTLAAVPGEASRVQRKESKKPPAKLQPRALAGWLRPEDGGQAEGAEDELEVRFNAPFDVGIKLSGVQYQQHSQALGKFLQDILWEEAKEAPADK

SEQ ID NO: 49994 - DNA, 315 bp, Artificial Sequence
  derived and/or modified sequence
atgttcacgtgctggtggagctaccttaggtcaaccctggccgccgtgcccggggaagcaagccgtgttcaacggaaggagagcaaaaaacctccggcaaaattgcaaccaagggcccttgctggctggctgagaccggaggatggagggcaggcagagggagccgaagacgagctggaggtccgctttaacgctcctttcgatgttggtatcaaattgtcgggcgttcaatatcagcagcactctcaggcactcgggaaatttctgcaggatatcctgtgggaggaggccaaagaggccccagcggacaagtag

SEQ ID NO: 49995 - DNA, 440 bp, Artificial Sequence
  derived and/or modified sequence
gtggatgtttacttgctggtggtcttatctaagatcaacattggcagctgtgcccggagaggcctccagggtccagagaaaggagtcgaagaagccaccagccaagctgcagccccgagctctagcaggctggctccgcccggaagatggaggtcaagcagaaggggcagaggatgaactggaagtccggttcaacgccccctttgatgttggaatcaagctgtcaggggttcagtaccagcagcacagccaggccctggggaagtttcttcaggacatcctctgggaagaggccaaagaggccccagccgacaagtgatcgcccacaagccttactcacctctctctaagtttagaagcgctcatctggcttttcgcttgcttctgcagcaactcccacgactgttgtacaagctcaggaggcgaataaatgttcaaac

SEQ ID NO: 49996 - DNA, 315 bp, Artificial Sequence
  derived and/or modified sequence
atgttcacctgctggtggagctacctgcggagcaccctggccgctgtgcctggagaggccagccgggtgcagaggaaggagagcaagaagcccccagccaagctgcagccccgggccctggccggctggctgcggccagaagatggcggccaggccgagggcgcagaagatgagctggaggtgcgcttcaatgccccctttgatgtgggcatcaagctgagcggcgtgcagtaccagcagcacagccaggccctgggcaagttcctgcaggacatcctgtgggaggaggccaaggaggccccagctgacaagtag

SEQ ID NO: 49997 - DNA, 315 bp, Artificial Sequence
  derived and/or modified sequence
atgttcacctgctggtggagctacctgcggagcaccctggccgccgttcctggtgaagcttctcgagtacagaggaaggagtcgaaaaagcctcccgctaagttgcagcccagagccctggccggatggctgcgccctgaagatggagggcaggccgagggagctgaagacgagcttgaagtcagatttaacgccccctttgatgtcgggatcaaactgagcggtgtgcagtatcagcagcacagtcaggcactgggcaagtttctgcaagatattctttgggaggaggctaaagaggccccagccgacaaatag

SEQ ID NO: 49998 - DNA, 315 bp, Artificial Sequence
  derived and/or modified sequence
atgtttacatgctggtggagctatctgcgatccaccttggctgcggtgccaggcgaggcctctcgtgtgcagcgaaaagaatctaagaaacccccagcaaaactccagcccagggctcttgctggctggctgagaccggaggatggagggcaagccgagggcgctgaggacgagctcgaagttaggtttaatgccccttttgatgttgggattaagctcagcggcgttcagtaccagcagcatagtcaagcactcggcaagttcttacaggacatcctgtgggaggaagccaaagaggccccagcggataagtag

SEQ ID NO: 49999 - DNA, 315 bp, Artificial Sequence
  derived and/or modified sequence
atgtttacctgctggtggtcttacctgagaagcacactagcggctgtaccaggcgaggcatcgagggtgcagcggaaagagtctaaaaaacctcccgcaaaattgcagccccgcgctttagcaggttggctcagacccgaagacggcgggcaggctgagggggccgaggacgagctagaagttagattcaatgccccattcgacgtcgggatcaagctttcgggcgtgcaataccagcaacactcacaggcactgggaaaattcctgcaggacattttatgggaagaagcaaaggaagcgcccgcggataagtag

SEQ ID NO: 50000 - DNA, 315 bp, Artificial Sequence
  derived and/or modified sequence
atgtttacctgctggtggtcttacctgagaagcacactagcggctgtaccaggcgaggcatcgagggtgcagcggaaagagtctaaaaaacctcccgcaaaattgcagccccgcgctttagcaggttggctcagacccgaagacggcgggcaggctgagggggccgaggacgagctagaagttagattcaatgccccattcgacgtcgggatcaagctttcgggcgtgcaataccagcaacactcacaggcactgggaaaattcctgcaggacattttatgggaagaagcaaaggaagcgccagcagataagtag

SEQ ID NO: 50001 - DNA, 315 bp, Artificial Sequence
  derived and/or modified sequence
atgttcacctgctggtggagctacctgagaagcaccctggccgccgtgcccggcgaggccagcagagtgcagagaaaggagagcaagaagccccccgccaagctgcagcccagagccctggccggctggctgagacccgaggacggcggccaggccgagggcgccgaggacgagctggaggtgagattcaacgcccccttcgacgtgggcatcaagctgagcggcgtgcagtaccagcagcacagccaggccctgggcaagttcctgcaggacatcctgtgggaggaggccaaggaggcccccgccgacaagtag

SEQ ID NO: 50002 - protein, 66 aa, Artificial Sequence
  derived and/or modified sequence
MFTCWWSYLRSTLAAVPGEASRVQFNAPFDVGIKLSGVQYQQHSQALGKFLQDILWEEAKEAPADK

SEQ ID NO: 50003 - DNA, 201 bp, Artificial Sequence
  derived and/or modified sequence
atgtttacttgctggtggtcataccttagatctaccctcgctgccgttcccggagaggccagccgggtgcaatttaacgccccatttgacgtaggtatcaagctttcaggggtgcagtaccagcagcactctcaggcgctgggaaagtttctgcaggacatcctgtgggaggaagctaaggaagcacctgccgacaagtag

SEQ ID NO: 50004 - DNA, 227 bp, Artificial Sequence
  derived and/or modified sequence
aagataacacagctttgcacagtggatgtttacttgctggtggtcttatctaagatcaacattggcagctgtgcccggagaggcctccagggtccaggcccacctgtctgcaacccagctgaggccatgccctccccagggaccgtctgcagcctcctgctcctcggcatgctctggctggacttggccatggcaggctccagcttcctgagccctgaacaccagag

SEQ ID NO: 50005 - DNA, 326 bp, Artificial Sequence
  derived and/or modified sequence
gtggatgtttacttgctggtggtcttatctaagatcaacattggcagctgtgcccggagaggcctccagggtccagttcaacgccccctttgatgttggaatcaagctgtcaggggttcagtaccagcagcacagccaggccctggggaagtttcttcaggacatcctctgggaagaggccaaagaggccccagccgacaagtgatcgcccacaagccttactcacctctctctaagtttagaagcgctcatctggcttttcgcttgcttctgcagcaactcccacgactgttgtacaagctcaggaggcgaataaatgttcaaac

SEQ ID NO: 50006 - DNA, 201 bp, Artificial Sequence
  derived and/or modified sequence
atgttcacctgctggtggagctacctgcggagcaccctggccgctgtgcctggagaggccagccgggtgcagttcaatgccccctttgatgtgggcatcaagctgagcggcgtgcagtaccagcagcacagccaggccctgggcaagttcctgcaggacatcctgtgggaggaggccaaggaggccccagctgacaagtag

SEQ ID NO: 50007 - DNA, 201 bp, Artificial Sequence
  derived and/or modified sequence
atgttcacctgctggtggagctacctgcggagcaccctggccgccgtgccaggcgaagcctccagagtgcagttcaacgctcccttcgacgtgggcattaaactgtctggtgtgcagtaccagcaacattcacaagcattgggaaagtttctgcaggacatactgtgggaagaagccaaggaagctccagccgacaaatag

SEQ ID NO: 50008 - DNA, 201 bp, Artificial Sequence
  derived and/or modified sequence
atgttcacctgctggtggtcctacctgagatcgactcttgccgcagtccctggtgaagcatctagggtccagtttaacgcacctttcgatgtaggtatcaagttgagtggcgtgcaatatcagcagcactcccaggcactcggtaagttcttgcaagatatcctgtgggaggaggccaaggaggcccctgccgataagtag

SEQ ID NO: 50009 - DNA, 201 bp, Artificial Sequence
  derived and/or modified sequence
atgtttacatgttggtggtcgtatctccgcagcaccttggcagctgttccaggcgaggctagtcgcgtacaatttaacgccccctttgatgtcggaataaaactgtccggcgtacagtaccaacagcactcacaagcactcgggaaatttctccaagatattctatgggaagaagcaaaggaggccccggcagataaatag

SEQ ID NO: 50010 - DNA, 201 bp, Artificial Sequence
  derived and/or modified sequence
atgttcacctgctggtggagctacctgagaagcaccctggccgccgtgcccggcgaggccagcagagtgcagttcaacgcccccttcgacgtgggcatcaagctgagcggcgtgcagtaccagcagcacagccaggccctgggcaagttcctgcaggacatcctgtgggaggaggccaaggaggcccccgccgacaagtag

SEQ ID NO: 50011 - RNA, 201 nt, Artificial Sequence
  derived and/or modified sequence
auguuuacauguugguggucguaucuccgcagcaccuuggcagcuguuccaggcgaggcuagucgcguacaauuuaacgcccccuuugaugucggaauaaaacuguccggcguacaguaccaacagcacucacaagcacucgggaaauuucuccaagauauucuaugggaagaagcaaaggaggccccggcagauaaauag

SEQ ID NO: 50012 - protein, 687 aa, Artificial Sequence
  derived and/or modified sequence
MALDGIRMPDGCYADGTWELSVHVTDLNRDVTLRVTGEVHIGGVMLKLVEKLDVKKDWSDHALWWEKKRTWLLKTHWTLDKYGIQADAKLQFTPQHKLLRLQLPNMKYVKVKVNFSDRVFKAVSDICKTFNIRHPEELSLLKKPRDPTKKKKKKLDDQSEDEALELEGPLITPGSGSIYSSPGLYSKTMTPTYDAHDGSPLSPTSAWFGDSALSEGNPGILAVSQPITSPEILAKMFKPQALLDKAKINQGWLDSSRSLMEQDVKENEALLLRFKYYSFFDLNPKYDAIRINQLYEQAKWAILLEEIECTEEEMMMFAALQYHINKLSIMTSENHLNNSDKEVDEVDAALSDLEITLEGGKTSTILGDITSIPELADYIKVFKPKKLTLKGYKQYWCTFKDTSISCYKSKEESSGTPAHQMNLRGCEVTPDVNISGQKFNIKLLIPVAEGMNEIWLRCDNEKQYAHWMAACRLASKGKTMADSSYNLEVQNILSFLKMQHLNPDPQLIPEQITTDITPECLVSPRYLKKYKNKQPGYIRDLITARILEAHQNVAQMSLIEAKMRFIQAWQSLPEFGITHFIARFQGGKKEELIGIAYNRLIRMDASTGDAIKTWRFSNMKQWNVNWEIKMVTVEFADEVRLSFICTEVDCKVVHEFIGGYIFLSTRAKDQNESLDEEMFYKLTSGWV

SEQ ID NO: 50013 - DNA, 3352 bp, Artificial Sequence
  derived and/or modified sequence
gggtggagcgcggggagccaggcgaggggccgcgacgacgggactccattagccgctccggccacaggcagcgcttcgccagccgaggaaccggacgcggacaccgccgccccgcgagcctccagcccctcgcctgttgccgcgcgagtcccgggcccggagcgctaggagcgcgcggaaggagccatggctctggacgggataaggatgccagatggctgctacgcggacgggacgtgggaactgagtgtccatgtgacggacctgaaccgcgatgtcaccctgagagtgaccggcgaggtgcacattggaggcgtgatgcttaagctggtggagaaactcgatgtaaaaaaagattggtctgaccatgctctctggtgggaaaagaagagaacttggcttctgaagacacattggaccttagataagtatggtattcaggcagatgctaagcttcagttcacccctcagcacaaactgctccgcctgcagcttcccaacatgaagtatgtgaaggtgaaagtgaatttctctgatagagtcttcaaagctgtttctgacatctgtaagacttttaatatcagacaccccgaagaactttctctcttaaagaaacccagagatccaacaaagaaaaaaaagaagaagctagatgaccagtctgaagatgaggcacttgaattagaggggcctcttatcactcctggatcaggaagtatatattcaagcccaggactgtatagtaaaacaatgacccccacttatgatgctcatgatggaagccccttgtcaccaacttctgcttggtttggtgacagtgctttgtcagaaggcaatcctggtatacttgctgtcagtcaaccaatcacgtcaccagaaatcttggcaaaaatgttcaagcctcaagctcttcttgataaagcaaaaatcaaccaaggatggcttgattcctcaagatctctcatggaacaagatgtgaaggaaaatgaggccttgctgctccgattcaagtattacagcttttttgatttgaatccaaagtatgatgcaatcagaatcaatcagctttacgagcaggccaaatgggccattctcctggaagagattgaatgcacagaagaagaaatgatgatgtttgcagccctgcagtatcatatcaataagctgtcaatcatgacatcagagaatcatttgaacaacagtgacaaagaagttgatgaagttgatgctgccctttcagacctggagattactctggaagggggtaaaacgtcaacaattttgggtgacattacttccattcctgaacttgctgactacattaaagttttcaagccaaaaaagctgactctgaaaggttacaaacaatattggtgcaccttcaaagacacatccatttcttgttataagagcaaagaagaatccagtggcacaccagctcatcagatgaacctcaggggatgtgaagttaccccagatgtaaacatttcaggccaaaaatttaacattaaactcctgattccagttgcagaaggcatgaatgaaatctggcttcgttgtgacaatgaaaaacagtatgcacactggatggcagcctgcagattagcctccaaaggcaagaccatggcggacagttcttacaacttagaagttcagaatattctttcctttctgaagatgcagcatttaaacccagatcctcagttaataccagagcagatcacgactgatataactcctgaatgtttggtgtctccccgctatctaaaaaagtataagaacaagcagccaggctatataagagatttgataacagcgagaatcttggaggcccatcagaatgtagctcagatgagtctaattgaagccaagatgagatttattcaagcttggcagtcactacctgaatttggcatcactcacttcattgcaaggttccaagggggcaaaaaagaagaacttattggaattgcatacaacagactgattcggatggatgccagcactggagatgcaattaaaacatggcgtttcagcaacatgaaacagtggaatgtcaactgggaaatcaaaatggtcaccgtagagtttgcagatgaagtacgattgtccttcatttgtactgaagtagattgcaaagtggttcatgaattcattggtggctacatatttctctcaacacgtgcaaaagaccaaaacgagagtttagatgaagagatgttctacaaacttaccagtggttgggtgtgaataggaatactgtttaatgaaactccacggccataacaatatttaactttaaaagctgtttgttatatgctgcttaataaagtaagcttgaaatttatcattttatcatgaaaacttctttgccttaccagaccagttaatatgtgcactaaacaagcacgactattaatctatcatgttatgatataataaacttgaatttgtcacacattccttagggccatgaattgaaaactgaaatagtgggcaaatcaggaacaaaccatcactgatttactgatttaagctagccaaactgtaagaaacaagccatctattttaaagctatccagggcttaacctatatgaactctatttatcatgtctaatgcatgtgatttaatgtatgtttaatttgatatcatgttttaaaatatcctacttctggtagccatttaattcctccccctacccccaaataaatcaggcatgcaggaggcctgatatttagtaatgtcattgtgtttgaccttgaaggaaaatgctattagtccgtcgtgcttgatttgtttttgtccttgaataagcatgttatgtatattgtctcgtgtttttatttttacaccatattgtattacacttttagtattcaccagcataatcactgtctgcctaaaatatgcaactctttgcattacaatatgaagtaaagttctatgaagtatgcattttgtgtaactaatgtaaaaacacaaattttataaaattgtacagttttttaaaaactactcacaactagcagatggcttaaatgtagcaatctctgcgttaattaaatgcctttaagagatataattaacgtgcagttttaatatctactaaattaagaatgacttcattatgatcatgatttgccacaatgtccttaactctaatgcctggactggccatgttctagtctgttgcgctgttacaatctgtattggtgctagtcagaaaattcctagctcacatagcccaaaagggtgcgagggagaggtggattaccagtattgttcaataatccatggttcaaagactgtataaatgcattttattttaaataaaagcaaaacttttattt

SEQ ID NO: 50014 - DNA, 2064 bp, Artificial Sequence
  derived and/or modified sequence
atggctctggacgggataaggatgccagatggctgctacgcggacgggacgtgggaactgagtgtccatgtgacggacctgaaccgcgatgtcaccctgagagtgaccggcgaggtgcacattggaggcgtgatgcttaagctggtggagaaactcgatgtaaaaaaagattggtctgaccatgctctctggtgggaaaagaagagaacttggcttctgaagacacattggaccttagataagtatggtattcaggcagatgctaagcttcagttcacccctcagcacaaactgctccgcctgcagcttcccaacatgaagtatgtgaaggtgaaagtgaatttctctgatagagtcttcaaagctgtttctgacatctgtaagacttttaatatcagacaccccgaagaactttctctcttaaagaaacccagagatccaacaaagaaaaaaaagaagaagctagatgaccagtctgaagatgaggcacttgaattagaggggcctcttatcactcctggatcaggaagtatatattcaagcccaggactgtatagtaaaacaatgacccccacttatgatgctcatgatggaagccccttgtcaccaacttctgcttggtttggtgacagtgctttgtcagaaggcaatcctggtatacttgctgtcagtcaaccaatcacgtcaccagaaatcttggcaaaaatgttcaagcctcaagctcttcttgataaagcaaaaatcaaccaaggatggcttgattcctcaagatctctcatggaacaagatgtgaaggaaaatgaggccttgctgctccgattcaagtattacagcttttttgatttgaatccaaagtatgatgcaatcagaatcaatcagctttacgagcaggccaaatgggccattctcctggaagagattgaatgcacagaagaagaaatgatgatgtttgcagccctgcagtatcatatcaataagctgtcaatcatgacatcagagaatcatttgaacaacagtgacaaagaagttgatgaagttgatgctgccctttcagacctggagattactctggaagggggtaaaacgtcaacaattttgggtgacattacttccattcctgaacttgctgactacattaaagttttcaagccaaaaaagctgactctgaaaggttacaaacaatattggtgcaccttcaaagacacatccatttcttgttataagagcaaagaagaatccagtggcacaccagctcatcagatgaacctcaggggatgtgaagttaccccagatgtaaacatttcaggccaaaaatttaacattaaactcctgattccagttgcagaaggcatgaatgaaatctggcttcgttgtgacaatgaaaaacagtatgcacactggatggcagcctgcagattagcctccaaaggcaagaccatggcggacagttcttacaacttagaagttcagaatattctttcctttctgaagatgcagcatttaaacccagatcctcagttaataccagagcagatcacgactgatataactcctgaatgtttggtgtctccccgctatctaaaaaagtataagaacaagcagccaggctatataagagatttgataacagcgagaatcttggaggcccatcagaatgtagctcagatgagtctaattgaagccaagatgagatttattcaagcttggcagtcactacctgaatttggcatcactcacttcattgcaaggttccaagggggcaaaaaagaagaacttattggaattgcatacaacagactgattcggatggatgccagcactggagatgcaattaaaacatggcgtttcagcaacatgaaacagtggaatgtcaactgggaaatcaaaatggtcaccgtagagtttgcagatgaagtacgattgtccttcatttgtactgaagtagattgcaaagtggttcatgaattcattggtggctacatatttctctcaacacgtgcaaaagaccaaaacgagagtttagatgaagagatgttctacaaacttaccagtggttgggtgtga

SEQ ID NO: 50015 - DNA, 2064 bp, Artificial Sequence
  derived and/or modified sequence
atggcattagacggaattaggatgcctgacggatgctacgctgacggcacatgggaactatctgtccatgtgacagatctcaatcgagatgtgaccttacgagtaacgggtgaagtacacataggaggcgtgatgctgaaactcgtcgaaaagctggacgtgaagaaggactggtccgaccacgcgctgtggtgggaaaagaagcgaacgtggctgctgaagacgcactggacgttggacaagtacggtatccaagccgacgccaaattacagtttacaccgcagcataagctgctgcgcctccagctgcccaacatgaaatacgtgaaagtcaaagtgaatttctcagatcgggtgttcaaagcagtatctgacatatgcaaaacatttaatattaggcatcctgaggaactctccctgctgaagaaaccgcgggatccaacgaagaagaaaaaaaagaaattggatgaccagagtgaagatgaggccctggaactggagggcccactgataacccctggctcaggctccatctacagtagccccggcctctactcgaagaccatgactccaacttatgacgcccacgacggtagcccactgtcgccaacttccgcctggtttggtgacagtgcgctctccgaagggaacccgggcatcctagctgtgagccagcccatcacttcccccgagattctggctaaaatgtttaagccgcaggcgctgctcgacaaggccaagatcaaccagggatggttggattccagtcggtccctgatggagcaggatgtcaaggagaacgaagccttgctccttcgtttcaaatactacagcttttttgacctgaacccaaaatatgacgcgatcaggatcaatcaattgtatgaacaggctaaatgggccatcctgctggaagaaatcgagtgcaccgaagaggagatgatgatgtttgcagccctgcaatatcacattaataaactctccatcatgacgtccgaaaaccatttaaataactctgacaaagaagtggacgaggtagacgccgccctgagcgacctggagattaccctggagggcgggaaaaccagcaccatcctgggtgatataacatcaatacccgagttggccgactatatcaaggttttcaagcccaaaaagcttaccttgaaggggtacaagcagtactggtgcactttcaaggacacgtctatttcttgctacaaatctaaagaagaaagttccgggacccccgcacaccaaatgaacttacgtgggtgtgaagtgacaccagacgtgaacatttccggccaaaaatttaatataaaactcctgattcctgttgccgaggggatgaatgagatttggctcagatgtgataacgaaaagcagtacgctcactggatggctgcctgccggctggcctccaaaggtaaaacaatggccgattcttcttataacctggaagtccaaaatatactgtcatttctcaaaatgcagcatttgaaccctgatccgcagctaattcccgagcaaattactacagacattacccctgagtgcttggtttctccccgatatctgaagaagtataaaaacaagcaacctggatacatacgcgacctgatcaccgcccgcattctagaagcccatcaaaacgtcgcccagatgagccttatcgaggccaagatgaggttcatccaggcatggcaaagcctgcccgaatttggaataacgcattttattgcacggttccagggcggaaagaaggaggagttgatcggaatagcatacaatcggttaattcggatggatgcgagtactggggatgcaataaagacctggcggttctcaaacatgaagcagtggaacgtgaattgggagatcaagatggtaacggtggaattcgcagacgaagtgcgcctgtcattcatctgcaccgaagtggattgtaaagtggtgcacgagttcattggtgggtacatcttcctaagtaccagagccaaggatcaaaacgagagtttggatgaggaaatgttctacaaactcacatccgggtgggtttag

SEQ ID NO: 50016 - DNA, 2064 bp, Artificial Sequence
  derived and/or modified sequence
atggctctggacggaattcggatgcccgatgggtgctatgcagacggtacctgggagctgtccgtgcacgtgacagatctaaatagagacgtaaccctccgggtaacaggggaagttcacatcggcggggttatgttgaaattagtggaaaaactcgacgtcaagaaggactggtcagatcacgccctttggtgggaaaagaagaggacctggttactgaagacacactggaccctcgataagtatggaatccaggccgacgcgaagctacaattcacaccccagcataagctgcttaggctgcaactccccaatatgaagtatgtaaaagtgaaagttaacttctctgatagggtgttcaaggccgtttcggatatctgtaaaacttttaacattcgccacccggaagagctgagtttgctaaaaaaaccccgcgaccccaccaaaaagaaaaaaaaaaaactggatgaccagtccgaggacgaggcgctggaattggagggcccactgatcacccccggcagcggcagcatatatagtagtccaggcctttattctaagaccatgactcccacgtacgacgcccatgatggtagtcccttaagcccgacatcagcatggtttggagattcagctctgagcgagggaaatccaggaattctggctgtgtcccaacctattacatctcccgagatactggcaaagatgtttaagccccaggcactgctcgacaaagccaagatcaaccagggctggctggattctagcaggtctttgatggaacaagacgtcaaagagaacgaggcattattactacggttcaaatactactcttttttcgacctgaacccaaaatatgatgccataagaattaaccagctatacgagcaagcaaagtgggctattctccttgaagaaatagagtgtactgaagaagagatgatgatgttcgctgccctacagtaccacatcaacaagctgagcatcatgacttctgagaaccacctgaacaatagcgacaaagaggtcgatgaggttgacgctgcactgagtgacctggagatcacattggagggtggtaaaacttcaacgattcttggggatataaccagtattcctgagctcgcagactatattaaggttttcaagcctaagaagctgaccctgaagggttataagcagtattggtgcacatttaaggatacaagcatctcctgctataagtcaaaggaggagtccagcggaacccctgcccatcaaatgaacctgcggggctgtgaggtgacgcccgacgtgaatatatcgggacagaaattcaatattaaacttctgatcccagtggctgaagggatgaatgagatttggctccgctgtgacaacgaaaagcaatatgcccattggatggctgcgtgtagactggcctctaagggaaagactatggcagacagctcatataatctagaagtccagaacatcctatcatttctgaagatgcagcacctcaacccggacccccaactgattccggaacaaatcaccaccgacataacacccgaatgcctggtcagccccagataccttaaaaagtacaagaataaacagcccggctatattagagaccttatcaccgccaggattctcgaggcccaccaaaacgtggctcaaatgtcactgattgaggccaaaatgagattcatccaggcctggcagtctctaccagaattcgggattacacattttattgcacgcttccaaggtggcaaaaaagaggagttgatcggaattgcatacaatagattaattcgtatggatgcaagcaccggagatgccatcaagacatggcggtttagcaacatgaaacagtggaatgtaaattgggaaattaagatggtcaccgtggaattcgccgacgaggtgcgcctcagctttatttgtactgaggtagattgtaaggttgtccatgagtttatcggcggatacatctttttgtccaccagggcaaaagaccagaatgagtctctggatgaggaaatgttctataaactgacgtccggttgggtgtag

SEQ ID NO: 50017 - DNA, 2064 bp, Artificial Sequence
  derived and/or modified sequence
atggccctggatggcatccgcatgccagatggctgctacgcagatggcacctgggagctgtctgtgcacgtgacagacctgaacagagatgtgaccctgcgggtgactggagaggtgcacatcggcggcgtgatgctgaagctggtggagaagctggatgtgaagaaggactggagcgaccacgccctgtggtgggagaagaagaggacctggctgctgaagacccactggaccctggacaagtatggcatccaggctgatgccaagctgcagttcaccccccagcacaagctgctgcggctgcagctgcccaacatgaagtatgtgaaggtgaaggtgaacttcagtgacagagtcttcaaggctgtgtctgacatctgcaagaccttcaacatccgccaccctgaggagctgagcctgctgaagaagccccgggaccccaccaagaagaagaagaagaagctggatgaccagagtgaagatgaggccctggagctggagggccccctcatcaccccaggcagcggcagcatctacagcagccctggcctgtacagcaagaccatgacccccacctatgatgcccatgatggcagccccctgagccccaccagcgcctggtttggagacagcgccctgtctgagggcaaccctggcatcctggccgtgtcccagcccatcaccagccctgagatcctggccaagatgttcaagccccaggccctgctggacaaggccaagatcaaccagggctggctggacagcagccgcagcctgatggagcaggatgtgaaggaaaatgaggccctgctgctgcgcttcaagtactacagcttctttgacctgaaccccaagtatgatgccatccgcatcaaccagctgtatgagcaggccaagtgggccatcctgctggaggagattgagtgcacagaggaggagatgatgatgtttgctgccctgcagtaccacatcaacaagctgagcatcatgaccagcgagaaccacctgaacaacagcgacaaggaggtggatgaggtggatgctgccctgagtgacctggagatcaccctggagggcggcaagaccagcaccatcctgggggacatcaccagcatccctgagctggccgactacatcaaggtgttcaagcccaagaagctgaccctgaagggctacaagcagtactggtgcaccttcaaggacaccagcatcagctgctacaagagcaaggaggagagcagcggcaccccagcccaccagatgaacctgcggggctgtgaggtgaccccagatgtgaacatcagcggccagaagttcaacatcaagctgctgatccctgtggccgagggcatgaatgagatctggctgcgctgtgacaatgagaagcagtatgcccactggatggccgcctgccgcctggccagcaagggcaagaccatggctgacagcagctacaacctggaggtgcagaacatcctgtccttcctgaagatgcagcacctgaacccagacccccagctgatccctgagcagatcaccacagacatcaccccagaatgtctggtgagcccccgctacctgaagaagtacaagaacaagcagcccggctacatccgggacctgatcacagcccgcatcctggaggcccaccagaatgtggcccagatgagcctgattgaggccaagatgaggttcatccaggcctggcagagcctgcctgagtttggcatcacccacttcatcgcccgcttccagggcggcaagaaggaggagctgattggaattgcctacaacagactcatccgcatggatgccagcactggagatgccatcaagacctggaggttcagcaacatgaagcagtggaatgtgaactgggagatcaagatggtgacagtggagtttgctgatgaggtgcggctgtccttcatctgcacagaggtggactgcaaggtggtgcatgagttcatcggcggctacatcttcctgagcacccgggccaaggaccagaatgaaagcctggatgaggagatgttctacaagctgaccagcggctgggtgtag

SEQ ID NO: 50018 - DNA, 2064 bp, Artificial Sequence
  derived and/or modified sequence
atggccctggacggcatccggatgcccgacggctgctacgccgacgggacgtgggagctttccgtgcatgtcactgatctgaatcgggatgtgactctccgggtgacgggcgaagtccacataggcggcgtaatgctgaagctggtagagaaactggacgtgaaaaaagattggtctgatcacgctctgtggtgggagaagaagcgcacctggctgctgaaaacacactggacattagacaagtacggaatccaagccgacgctaagcttcagtttactcctcagcacaagttactgaggctgcaactgccgaacatgaagtacgtgaaagtgaaggtgaacttcagcgaccgagtctttaaagcggttagcgatatctgcaagaccttcaatattcggcacccggaggagctttcgttactcaaaaagccacgggatcccacgaaaaagaagaagaaaaagctcgatgaccagtccgaggatgaggccctggaactggagggaccccttattacccccggctctggttcaatctactcgtcccccggcctttattctaagacaatgacaccaacctacgacgcccatgatggctctcccctgagtccaacatctgcctggtttggtgattctgctttgtcagagggaaatcccggaattctggcggtgagccagcctattacaagccccgagatcttggcaaagatgttcaagccacaggctcttctggataaggctaaaatcaaccaggggtggctggatagcagcaggagcctgatggaacaagacgtgaaggagaatgaagccctgctgctgcggtttaagtattatagcttttttgaccttaacccgaagtatgacgccatccgcattaaccaactctacgagcaggccaagtgggcaatcctcctggaggaaatcgagtgtacagaggaggagatgatgatgtttgccgccctgcagtaccacataaacaaactgtccatcatgacctccgagaatcacttgaataactctgataaagaggtcgatgaagtagatgccgcccttagcgacctagaaataaccctcgagggtggcaagacaagcacgatcctgggggatattacttccatcccagagttggccgattatatcaaggtgtttaagcccaaaaagttgactctgaaaggttacaaacaatactggtgcacttttaaagataccagcattagctgttataaaagcaaggaggagtcttccggcacgcctgcccaccagatgaatctacgtggttgcgaggtcaccccggatgtgaatataagcggtcagaaatttaacattaagctgctgattccagtggccgaggggatgaatgagatctggctgcgctgcgacaacgaaaagcagtatgcccattggatggcagcatgtcgacttgccagtaagggtaaaactatggccgattccagctacaatttagaggtgcagaatattttgagcttcctgaagatgcagcacctgaatccagacccacagctcattccagagcagataactacggatattactcccgagtgcctggtgtccccgaggtacctgaagaaatataaaaataaacagccaggatacatccgggacttgatcaccgcccgcatcctagaggcacaccaaaatgtcgcccaaatgagcctgatcgaagcgaagatgaggtttattcaggcgtggcagtcgctccctgaatttggtattacccatttcatcgctaggttccagggcgggaaaaaggaagagctgatcggcatagcttacaaccggctgattagaatggacgcttcgaccggagatgcgattaagacctggagattttctaacatgaaacaatggaatgttaactgggagataaagatggtgacagttgaattcgccgatgaggtacggctgagttttatctgcactgaggtggattgtaaagttgtgcatgaattcatcggtggttacattttcctgagcacaagggccaaggaccagaatgaatcattggatgaggagatgttttataagctgacctcaggttgggtatag

SEQ ID NO: 50019 - DNA, 2064 bp, Artificial Sequence
  derived and/or modified sequence
atggccctggacggcatccggatgcccgacggctgctacgccgacggcacctgggagctgtcagtccacgtgaccgacctgaaccgggatgtgaccctgcgcgtgacgggcgaagtgcacataggaggcgtcatgttaaagctggtcgaaaaactcgatgtgaagaaggactggagtgaccacgccctttggtgggagaaaaagcggacttggcttctcaagacgcactggacgctagataagtacggcattcaggctgacgcaaagctgcagttcactcctcagcacaaattgttgcgcttgcagctgcctaacatgaagtacgttaaggtgaaagtcaactttagcgatcgcgtttttaaagccgtaagtgatatttgtaagactttcaatataaggcacccagaggaactgtcccttcttaagaaaccaagggatcctaccaagaaaaaaaaaaagaagctggacgaccagagtgaagatgaagctttggagctggaagggcccctgataacaccgggtagcggatccatctatagcagcccaggactgtatagtaaaaccatgactcctacttacgatgcccatgatggctctcccctatcccccacgtcagcttggtttggagatagcgccctgtccgagggaaatcccggcatccttgcagtctctcaaccaattacgtcgcctgagattctggccaagatgttcaagccgcaagcactgctggacaaggccaagatcaatcagggttggctcgacagcagcagaagcctcatggaacaagacgttaaagagaacgaggccctgttgcttaggtttaagtactactctttctttgatctgaacccaaaatacgatgctattagaattaatcaactgtacgagcaggctaaatgggcaatcctactcgaggaaatcgaatgtactgaagaggagatgatgatgtttgctgcattgcaataccatatcaacaaacttagtattatgacttcagagaaccatctcaacaacagtgacaaagaagttgatgaggtggacgccgccctgagtgacctcgagattacgctcgaaggtggaaagacatcaacaatattgggtgacattacatcaatcccagaattagcagattatattaaggtctttaagcccaaaaaacttaccctgaaaggctataaacaatactggtgtacattcaaagacacaagcatttcctgttacaagtccaaggaggagtcctctggtactcccgcccatcaaatgaacttacgcggttgcgaggtgactccagacgtcaatatctccggacagaagtttaatatcaagttgctcattccggtggctgagggaatgaatgagatctggctcaggtgtgacaacgagaagcagtacgcgcattggatggcagcgtgtagactggctagtaagggcaagaccatggccgactcgagctataacttagaggtacaaaatatcttgtcttttctcaagatgcaacatctcaatccagatccccagctgatccctgagcagatcacaactgatataacccccgagtgtctagtaagcccccgctacttaaaaaaatacaagaataaacagcccggctatattcgggacctgatcacagccaggattttggaggcacaccagaacgtggcccaaatgtctctgattgaagctaagatgaggtttattcaggcctggcagtctctgccagaattcgggattacacacttcatcgcccgctttcaaggcggaaagaaagaagaattaatcgggatagcttataatcgactgattaggatggacgcctctactggcgacgcgatcaagacctggaggttctccaatatgaagcagtggaatgtcaattgggaaattaagatggtgaccgtcgagttcgcggatgaggttcgactaagcttcatctgtactgaagtggactgtaaggtggttcacgagtttatcggcggatacatattcttgtctactcgcgcaaaagaccagaatgaaagcctggatgaagaaatgttctataaactcactagcggatgggtgtag

SEQ ID NO: 50020 - DNA, 2064 bp, Artificial Sequence
  derived and/or modified sequence
atggcccttgacggcattagaatgcccgatggctgttatgctgacggcacctgggagctatctgtgcacgtgacggaccttaatcgcgatgttaccctcagagttacaggggaggtccacatcgggggtgtgatgctcaaactcgtggagaagctggatgtgaaaaaagattggtcagaccatgccctctggtgggagaagaagcgcacttggctgctgaagacccattggaccctggacaaatacggtatccaagccgacgcaaagctccagttcacaccccagcataagctgctacgccttcaactgcctaacatgaaatacgtgaaagttaaagtgaacttctccgaccgggtgtttaaagccgtgtctgacatatgtaagactttcaatatccgtcatcccgaggaattgtccctgctgaagaagccgagggacccaactaagaagaaaaaaaagaagctggacgaccagtctgaggacgaagctctggagttggagggcccattaatcactcccggttccggcagcatctactcctctccaggcttgtattcaaaaaccatgacacccacctacgatgctcatgatggcagtccactttcccctacttctgcttggttcggtgactcagccctaagtgagggcaatcccggaattctcgctgtgtctcagcctataactagcccagaaattctggcgaaaatgtttaagccccaggccctgttagacaaggcaaagattaaccagggctggttagactctagccgctctcttatggagcaagacgtgaaggagaacgaggctctacttctgcgattcaaatattactcattcttcgatttaaacccaaagtacgacgcgatcagaatcaaccagctgtatgaacaggctaaatgggccattctgctagaggaaatcgagtgcacagaggaggagatgatgatgtttgcagctctacaataccatatcaacaaactgagcatcatgacctccgaaaatcacctgaataattcggataaggaggttgacgaagtggatgccgctttaagtgaccttgagattactctggaggggggaaagacctccacaattttaggggatattacgtccatccccgaactggccgactacatcaaagtcttcaagccgaagaaactgacactgaagggttacaaacaatattggtgtactttcaaggacacctctatcagctgttacaaaagcaaggaggaatcatcagggacccccgctcaccagatgaatctgcgcggatgtgaggtcacccccgacgtgaatatcagcggccagaaattcaacattaagctgctgatcccggtggctgaggggatgaacgagatctggctccgctgtgacaatgagaagcaatacgcacattggatggccgcttgtcgcctggcgagcaagggaaagacaatggcagacagctcatacaacctggaagttcaaaatattctgagtttcctgaaaatgcaacacctgaaccccgatccccagctgatccccgaacagattacgacagacatcacccccgaatgtctggtcagtccacgttacctgaagaaatataagaacaagcaaccagggtatatcagggatctgattaccgcgaggattttagaagctcatcaaaatgtcgctcagatgtctctgatcgaagcaaaaatgcgctttatacaggcctggcagtccctgccagagttcggaattacccacttcatcgcaagatttcaggggggtaagaaggaggagctaatagggatagcctacaaccgccttatccggatggacgcctctactggtgatgccatcaaaacatggcggttttcgaacatgaaacagtggaatgtgaactgggagataaagatggtcaccgtagaatttgccgacgaggtgcgactttctttcatttgtacagaggtcgactgcaaagtagtgcacgaatttatagggggatatatttttctaagcaccagagcaaaggaccagaatgagtccctcgatgaagagatgttctataagttgacgtcaggctgggtctag

SEQ ID NO: 50021 - DNA, 2064 bp, Artificial Sequence
  derived and/or modified sequence
atggccctcgacggtatacgtatgccagatgggtgttatgccgatggaacatgggaactgtccgtgcatgtcaccgacctcaaccgcgacgtaaccctgagggtgacgggcgaggtgcatataggcggagtaatgttgaaactggtggagaaattggacgtaaagaaagactggtcagaccacgcactctggtgggagaaaaagaggacgtggctacttaagacacattggaccctagacaaatacggcatccaagctgacgctaagctgcagttcaccccacaacacaagctgctacggctccagcttcccaacatgaagtatgtgaaagtaaaggtgaattttagcgaccgagtgtttaaggccgtgtcagacatatgcaaaactttcaacatacgtcacccagaagaactgtctctccttaaaaaaccacgcgaccctactaagaagaagaaaaaaaagctggatgaccagagcgaggacgaagcattggagttggagggccctctaatcacccccggtagtggtagtatatactccagtccagggctgtattctaaaaccatgacaccgacatatgacgcacatgatggctcccccctgtccccaaccagcgcttggttcggcgattccgccctcagcgaagggaatccgggaatcctggctgtctctcagccaatcacctcgcccgagatactggcaaagatgtttaagcctcaggcgctgctggataaggccaagatcaatcagggctggctggattcttcccgatcactgatggagcaggacgtgaaagaaaatgaagccctgctcctgcgttttaagtactacagttttttcgacttgaacccgaagtatgatgcaatcaggatcaatcagctgtatgagcaggcgaagtgggccatcctgctggaagagattgaatgtaccgaggaggagatgatgatgttcgctgcgctgcagtatcacatcaataaactgtccataatgacctccgagaatcacttgaacaactccgataaggaggttgacgaagtggacgccgcactgtccgacttagaaatcacactagaggggggaaaaaccagtaccatactgggcgatattacaagtatcccagagctcgcggactatattaaggtctttaagcccaaaaaattgacgctgaaagggtataaacaatactggtgtactttcaaggatacatccataagctgttataagtcgaaggaagaaagtagcggcacacccgcacaccagatgaacctccggggttgcgaggtcacacccgacgtgaatatttcaggtcaaaaatttaacataaagctactgatacccgtcgcggaggggatgaatgagatatggctcagatgcgataatgagaaacagtacgctcactggatggctgcctgccgactagcgagtaagggaaaaacaatggccgactctagttataacctcgaggtccagaatatcctgtcttttctcaagatgcagcacctgaatcctgatccccaattgatccctgaacagatcacaacagacatcacaccagagtgtttagtgagtcccagatatctgaagaagtacaaaaataagcaacctggctacatccgagatctgattacagcaagaattctcgaggcccaccagaacgtggcgcagatgtctctaatcgaggccaagatgaggttcattcaagcctggcagtccctgcctgagtttgggattacccatttcatcgcccgttttcaaggagggaagaaagaggaactaataggaatagcttacaacaggctgatacggatggacgcgagcacaggagatgctatcaaaacttggcggtttagtaacatgaaacagtggaatgtcaattgggagatcaaaatggtgaccgtggaattcgctgacgaagtccgcttgagctttatttgcactgaagtagattgcaaagtggtccacgagtttatcggcggttatattttcctgagtactcgtgccaaagaccaaaacgagagcttagacgaagagatgttctataaactaacatccggctgggtgtag

SEQ ID NO: 50022 - DNA, 2064 bp, Artificial Sequence
  derived and/or modified sequence
atggccctggacggcatcagaatgcccgacggctgctacgccgacggcacctgggagctgagcgtgcacgtgaccgacctgaacagagacgtgaccctgagagtgaccggcgaggtgcacatcggcggcgtgatgctgaagctggtggagaagctggacgtgaagaaggactggagcgaccacgccctgtggtgggagaagaagagaacctggctgctgaagacccactggaccctggacaagtacggcatccaggccgacgccaagctgcagttcaccccccagcacaagctgctgagactgcagctgcccaacatgaagtacgtgaaggtgaaggtgaacttcagcgacagagtgttcaaggccgtgagcgacatctgcaagaccttcaacatcagacaccccgaggagctgagcctgctgaagaagcccagagaccccaccaagaagaagaagaagaagctggacgaccagagcgaggacgaggccctggagctggagggccccctgatcacccccggcagcggcagcatctacagcagccccggcctgtacagcaagaccatgacccccacctacgacgcccacgacggcagccccctgagccccaccagcgcctggttcggcgacagcgccctgagcgagggcaaccccggcatcctggccgtgagccagcccatcaccagccccgagatcctggccaagatgttcaagccccaggccctgctggacaaggccaagatcaaccagggctggctggacagcagcagaagcctgatggagcaggacgtgaaggagaacgaggccctgctgctgagattcaagtactacagcttcttcgacctgaaccccaagtacgacgccatcagaatcaaccagctgtacgagcaggccaagtgggccatcctgctggaggagatcgagtgcaccgaggaggagatgatgatgttcgccgccctgcagtaccacatcaacaagctgagcatcatgaccagcgagaaccacctgaacaacagcgacaaggaggtggacgaggtggacgccgccctgagcgacctggagatcaccctggagggcggcaagaccagcaccatcctgggcgacatcaccagcatccccgagctggccgactacatcaaggtgttcaagcccaagaagctgaccctgaagggctacaagcagtactggtgcaccttcaaggacaccagcatcagctgctacaagagcaaggaggagagcagcggcacccccgcccaccagatgaacctgagaggctgcgaggtgacccccgacgtgaacatcagcggccagaagttcaacatcaagctgctgatccccgtggccgagggcatgaacgagatctggctgagatgcgacaacgagaagcagtacgcccactggatggccgcctgcagactggccagcaagggcaagaccatggccgacagcagctacaacctggaggtgcagaacatcctgagcttcctgaagatgcagcacctgaaccccgacccccagctgatccccgagcagatcaccaccgacatcacccccgagtgcctggtgagccccagatacctgaagaagtacaagaacaagcagcccggctacatcagagacctgatcaccgccagaatcctggaggcccaccagaacgtggcccagatgagcctgatcgaggccaagatgagattcatccaggcctggcagagcctgcccgagttcggcatcacccacttcatcgccagattccagggcggcaagaaggaggagctgatcggcatcgcctacaacagactgatcagaatggacgccagcaccggcgacgccatcaagacctggagattcagcaacatgaagcagtggaacgtgaactgggagatcaagatggtgaccgtggagttcgccgacgaggtgagactgagcttcatctgcaccgaggtggactgcaaggtggtgcacgagttcatcggcggctacatcttcctgagcaccagagccaaggaccagaacgagagcctggacgaggagatgttctacaagctgaccagcggctgggtgtag

SEQ ID NO: 50023 - protein, 633 aa, Artificial Sequence
  derived and/or modified sequence
MALDGIRMPDGCYADGTWELSVHVTDLNRDVTLRVTGEVHIGGVMLKLVEKLDVKKDWSDHALWWEKKRTWLLKTHWTLDKYGIQADAKLQFTPQHKLLRLQLPNMKYVKVKVNFSDRVFKAVSDICKTFNIRHPEELSLLKKPRDPTKKKKKKLDDQSEDEALELEGPLITPGSGSIYSSPGLYSKTMTPTYDAHDGSPLSPTSAWFGDSALSEGNPGILAVSQPITSPEILAKMFKPQALLDKAKINQGWLDSSRSLMEQDVKENEALLLRFKYYSFFDLNPKYDAIRINQLYEQAKWAILLEEIECTEEEMMMFAALQYHINKLSIMTSENHLNNSDKEVDEVDAALSDLEITLEGGKTSTILGDITSIPELADYIKVFKPKKLTLKGYKQYWCTFKDTSISCYKSKEESSGTPAHQMNLRGCEVTPDVNISGQKFNIKLLIPVAEGMNEIWLRCDNEKQYAHWMAACRLASKGKTMADSSYNLEVQNILSFLKMQHLNPDPQLIPEQITTDITPECLVSPRYLKKYKNKQPGYIRDLITARILEAHQNVAQMSLIEAKMRFIQAWQSLPEFGITHFIARFQGGKKEELIGIAYNRLIRMDASTGDAIKTWRFSNMKQWNVNWEIKMVNS

SEQ ID NO: 50024 - DNA, 2082 bp, Artificial Sequence
  derived and/or modified sequence
cagccgaggaaccggacgcggacaccgccgccccgcgagcctccagcccctcgcctgttgccgcgcgagtcccgggcccggagcgctaggagcgcgcggaaggagccatggctctggacgggataaggatgccagatggctgctacgcggacgggacgtgggaactgagtgtccatgtgacggacctgaaccgcgatgtcaccctgagagtgaccggcgaggtgcacattggaggcgtgatgcttaagctggtggagaaactcgatgtaaaaaaagattggtctgaccatgctctctggtgggaaaagaagagaacttggcttctgaagacacattggaccttagataagtatggtattcaggcagatgctaagcttcagttcacccctcagcacaaactgctccgcctgcagcttcccaacatgaagtatgtgaaggtgaaagtgaatttctctgatagagtcttcaaagctgtttctgacatctgtaagacttttaatatcagacaccccgaagaactttctctcttaaagaaacccagagatccaacaaagaaaaaaaagaagaagctagatgaccagtctgaagatgaggcacttgaattagaggggcctcttatcactcctggatcaggaagtatatattcaagcccaggactgtatagtaaaacaatgacccccacttatgatgctcatgatggaagccccttgtcaccaacttctgcttggtttggtgacagtgctttgtcagaaggcaatcctggtatacttgctgtcagtcaaccaatcacgtcaccagaaatcttggcaaaaatgttcaagcctcaagctcttcttgataaagcaaaaatcaaccaaggatggcttgattcctcaagatctctcatggaacaagatgtgaaggaaaatgaggccttgctgctccgattcaagtattacagcttttttgatttgaatccaaagtatgatgcaatcagaatcaatcagctttacgagcaggccaaatgggccattctcctggaagagattgaatgcacagaagaagaaatgatgatgtttgcagccctgcagtatcatatcaataagctgtcaatcatgacatcagagaatcatttgaacaacagtgacaaagaagttgatgaagttgatgctgccctttcagacctggagattactctggaagggggtaaaacgtcaacaattttgggtgacattacttccattcctgaacttgctgactacattaaagttttcaagccaaaaaagctgactctgaaaggttacaaacaatattggtgcaccttcaaagacacatccatttcttgttataagagcaaagaagaatccagtggcacaccagctcatcagatgaacctcaggggatgtgaagttaccccagatgtaaacatttcaggccaaaaatttaacattaaactcctgattccagttgcagaaggcatgaatgaaatctggcttcgttgtgacaatgaaaaacagtatgcacactggatggcagcctgcagattagcctccaaaggcaagaccatggcggacagttcttacaacttagaagttcagaatattctttcctttctgaagatgcagcatttaaacccagatcctcagttaataccagagcagatcacgactgatataactcctgaatgtttggtgtctccccgctatctaaaaaagtataagaacaagcagccaggctatataagagatttgataacagcgagaatcttggaggcccatcagaatgtagctcagatgagtctaattgaagccaagatgagatttattcaagcttggcagtcactacctgaatttggcatcactcacttcattgcaaggttccaagggggcaaaaaagaagaacttattggaattgcatacaacagactgattcggatggatgccagcactggagatgcaattaaaacatggcgtttcagcaacatgaaacagtggaatgtcaactgggaaatcaaaatggtaaactcataacaatgttacttgaatatagtccttctctgatacaaattagtacattaagaataaaaaggcctataaattctga

SEQ ID NO: 50025 - DNA, 587 bp, Artificial Sequence
  derived and/or modified sequence
gtttcccagtaatgttaatgaacaaaaggttatctgcctagcgagttccttttccaagcgtttgagacaattcgacaagattatgagactgcgaactggagtcttttatctttaaaaggaaggagccatggctctggacgggataaggatgccagatggctgctacgcggacgggacgtgggaactgagtgtccatgtgacggacctgaaccgcgatgtcaccctgagagtgaccggcgaggtgcacattggaggcgtgatgcttaagctggtggagaaactcgatgtaaaaaaagattggtctgaccatgctctctggtgggaaaagaagagaacttggcttctgaagacacattggaccttagataagtatggtattcaggcagatgctaagcttcagttcacccctcagcacaaactgctccgcctgcagcttcccaacatgaagtatgtgaaggtgaaagtgaatttctctgatagagtcttcaaagctgtttctgacatctgtaagacttttaatatcagacaccccgaagaactttctctcttaaagaaacccagagatccaacaaagaaaaaaaagaaga

SEQ ID NO: 50026 - DNA, 1902 bp, Artificial Sequence
  derived and/or modified sequence
atggctttagacggaattagaatgccagacgggtgttacgccgatggtacttgggagctttcggtccacgtcacagatctcaacagagacgtgacactgcgagtaaccggggaggtgcatatcggaggagtcatgttgaagcttgttgaaaaactcgatgtcaaaaaggattggagcgatcatgccctttggtgggaaaaaaagcgcacctggctcctgaagacccactggacattggacaagtatggtatccaagctgatgccaagctgcagtttacacctcaacacaagctattgcgcctccagttgcctaacatgaagtatgtgaaggtgaaggtgaactttagcgacagggtcttcaaggcagttagcgacatatgtaagacctttaatatacggcatccggaagagctaagtctcctcaaaaaacctcgggaccctaccaagaagaaaaaaaagaagttggacgaccaaagcgaggacgaagctcttgaactggaaggcccccttattacaccagggagtggttcgatctactctagccctggcctctactctaagacaatgacaccaacatacgacgcccatgacggctccccgctcagccctaccagcgcctggtttggcgacagtgccctatcagaaggtaatccgggaatcctggcagtaagccaaccgattactagccccgaaatcctcgctaagatgttcaaaccacaggcactgttagacaaggccaaaattaatcagggctggttggacagctcgcgctcactgatggaacaggacgtgaaggaaaacgaagcactgctgctgcgatttaaatattacagtttttttgacctgaatcctaaatatgacgctattagaattaaccagctgtatgagcaggccaagtgggccattttgctcgaggaaattgagtgcacagaggaggagatgatgatgtttgccgcattgcaatatcacattaacaagctcagtattatgacaagcgagaatcacctcaacaatagtgacaaggaggtggacgaggtcgatgcagcactttccgatctggagatcacccttgagggcggtaagacctcgaccatcctgggtgacatcacatccataccggagcttgctgactacattaaagttttcaagccaaagaagttaaccctcaaaggctataagcagtactggtgcacattcaaggatacgagcataagctgttacaaatctaaagaggagagttcaggcacacccgcacatcagatgaatctgcgcggatgcgaagtgactccagacgtgaatattagcggccagaagtttaacatcaagttgttaattcctgttgcggaaggtatgaatgagatctggcttcggtgtgacaatgagaagcagtatgcccattggatggcagcatgcaggctcgctagtaaaggaaaaactatggcagatagcagctataatctggaggtacagaatatactgagtttcttgaaaatgcagcacctgaaccctgatccccagctgatacctgagcagatcacaaccgacattactccagaatgtctggtcagtcctcgctatctgaagaaatataaaaataagcagcccgggtatataagagatctcattactgcacgcatcctggaggctcatcaaaatgtcgctcagatgagcctcattgaggcaaaaatgcgattcatccaggcttggcagtctctgcccgaattcggtatcacccatttcatcgcacgcttccagggcggaaaaaaggaggaattaattggaattgcttataataggctgatcaggatggatgcaagcacaggagatgctattaaaacttggcggttttctaacatgaagcagtggaacgttaattgggaaattaaaatggtaaatagctag

SEQ ID NO: 50027 - DNA, 462 bp, Artificial Sequence
  derived and/or modified sequence
atggccttggatgggatccgcatgcctgacggttgctatgccgatgggacttgggaactgtctgtccatgtgaccgatctcaatagagatgttaccctgcgagttactggagaagtccatatcggaggggtcatgctgaagctcgttgaaaaactagatgtcaagaaggattggagcgaccacgcactctggtgggagaagaaacggacatggctgctgaaaacacactggaccctggataagtacggtatccaggccgatgctaagctgcagtttactccacagcataaactactcaggttgcagttacctaacatgaagtatgtgaaggtgaaagttaacttcagcgatagagtcttcaaagcggtttccgacatctgcaaaacctttaacataagacaccccgaggagttgtctctgttgaagaagccacgcgacccaacaaaaaaaaaaaagaaatag

SEQ ID NO: 50028 - DNA, 1902 bp, Artificial Sequence
  derived and/or modified sequence
atggccctggatggcatccgcatgccagatggctgctacgcagatggcacctgggagctgtctgtgcacgtgacagacctgaacagagatgtgaccctgcgggtgactggagaggtgcacatcggcggcgtgatgctgaagctggtggagaagctggatgtgaagaaggactggagcgaccacgccctgtggtgggagaagaagaggacctggctgctgaagacccactggaccctggacaagtatggcatccaggctgatgccaagctgcagttcaccccccagcacaagctgctgcggctgcagctgcccaacatgaagtatgtgaaggtgaaggtgaacttcagtgacagagtcttcaaggctgtgtctgacatctgcaagaccttcaacatccgccaccctgaggagctgagcctgctgaagaagccccgggaccccaccaagaagaagaagaagaagctggatgaccagagtgaagatgaggccctggagctggagggccccctcatcaccccaggcagcggcagcatctacagcagccctggcctgtacagcaagaccatgacccccacctatgatgcccatgatggcagccccctgagccccaccagcgcctggtttggagacagcgccctgtctgagggcaaccctggcatcctggccgtgtcccagcccatcaccagccctgagatcctggccaagatgttcaagccccaggccctgctggacaaggccaagatcaaccagggctggctggacagcagccgcagcctgatggagcaggatgtgaaggaaaatgaggccctgctgctgcgcttcaagtactacagcttctttgacctgaaccccaagtatgatgccatccgcatcaaccagctgtatgagcaggccaagtgggccatcctgctggaggagattgagtgcacagaggaggagatgatgatgtttgctgccctgcagtaccacatcaacaagctgagcatcatgaccagcgagaaccacctgaacaacagcgacaaggaggtggatgaggtggatgctgccctgagtgacctggagatcaccctggagggcggcaagaccagcaccatcctgggggacatcaccagcatccctgagctggccgactacatcaaggtgttcaagcccaagaagctgaccctgaagggctacaagcagtactggtgcaccttcaaggacaccagcatcagctgctacaagagcaaggaggagagcagcggcaccccagcccaccagatgaacctgcggggctgtgaggtgaccccagatgtgaacatcagcggccagaagttcaacatcaagctgctgatccctgtggccgagggcatgaatgagatctggctgcgctgtgacaatgagaagcagtatgcccactggatggccgcctgccgcctggccagcaagggcaagaccatggctgacagcagctacaacctggaggtgcagaacatcctgtccttcctgaagatgcagcacctgaacccagacccccagctgatccctgagcagatcaccacagacatcaccccagaatgtctggtgagcccccgctacctgaagaagtacaagaacaagcagcccggctacatccgggacctgatcacagcccgcatcctggaggcccaccagaatgtggcccagatgagcctgattgaggccaagatgaggttcatccaggcctggcagagcctgcctgagtttggcatcacccacttcatcgcccgcttccagggcggcaagaaggaggagctgattggaattgcctacaacagactcatccgcatggatgccagcactggagatgccatcaagacctggaggttcagcaacatgaagcagtggaatgtgaactgggagatcaagatggtgaacagctag

SEQ ID NO: 50029 - DNA, 462 bp, Artificial Sequence
  derived and/or modified sequence
atggccctggatggcatccgcatgccagatggctgctacgcagatggcacctgggagctgtctgtgcacgtgacagacctgaacagagatgtgaccctgcgggtgactggagaggtgcacatcggcggcgtgatgctgaagctggtggagaagctggatgtgaagaaggactggagcgaccacgccctgtggtgggagaagaagaggacctggctgctgaagacccactggaccctggacaagtatggcatccaggctgatgccaagctgcagttcaccccccagcacaagctgctgcggctgcagctgcccaacatgaagtatgtgaaggtgaaggtgaacttcagtgacagagtcttcaaggctgtgtctgacatctgcaagaccttcaacatccgccaccctgaggagctgagcctgctgaagaagccccgggaccccaccaagaagaagaagaagtag

SEQ ID NO: 50030 - DNA, 1902 bp, Artificial Sequence
  derived and/or modified sequence
atggccctggacggcatccggatgcccgacggctgctacgccgacggtacctgggagctgtcagtgcatgtaacggacctgaaccgcgatgtgactcttcgagttacgggcgaagtgcatatcggaggagttatgctcaagctggtcgaaaaactggacgtgaagaaagactggagcgaccatgccctgtggtgggagaagaaacgtacatggctcctgaagactcattggacccttgataagtacggtatacaggcagacgctaaactgcaattcacaccgcagcacaaactcttgcgcttgcaactgcctaatatgaaatatgttaaggtcaaggttaattttagcgatagagtgtttaaggctgtgtcagacatatgtaaaacatttaacatccgacatcctgaggaactcagtctgcttaagaaaccaagagaccctaccaaaaaaaaaaaaaaaaaacttgacgatcaaagcgaggacgaggccctcgagcttgaggggcccctcattactcctggcagcggcagcatttactcctcgcctggcctttatagcaagactatgactcctacctacgatgcacacgatggttcacctctgagccccacgtcagcctggtttggtgacagcgctttaagtgagggtaaccccggtatcctggctgtcagccagcctattaccagccctgaaattcttgctaaaatgttcaagccacaagcactgctagataaggccaaaattaatcaaggttggctggattcatcccgatcattaatggagcaggatgtaaaggagaacgaagcgttactgttgcgattcaagtattacagcttcttcgatcttaatcccaagtacgacgcaattaggattaaccaattgtatgaacaggcgaagtgggccatccttttggaagagatcgagtgtacggaagaagaaatgatgatgttcgcagcgctccaatatcatattaacaaactgtccatcatgacaagcgaaaatcacctgaacaactcagataaagaggtagacgaggtcgatgccgctctgtcagatctggaaattactttggagggcgggaaaacgagtaccattctgggtgatataacgtccattccggaacttgcagattatatcaaagtgtttaagcccaaaaaacttacactaaagggctacaagcaatactggtgtaccttcaaagatacatcaatcagctgctataaaagcaaagaagagagttccggcaccccagcgcatcagatgaatctcaggggttgcgaggtcacccccgatgtgaatatcagcggtcagaaatttaacatcaaattgctgatacccgtcgctgaagggatgaacgagatctggttaagatgcgataacgaaaaacagtacgcacactggatggcagcttgccggctggcatccaagggcaaaacaatggcggatagttcttacaatcttgaggtgcaaaacatactgtctttcttaaagatgcaacatctgaatccggatccacaactgattcccgagcaaatcacaacagacatcacaccggaatgtctcgtctctcccaggtacctcaaaaagtacaaaaacaagcagccagggtacattcgggacctaatcacagctagaatcttggaagcacaccagaatgtggctcaaatgagtctcattgaagcaaagatgcggttcattcaagcctggcagagcctacccgagttcgggatcactcatttcattgccaggttccagggtggcaagaaggaagagctgattgggatcgcctacaaccgtttgattcggatggacgcgtccactggagacgccattaagacttggaggttttcgaatatgaagcaatggaatgttaactgggagatcaaaatggtgaattcttag

SEQ ID NO: 50031 - DNA, 462 bp, Artificial Sequence
  derived and/or modified sequence
atggccctggacggcatccggatgcccgacggctgctacgccgacggtacctgggaattgtcagtccatgttaccgatctgaatagggatgttaccctccgggttacaggggaagtgcatatcggaggagtgatgctgaaactggtcgagaagctagatgtgaaaaaggattggtctgaccacgctctgtggtgggaaaaaaagcgaacatggttacttaagacccattggactctggacaagtacggaatccaagccgacgcaaagttacaattcacgccgcagcacaaattgttgcggctgcagttgcccaatatgaagtacgtgaaagtaaaagtgaacttttccgatcgggtgttcaaggccgtctctgacatatgcaaaacgttcaatatcagacaccctgaggagctgtctctgctgaagaaaccacgtgatccaactaaaaagaaaaaaaagtag

SEQ ID NO: 50032 - DNA, 1902 bp, Artificial Sequence
  derived and/or modified sequence
atggcgctggacggcattagaatgccagacggttgctacgctgacggaacctgggagctgagcgttcatgtaacagacttaaatagggatgtcaccctcagggtgaccggagaggttcatattggtggggtgatgttaaagttagtggagaaactggatgtcaagaaggattggagtgaccacgctctgtggtgggagaagaaaaggacatggctgctgaagacacactggactctggataagtatggcatccaggccgacgcaaaattgcaattcacgccacaacacaagctgctaagactgcagctgcctaatatgaagtatgtgaaagtcaaagtgaactttagcgaccgcgtcttcaaggccgtaagtgatatttgtaaaactttcaacataaggcatccagaagagctgtcattgttgaaaaaaccacgggatcctactaagaaaaagaaaaagaaactggacgaccaatctgaagatgaggcattagagctggagggtcccctgatcactcctggttcgggcagcatctactcctcaccgggactgtacagcaaaacgatgacacctacatacgacgcacatgatggctctccgctgtctccaacctccgcctggttcggagattctgcactcagcgaggggaatccagggattttggcggtgtctcaacctataaccagtcctgagatcttggcaaagatgtttaagccccaagccctacttgataaagccaaaatcaaccagggctggctggactcttcgaggagtctgatggaacaggatgtcaaggagaatgaagctcttctcctgcgcttcaaatactattccttcttcgacctgaaccctaagtatgacgcgattcgtattaatcagctctatgaacaagccaaatgggccatcctgctggaggagattgaatgtacggaggaagagatgatgatgtttgccgctctgcagtaccacattaacaaattgagcataatgacaagcgagaaccacctgaacaattcagacaaggaggtggatgaggtggatgccgcactttctgacctggaaattaccctggagggcggtaagacctcaaccattttgggtgacataacctctatccctgagctggccgactatataaaggtgttcaaaccaaaaaaactgaccttgaaagggtataagcaatactggtgcacctttaaggatacatccatcagctgttacaagagcaaggaggaatcctctggcactcctgcccatcagatgaatctccggggttgcgaggtgacccccgatgtgaatatctccggccagaaattcaatatcaagttattaattccagtggcagaaggcatgaacgagatctggctgaggtgcgacaacgagaaacagtacgcacattggatggcggcttgtagactggccagtaagggtaaaacaatggccgatagctcttacaacctcgaggtgcaaaacattctctctttcctcaaaatgcagcatctcaatcctgatccacaactgatcccagagcagatcacaacggacatcacacccgaatgtctcgtgtctcctcggtacttgaaaaaatataagaataagcaaccagggtacatccgcgacctcattacggctcgcatcctggaagcccatcagaatgtcgcacagatgtccttgatcgaggccaagatgcgcttcatccaagcatggcagtctctcccagaatttggcatcactcatttcatcgctcgctttcaggggggtaaaaaggaggagctaattggaattgcctacaatagacttatcaggatggatgcttccacgggtgacgccatcaagacatggcgattctcaaacatgaaacagtggaacgtcaattgggagatcaaaatggtgaatagctag

SEQ ID NO: 50033 - DNA, 462 bp, Artificial Sequence
  derived and/or modified sequence
atggctttggacggcattcgcatgcctgacgggtgttacgcagatggcacatgggagttgtctgtccatgtgacggatcttaatagagatgtgactctgagagtgacaggcgaggttcatattggcggagtgatgctgaaactcgtggagaaactggacgtgaagaaagactggagcgaccacgccctctggtgggagaaaaagagaacatggctgctgaaaacccactggaccctggacaagtatggaatccaagccgacgccaagctgcagtttactccccagcataaacttctgcggttacagttgcctaacatgaaatacgtgaaggtgaaagtcaacttcagtgacagagtctttaaggctgtgagtgacatatgcaagaccttcaacattcgccatcctgaggaattgtcattactgaagaaaccacgggatccaactaaaaagaaaaaaaaatag

SEQ ID NO: 50034 - DNA, 1902 bp, Artificial Sequence
  derived and/or modified sequence
atggccctggacggcatcagaatgcccgacggctgctacgccgacggcacctgggagctgagcgtgcacgtgaccgacctgaacagagacgtgaccctgagagtgaccggcgaggtgcacatcggcggcgtgatgctgaagctggtggagaagctggacgtgaagaaggactggagcgaccacgccctgtggtgggagaagaagagaacctggctgctgaagacccactggaccctggacaagtacggcatccaggccgacgccaagctgcagttcaccccccagcacaagctgctgagactgcagctgcccaacatgaagtacgtgaaggtgaaggtgaacttcagcgacagagtgttcaaggccgtgagcgacatctgcaagaccttcaacatcagacaccccgaggagctgagcctgctgaagaagcccagagaccccaccaagaagaagaagaagaagctggacgaccagagcgaggacgaggccctggagctggagggccccctgatcacccccggcagcggcagcatctacagcagccccggcctgtacagcaagaccatgacccccacctacgacgcccacgacggcagccccctgagccccaccagcgcctggttcggcgacagcgccctgagcgagggcaaccccggcatcctggccgtgagccagcccatcaccagccccgagatcctggccaagatgttcaagccccaggccctgctggacaaggccaagatcaaccagggctggctggacagcagcagaagcctgatggagcaggacgtgaaggagaacgaggccctgctgctgagattcaagtactacagcttcttcgacctgaaccccaagtacgacgccatcagaatcaaccagctgtacgagcaggccaagtgggccatcctgctggaggagatcgagtgcaccgaggaggagatgatgatgttcgccgccctgcagtaccacatcaacaagctgagcatcatgaccagcgagaaccacctgaacaacagcgacaaggaggtggacgaggtggacgccgccctgagcgacctggagatcaccctggagggcggcaagaccagcaccatcctgggcgacatcaccagcatccccgagctggccgactacatcaaggtgttcaagcccaagaagctgaccctgaagggctacaagcagtactggtgcaccttcaaggacaccagcatcagctgctacaagagcaaggaggagagcagcggcacccccgcccaccagatgaacctgagaggctgcgaggtgacccccgacgtgaacatcagcggccagaagttcaacatcaagctgctgatccccgtggccgagggcatgaacgagatctggctgagatgcgacaacgagaagcagtacgcccactggatggccgcctgcagactggccagcaagggcaagaccatggccgacagcagctacaacctggaggtgcagaacatcctgagcttcctgaagatgcagcacctgaaccccgacccccagctgatccccgagcagatcaccaccgacatcacccccgagtgcctggtgagccccagatacctgaagaagtacaagaacaagcagcccggctacatcagagacctgatcaccgccagaatcctggaggcccaccagaacgtggcccagatgagcctgatcgaggccaagatgagattcatccaggcctggcagagcctgcccgagttcggcatcacccacttcatcgccagattccagggcggcaagaaggaggagctgatcggcatcgcctacaacagactgatcagaatggacgccagcaccggcgacgccatcaagacctggagattcagcaacatgaagcagtggaacgtgaactgggagatcaagatggtgaacagctag

SEQ ID NO: 50035 - DNA, 462 bp, Artificial Sequence
  derived and/or modified sequence
atggccctggacggcatcagaatgcccgacggctgctacgccgacggcacctgggagctgagcgtgcacgtgaccgacctgaacagagacgtgaccctgagagtgaccggcgaggtgcacatcggcggcgtgatgctgaagctggtggagaagctggacgtgaagaaggactggagcgaccacgccctgtggtgggagaagaagagaacctggctgctgaagacccactggaccctggacaagtacggcatccaggccgacgccaagctgcagttcaccccccagcacaagctgctgagactgcagctgcccaacatgaagtacgtgaaggtgaaggtgaacttcagcgacagagtgttcaaggccgtgagcgacatctgcaagaccttcaacatcagacaccccgaggagctgagcctgctgaagaagcccagagaccccaccaagaagaagaagaagtag

SEQ ID NO: 50036 - protein, 382 aa, Artificial Sequence
  derived and/or modified sequence
MFKIQLEPLKLRAWTLNGFVKFRNKETSAGPVAVMGKDYYKILGIPSGANEDEIKKAYRKMALKYHPDKNKEPNAEEKFKEIAEAYDVLSDPKKRGLYDQYGEEGLKTGGGTSGGSSGSFHYTFHGDPHATFASFFGGSNPFDIFFASSRSTRPFSGFDPDDMDVDEDEDPFGAFGRFGFNGLSRGPRRAPEPLYPRRKVQDPPVVHELRVSLEEIYHGSTKRMKITRRRLNPDGRTVRTEDKILHIVIKRGWKEGTKITFPKEGDATPDNIPADIVFVLKDKPHAHFRRDGTNVLYSALISLKEALCGCTVNIPTIDGRVIPLPCNDVIKPGTVKRLRGEGLPFPKVPTQRGDLIVEFKVRFPDRLTPQTRQILKQHLPCS

SEQ ID NO: 50037 - protein, 155 aa, Artificial Sequence
  derived and/or modified sequence
MGKDYYKILGIPSGANEDEIKKAYRKMALKYHPDKNKEPNAEEKFKEIAEAYDVLSDPKKRGLYDQYGEEGLKTGGGTSGGSSGSFHYTFHGDPHATFASFFGGSNPFDIFFASSRSTRPFSGFDPDDMDVDEDEDPFGAFGRFGFNGLSRGPRR

SEQ ID NO: 50038 - protein, 462 aa, Artificial Sequence
  derived and/or modified sequence
MGGAEAEPWGRAPGPAIGGRRAGDSCPGWRRRSRSRGRGQRLSHGPRRRPQLLTAAPPLQARGAFRSFPHSWGEDFLASLMFKIQLEPLKLRAWTLNGFVKFRNKETSAGPVAVMGKDYYKILGIPSGANEDEIKKAYRKMALKYHPDKNKEPNAEEKFKEIAEAYDVLSDPKKRGLYDQYGEEGLKTGGGTSGGSSGSFHYTFHGDPHATFASFFGGSNPFDIFFASSRSTRPFSGFDPDDMDVDEDEDPFGAFGRFGFNGLSRGPRRAPEPLYPRRKVQDPPVVHELRVSLEEIYHGSTKRMKITRRRLNPDGRTVRTEDKILHIVIKRGWKEGTKITFPKEGDATPDNIPADIVFVLKDKPHAHFRRDGTNVLYSALISLKEALCGCTVNIPTIDGRVIPLPCNDVIKPGTVKRLRGEGLPFPKVPTQRGDLIVEFKVRFPDRLTPQTRQILKQHLPCS

SEQ ID NO: 50039 - protein, 57 aa, Artificial Sequence
  derived and/or modified sequence
  misc_feature (1)..(1): Xaa can be any naturally occurring amino acid
XGRAPGPAIGGRRAGDSCPGWRRRSRSRGRGQRLSHGPRRRPQLLTETRRPVLVQWL

SEQ ID NO: 50040 - protein, 227 aa, Artificial Sequence
  derived and/or modified sequence
RRQILKELALCLRRQEMYGPRAASRNKETSAGPVAVMGKDYYKILGIPSGANEDEIKKAYRKMALKYHPDKNKEPNAEEKFKEIAEAYDVLSDPKKRGLYDQYGEEGLKTGGGTSGGSSGSFHYTFHGDPHATFASFFGGSNPFDIFFASSRSTRPFSGFDPDDMDVDEDEDPFGAFGRFGFNGLSRGPRRAPEPLYPRRKVQDPPVVHELRVSLEEIYHGSTKRMK

SEQ ID NO: 50041 - DNA, 2492 bp, Artificial Sequence
  derived and/or modified sequence
gcgggcaggcgactcctgtcccgggtggaggcggcggagccggagccgggggagggggcagcggctgtctcacggaccacggcggcgcccgcagctcctcaccgcagcacccccactgcaggcccgaggagctttccggagcttcccacactcctggggagaagacttcttagccagcttgatgtttaaaattcagctggagcccttaaaacttcgagcgtggacgctgaatgggtttgtaaagtttcgaaacaaggagaccagtgctggtccagtggctgtgatgggaaaagattattacaagattcttgggatcccatcgggggccaacgaggatgagatcaagaaagcctaccggaagatggccttgaagtaccacccagacaagaataaagaacccaacgctgaggagaagtttaaggagattgcagaggcctatgatgtgctaagtgaccccaagaaacggggcctgtatgaccagtatggggaggaaggcctgaagaccggcggtggcacatcaggtggctccagtggctcctttcactacacctttcatggggacccccatgccacctttgcctccttctttggtggctccaaccccttcgatatcttctttgccagcagccgctccactcggcccttcagtggctttgacccagatgacatggatgtggatgaagatgaggacccatttggcgctttcggccgttttggcttcaatgggctgagtaggggtccaaggcgagccccagaaccactgtaccctcggcgcaaggtgcaggaccccccagtggtgcacgagctgcgggtgtccctggaggagatctaccatggctccaccaagcgcatgaagatcacaaggcgtcgcctcaaccctgatgggcgaactgtgcgcaccgaggacaagatcctgcacatagtcatcaagcgtggctggaaggaaggcaccaagatcaccttccccaaagaaggcgacgccacacctgacaacatccctgctgacatcgtctttgtgctcaaagacaagccccatgcacacttccgccgagatggcaccaacgtgctctacagtgccctgatcagcctcaaggaggcgctgtgtggctgcactgtgaacattcccactatcgacggccgagtgatccctttgccctgcaatgatgtcatcaagccaggcaccgtgaagagactccgtggggagggccttcccttccccaaagtgccaactcagcgaggagacctcattgttgagttcaaagttcgcttcccagacagattaacaccacagacaagacagatccttaagcagcacctaccctgttcctaggctctgccccagccagtccagagcctaccacagcaatacccccaacactcactccactcaatgtgcacccagcttgatgtccactggacactggcaactttttctaaaatgcaaaaaaaagccactggttttcaggaaaatgttcctgtccctgaccccttttagagctgggctgcctggggggagtgggagggaggtggggagagctagcccaggccaggggtcaatgttcatgtcactagctttcaatccagtttccactgcagtggctggagagtgacctgagtgctacttgaagatatgtagagattccttatccatgcctgtacatagcatgtcctcctcccctcagctttgctaataccagtcccctcccttccctttggcttcctgctgttgggggtggaaaagactagaaaggacattgctttctcagccccacccccaggtccacagtgtccaaggtaatggcacacatattcatgcacaagaagcactcacctagagctgtctgtgcctctctgggagaaaggagagaggataagaagggaaagttcacaacctgtgaacagggacttgagcacgagacacttttcatctggagcaggggggtgagctcctcagcagcctccgtaacagctgccctgcctacacctgcagagctggaggttctgtcctccctgctgctctcaggagtgttcaagggtggagggcagggaatggggcctgaggtattaaggctaagaggtgggggacagggcccatctaccagccttcatcaggaagggaaagggctttggggtcaggtggcagctattccccaccaagagattcagggtcacaggtttttccccacacctctgaactcagggcctagccacccccaaacttccaaatcccacttttgtgatatgtgaagctactcatttcttacccttggaggctgtgtggggaatttccagcccttttatgcctgtgtgatcccaccccacccccatagttgtataaaggtcatagtgaagaagctgggggaagactgcttcagccagatcctggggtggggtctttaggttttctcactttgacaacccccgaatgtttttatagtagtttttttgtatttttttgtaatgacagtattatgtaaaaaataaagtatttt

SEQ ID NO: 50042 - DNA, 1389 bp, Artificial Sequence
  derived and/or modified sequence
atgggcggcgccgaggccgagccctggggcagagcccccggccccgccatcggcggcagaagagccggcgacagctgccccggctggagaagaagaagcagaagcagaggcagaggccagagactgagccacggccccagaagaagaccccagctgctgaccgccgccccccccctgcaggccagaggcgccttcagaagcttcccccacagctggggcgaggacttcctggccagcctgatgttcaagatccagctggagcccctgaagctgagagcctggaccctgaacggcttcgtgaagttcagaaacaaggagaccagcgccggccccgtggccgtgatgggcaaggactactacaagatcctgggcatccccagcggcgccaacgaggacgagatcaagaaggcctacagaaagatggccctgaagtaccaccccgacaagaacaaggagcccaacgccgaggagaagttcaaggagatcgccgaggcctacgacgtgctgagcgaccccaagaagagaggcctgtacgaccagtacggcgaggagggcctgaagaccggcggcggcaccagcggcggcagcagcggcagcttccactacaccttccacggcgacccccacgccaccttcgccagcttcttcggcggcagcaaccccttcgacatcttcttcgccagcagcagaagcaccagacccttcagcggcttcgaccccgacgacatggacgtggacgaggacgaggaccccttcggcgccttcggcagattcggcttcaacggcctgagcagaggccccagaagagcccccgagcccctgtaccccagaagaaaggtgcaggacccccccgtggtgcacgagctgagagtgagcctggaggagatctaccacggcagcaccaagagaatgaagatcaccagaagaagactgaaccccgacggcagaaccgtgagaaccgaggacaagatcctgcacatcgtgatcaagagaggctggaaggagggcaccaagatcaccttccccaaggagggcgacgccacccccgacaacatccccgccgacatcgtgttcgtgctgaaggacaagccccacgcccacttcagaagagacggcaccaacgtgctgtacagcgccctgatcagcctgaaggaggccctgtgcggctgcaccgtgaacatccccaccatcgacggcagagtgatccccctgccctgcaacgacgtgatcaagcccggcaccgtgaagagactgagaggcgagggcctgcccttccccaaggtgcccacccagagaggcgacctgatcgtggagttcaaggtgagattccccgacagactgaccccccagaccagacagatcctgaagcagcacctgccctgcagctag

SEQ ID NO: 50043 - DNA, 174 bp, Artificial Sequence
  derived and/or modified sequence
tgaggcagagcccccggccccgccatcggcggcagaagagccggcgacagctgccccggctggagaagaagaagcagaagcagaggcagaggccagagactgagccacggccccagaagaagaccccagctgctgaccgagaccagaagacccgtgctggtgcagtggctgtag

SEQ ID NO: 50044 - DNA, 1389 bp, Artificial Sequence
  derived and/or modified sequence
atgggaggcgcagaagcagaaccgtgggggcgcgctcctggacccgcaataggaggtcggagggcaggggacagctgtcctggttggaggagacggtctaggtcaagagggcgaggtcagagactatcccacgggccacggcggcgccctcagttactgaccgctgcccccccccttcaagcacggggcgccttccggagtttcccccacagctggggcgaagacttcctggccagcctcatgttcaagattcagcttgagccactcaaactacgcgcctggacactgaatggatttgtgaaattccggaacaaagaaacttcggctgggcccgtcgcagtgatgggcaaggattactacaagatcctgggtatcccctccggcgctaacgaggacgaaatcaagaaagcctatagaaagatggcattgaagtatcacccagataaaaacaaggagccaaacgcggaggagaaattcaaggagatagcagaggcatatgacgtgctctctgatccaaaaaagagagggctgtacgatcagtacggcgaagaaggtctgaagaccggagggggcactagtggcgggtcatctggctcgttccattatacattccacggagatcctcacgctacctttgcctcattctttggcggctccaaccccttcgatatcttttttgcctcctctagaagcacgagaccgtttagcggatttgaccccgatgatatggatgtagatgaggacgaggatccattcggtgcatttggccgttttggttttaatggcctgagtagaggaccacggcgcgcccctgaaccattgtacccccgtaggaaagtacaggatccaccagtagtccacgaactaagggtctccctcgaggagatctaccatggctccaccaagaggatgaagataactaggagacgcctcaatcctgatggacgaacagtcagaactgaggataagattctgcacattgttattaagaggggctggaaggagggcaccaagattactttccccaaagagggagacgcaacgcccgacaacatacccgcagatattgttttcgtattaaaggacaaaccccatgctcacttccgtagggatggcactaatgtgctgtactcagcacttatatctcttaaggaagccctgtgtgggtgcaccgtcaacatcccgacaatcgacggaagagtcattcccttaccctgcaatgatgtcatcaagcctgggacagtaaaacggttgcgtggagagggcctaccgttccccaaagttccaacacagagaggggacctaatagtagaattcaaagtgcgctttccagacaggttgactccccaaacaagacagattctaaagcagcacctgccttgctcgtag

SEQ ID NO: 50045 - DNA, 174 bp, Artificial Sequence
  derived and/or modified sequence
tgagggagagcccctgggcccgcaataggcgggcgaagagccggggatagctgtcctggatggcggcgaagaagtagaagtagagggcgtggtcagcgcctgagccacggacccaggagaagacctcagttactgacagagacaaggaggccagtgctcgttcagtggctgtag

SEQ ID NO: 50046 - DNA, 1444 bp, Artificial Sequence
  derived and/or modified sequence
gcgggcaggcgactcctgtcccgggtggaggcggcggagccggagccgggggagggggcagcggctgtctcacggaccacggcggcgcccgcagctcctcaccgcagcacccccactgcaggcccgaggagctttccggagcttcccacactcctggggagaagacttcttagccagcttgatgtttaaaattcagctggagcccttaaaacttcgagcgtggacgctgaatgggtttgtaaagtttcgaaacaaggagaccagtgctggtccagtggctgtgatgggaaaagattattacaagattcttgggatcccatcgggggccaacgaggatgagatcaagaaagcctaccggaagatggccttgaagtaccacccagacaagaataaagaacccaacgctgaggagaagtttaaggagattgcagaggcctatgatgtgctaagtgaccccaagaaacggggcctgtatgaccagtatggggaggaaggcctgaagaccggcggtggcacatcaggtggctccagtggctcctttcactacacctttcatggggacccccatgccacctttgcctccttctttggtggctccaaccccttcgatatcttctttgccagcagccgctccactcggcccttcagtggctttgacccagatgacatggatgtggatgaagatgaggacccatttggcgctttcggccgttttggcttcaatgggctgagtaggggtccaaggcgagccccagaaccactgtaccctcggcgcaaggtgcaggaccccccagtggtgcacgagctgcgggtgtccctggaggagatctaccatggctccaccaagcgcatgaagatcacaaggcgtcgcctcaaccctgatgggcgaactgtgcgcaccgaggacaagatcctgcacatagtcatcaagcgtggctggaaggaaggcaccaagatcaccttccccaaagaaggcgacgccacacctgacaacatccctgctgacatcgtctttgtgctcaaagacaagccccatgcacacttccgccgagatggcaccaacgtgctctacagtgccctgatcagcctcaaggaggcgctgtgtggctgcactgtgaacattcccactatcgacggccgagtgatccctttgccctgcaatgatgtcatcaagccaggcaccgtgaagagactccgtggggagggccttcccttccccaaagtgccaactcagcgaggagacctcattgttgagttcaaagttcgcttcccagacagattaacaccacagacaagacagatccttaagcagcaatacccccaacactcactccactcaatgtgcacccagcttgatgtccactggacactggcaactttttctaaaatgcaaaaaaaagccactggttttcaggaaaatgttcctgtccctgaccccttttag

SEQ ID NO: 50047 - DNA, 1389 bp, Artificial Sequence
  derived and/or modified sequence
atgggcggcgctgaggccgagccctggggccgggcccctggccctgccatcggcggccggcgggccggggacagctgccccggctggaggagaagaagccgcagccggggccggggccagaggctgagccacggcccccggcggcggccccagctgctgacagctgccccacccctgcaggcccggggggccttccgctccttcccccacagctggggcgaggacttcctggccagcctgatgttcaagatccagctggagcccctgaagctgcgggcctggaccctgaatggatttgtgaagttcaggaacaaggagaccagcgctggccctgtggccgtgatgggcaaggactactacaagatcctgggcatccccagcggggccaatgaagatgagatcaagaaggcctacaggaagatggccctgaagtaccacccagacaagaacaaggagcccaatgctgaggagaagttcaaggagattgctgaggcctatgatgtgctgagtgaccccaagaagaggggcctgtatgaccagtatggagaggagggcctgaagacaggaggcggcaccagcggcggcagcagcggcagcttccactacaccttccatggagacccccacgccacctttgccagcttcttcggcggcagcaacccctttgacatcttctttgccagcagccgcagcacccggcccttcagcggctttgatcctgatgacatggatgtggatgaagatgaggacccctttggagccttcggccgcttcggcttcaacggcctgagccggggcccccggcgggcccctgagcccctgtaccccaggaggaaggtgcaggacccccctgtggtgcatgagctgcgggtgtccctggaggagatctaccacggcagcaccaagaggatgaagatcacccggcggcggctgaacccagatggccgcacagtgaggacagaggacaagatcctgcacatcgtcatcaagaggggctggaaggagggcaccaagatcaccttccccaaggagggagatgccaccccagacaacatcccagctgacatcgtgtttgtgctgaaggacaagccccacgcccacttcagaagagatggcaccaacgtgctgtacagcgccctgatcagcctgaaggaggccctgtgtggctgcaccgtgaacatccccaccattgatggccgggtcatccccctgccctgcaatgatgtgatcaagccaggcaccgtgaagaggctgcggggggagggcctgcccttccccaaggtgcccacccagagaggagacctgattgtggagttcaaggtgcgcttcccagaccggctgaccccccagacccggcagatcctgaagcagcacctgccctgcagctag

SEQ ID NO: 50048 - DNA, 174 bp, Artificial Sequence
  derived and/or modified sequence
tgaggaagagcccctggccctgccatcggcggccggcgggccggggacagctgccccggctggaggagaagaagccgcagccggggccggggccagaggctgagccacggcccccggcggcggccccagctgctgacagagaccaggaggcctgtgctggtgcagtggctgtag

SEQ ID NO: 50049 - DNA, 1389 bp, Artificial Sequence
  derived and/or modified sequence
atgggcggcgccgaggccgagccctggggccgggcccccggccccgctattggcggccggagggctggtgactcttgccccgggtggcggcgtcgaagtagaagcagaggaaggggacagcggctgtctcacgggccccgcaggaggcctcagttgctcaccgctgcaccgcctctgcaggctagaggggcctttcggtcatttccccactcatggggggaggactttctcgctagcctcatgttcaagatccagctggagccgctcaagttgcgagcttggaccctcaacggatttgttaaatttcgcaataaggaaacaagcgccgggcccgttgccgtgatgggaaaagactactacaagatcctgggcatccccagcggcgccaatgaggatgaaattaagaaggcctacagaaaaatggccctgaagtaccatcctgataaaaacaaagaacctaacgctgaggaaaagtttaaggaaatcgccgaagcctacgatgtattgtcggatcctaagaagcggggcctgtacgaccagtatggcgaggaaggactgaaaactggaggcggcaccagcggagggagttccggctcttttcactatacctttcacggggatcctcatgctacatttgcaagcttcttcgggggaagcaacccctttgatattttcttcgcttccagtcggtcaaccagaccgttctccggcttcgatccagatgacatggacgtagatgaagatgaagacccttttggggcgttcgggcgattcgggttcaatggcctgagtagaggaccccggagagccccagagcccctgtatcctagaagaaaagtgcaagacccacccgttgtacacgagctcagggtctctctggaagagatttaccatggctctaccaaaaggatgaaaatcactcgacggcggctcaaccccgatggaagaacggttcgcacagaggacaagatattgcacattgtcataaagagaggatggaaagagggaactaagatcacctttccaaaggaaggggacgctactccagataatatacctgctgatatcgtgtttgtgctgaaagacaagccacacgcgcatttcagacgagatgggacgaatgtactctacagcgccctgatcagtctgaaagaggccctgtgtggctgcactgtgaatattcccacaatagacggcagggttatacccctgccgtgcaacgacgtgatcaagcccgggacagtgaagcgcttaaggggggagggtctccccttccctaaagtgccaactcagcgcggcgatctgatcgtggagttcaaagtgaggttccctgatagactaactccccagactcgccagattctcaaacagcacctgccctgttcatag

SEQ ID NO: 50050 - DNA, 174 bp, Artificial Sequence
  derived and/or modified sequence
tgaggccgggcccccggccccgccatcggcggccggcgggccggcgactcatgtcctggatggaggcggcggagcagaagtagggggcgaggccaacggttaagccatggccccaggcggaggcctcagcttctgactgaaacccggcggccggtgctggtccaatggttatag

SEQ ID NO: 50051 - DNA, 1389 bp, Artificial Sequence
  derived and/or modified sequence
atgggcggagctgaagcagagccttgggggcgagcacctggcccagcaatcggtgggcgtagagcaggggacagttgtcccggttggagaagaaggagcagatctcggggacgcggacagcggttgtcgcacggtccacgcaggaggccacagctgctaacagcagcccctccactgcaggcacgcggagcctttcgctctttcccccattcatggggagaggattttctagcttctctgatgtttaagatccagctcgaacccttgaaactccgagcctggacactcaacgggtttgtgaaatttagaaataaagaaaccagcgccggaccagttgccgtaatggggaaagactactacaaaattcttggcatacccagtggggctaatgaggatgaaatcaagaaagcctataggaagatggccctgaagtatcaccccgacaagaacaaggaaccaaacgctgaggaaaaatttaaggaaatagccgaagcctacgatgtcctgtctgatcctaaaaaacgaggtctgtatgaccagtatggagaagaaggcctcaagaccggcggaggaacgtcaggcggttcaagtggttctttccattacacatttcacggtgatccacatgccaccttcgctagtttctttgggggatcgaatccctttgatattttctttgcctcctccagatctaccagacccttctctggattcgatccggacgacatggatgtcgacgaagatgaggatcctttcggcgcttttggacgatttgggtttaatggcctttcccgcggaccaagaagggcacctgagcctttgtacccccgtagaaaagtgcaggatcctccagtcgttcacgaactccgggtgagcctggaagagatctatcacggctccactaaacggatgaaaatcactcgccgaaggttgaatcccgacggaaggaccgttcgtactgaagataagattcttcacattgtcataaaacgcggatggaaggaaggaacgaagatcactttccctaaggagggtgacgctacccctgataatattcctgcggacatcgtttttgtgttaaaggacaaaccccacgctcactttagaagagatgggacaaacgtgctctatagtgccttgattagcttgaaagaggctctctgtggttgtacagtcaacattcccactatcgacggacgggttatccccttgccatgtaatgatgttatcaaaccgggtacagtcaaaaggctgaggggtgaggggctgccctttcctaaagtacccacgcagcgtggagacctgatcgtggagttcaaagtgaggtttccagatcgcctcactcctcagacgaggcaaatccttaaacagcaccttccatgtagttag

SEQ ID NO: 50052 - DNA, 174 bp, Artificial Sequence
  derived and/or modified sequence
tgaggacgcgcacccggacccgcaatcgggggaaggagagccggtgactcgtgtcccggatggcgcagacggtcccgcagtcgaggacggggacagcgcctctcccacggtcctcggcgacgaccacaacttcttactgagactcgtcggcctgtgctcgttcagtggttgtag

SEQ ID NO: 50053 - DNA, 2589 bp, Artificial Sequence
  derived and/or modified sequence
ctgagctgagtgacaggaagacggttcaatgggcggcgcggaggcggagccgtgggggcgggctcccggtcccgctatcggcggccggcgggcaggcgactcctgtcccgggtggaggcggcggagccggagccgggggagggggcagcggctgtctcacggaccacggcggcgcccgcagctcctcaccgcagcacccccactgcaggcccgaggagctttccggagcttcccacactcctggggagaagacttcttagccagcttgatgtttaaaattcagctggagcccttaaaacttcgagcgtggacgctgaatgggtttgtaaagtttcgaaacaaggagaccagtgctggtccagtggctgtgatgggaaaagattattacaagattcttgggatcccatcgggggccaacgaggatgagatcaagaaagcctaccggaagatggccttgaagtaccacccagacaagaataaagaacccaacgctgaggagaagtttaaggagattgcagaggcctatgatgtgctaagtgaccccaagaaacggggcctgtatgaccagtatggggaggaaggcctgaagaccggcggtggcacatcaggtggctccagtggctcctttcactacacctttcatggggacccccatgccacctttgcctccttctttggtggctccaaccccttcgatatcttctttgccagcagccgctccactcggcccttcagtggctttgacccagatgacatggatgtggatgaagatgaggacccatttggcgctttcggccgttttggcttcaatgggctgagtaggggtccaaggcgagccccagaaccactgtaccctcggcgcaaggtgcaggaccccccagtggtgcacgagctgcgggtgtccctggaggagatctaccatggctccaccaagcgcatgaagatcacaaggcgtcgcctcaaccctgatgggcgaactgtgcgcaccgaggacaagatcctgcacatagtcatcaagcgtggctggaaggaaggcaccaagatcaccttccccaaagaaggcgacgccacacctgacaacatccctgctgacatcgtctttgtgctcaaagacaagccccatgcacacttccgccgagatggcaccaacgtgctctacagtgccctgatcagcctcaaggaggcgctgtgtggctgcactgtgaacattcccactatcgacggccgagtgatccctttgccctgcaatgatgtcatcaagccaggcaccgtgaagagactccgtggggagggccttcccttccccaaagtgccaactcagcgaggagacctcattgttgagttcaaagttcgcttcccagacagattaacaccacagacaagacagatccttaagcagcacctaccctgttcctaggctctgccccagccagtccagagcctaccacagcaatacccccaacactcactccactcaatgtgcacccagcttgatgtccactggacactggcaactttttctaaaatgcaaaaaaaagccactggttttcaggaaaatgttcctgtccctgaccccttttagagctgggctgcctggggggagtgggagggaggtggggagagctagcccaggccaggggtcaatgttcatgtcactagctttcaatccagtttccactgcagtggctggagagtgacctgagtgctacttgaagatatgtagagattccttatccatgcctgtacatagcatgtcctcctcccctcagctttgctaataccagtcccctcccttccctttggcttcctgctgttgggggtggaaaagactagaaaggacattgctttctcagccccacccccaggtccacagtgtccaaggtaatggcacacatattcatgcacaagaagcactcacctagagctgtctgtgcctctctgggagaaaggagagaggataagaagggaaagttcacaacctgtgaacagggacttgagcacgagacacttttcatctggagcaggggggtgagctcctcagcagcctccgtaacagctgccctgcctacacctgcagagctggaggttctgtcctccctgctgctctcaggagtgttcaagggtggagggcagggaatggggcctgaggtattaaggctaagaggtgggggacagggcccatctaccagccttcatcaggaagggaaagggctttggggtcaggtggcagctattccccaccaagagattcagggtcacaggtttttccccacacctctgaactcagggcctagccacccccaaacttccaaatcccacttttgtgatatgtgaagctactcatttcttacccttggaggctgtgtggggaatttccagcccttttatgcctgtgtgatcccaccccacccccatagttgtataaaggtcatagtgaagaagctgggggaagactgcttcagccagatcctggggtggggtctttaggttttctcactttgacaacccccgaatgtttttatagtagtttttttgtatttttttgtaatgacagtattatgtaaaaaataaagtattttaaaaatatgg

SEQ ID NO: 50054 - DNA, 132 bp, Artificial Sequence
  derived and/or modified sequence
atgaaactcctgtatttattcctggccattctgttggctatcgaagaaccggtaatttctgccctggtgcgaaccgtggggtgttgcctggacacagcccgacagacaccccacccctccatgcatggctag

SEQ ID NO: 50055 - protein, 348 aa, Artificial Sequence
  derived and/or modified sequence
MGKDYYKILGIPSGANEDEIKKAYRKMALKYHPDKNKEPNAEEKFKEIAEAYDVLSDPKKRGLYDQYGEEGLKTGGGTSGGSSGSFHYTFHGDPHATFASFFGGSNPFDIFFASSRSTRPFSGFDPDDMDVDEDEDPFGAFGRFGFNGLSRGPRRAPEPLYPRRKVQDPPVVHELRVSLEEIYHGSTKRMKITRRRLNPDGRTVRTEDKILHIVIKRGWKEGTKITFPKEGDATPDNIPADIVFVLKDKPHAHFRRDGTNVLYSALISLKEALCGCTVNIPTIDGRVIPLPCNDVIKPGTVKRLRGEGLPFPKVPTQRGDLIVEFKVRFPDRLTPQTRQILKQHLPCS

SEQ ID NO: 50056 - protein, 386 aa, Artificial Sequence
  derived and/or modified sequence
MGKDYYKILGIPSGANEDEIKKAYRKMALKYHPDKNKEPNAEEKFKEIAEAYDVLSDPKKRGLYDQYGEEGLKTGGGTSGGSSGSFHYTFHGDPHATFASFFGGSNPFDIFFASSRSTRPFSGFDPDDMDVDEDEDPFGAFGRFGFNGLSRGPRRAPEPLYPRRKVQDPPVVHELRVSLEEIYHGSTKRMKITRRRLNPDGRTVRTEDKILHIVIKRGWKEGTKITFPKEGDATPDNIPADIVFVLKDKPHAHFRRDGTNVLYSALISLKEALCGCTVNIPTIDGRVIPLPCNDVIKPGTVKRLRGEGLPFPKVPTQRGDLIVEFKVRFPDRLTPQTRQILKQQYPQHSLHSMCTQLDVHWTLATFSKMQKKATGFQENVPVPDPF

SEQ ID NO: 50057 - protein, 420 aa, Artificial Sequence
  derived and/or modified sequence
MFKRTVLSCPPPAAPPLQARGAFRSFPHSWGEDFLASLMFKIQLEPLKLRAWTLNGFVKFRNKETSAGPVAVMGKDYYKILGIPSGANEDEIKKAYRKMALKYHPDKNKEPNAEEKFKEIAEAYDVLSDPKKRGLYDQYGEEGLKTGGGTSGGSSGSFHYTFHGDPHATFASFFGGSNPFDIFFASSRSTRPFSGFDPDDMDVDEDEDPFGAFGRFGFNGLSRGPRRAPEPLYPRRKVQDPPVVHELRVSLEEIYHGSTKRMKITRRRLNPDGRTVRTEDKILHIVIKRGWKEGTKITFPKEGDATPDNIPADIVFVLKDKPHAHFRRDGTNVLYSALISLKEALCGCTVNIPTIDGRVIPLPCNDVIKPGTVKRLRGEGLPFPKVPTQRGDLIVEFKVRFPDRLTPQTRQILKQHLPCS

SEQ ID NO: 50058 - DNA, 1149 bp, Artificial Sequence
  derived and/or modified sequence
atgttcaagatccagctggagcccctgaagctgagagcctggaccctgaacggcttcgtgaagttcagaaacaaggagaccagcgccggccccgtggccgtgatgggcaaggactactacaagatcctgggcatccccagcggcgccaacgaggacgagatcaagaaggcctacagaaagatggccctgaagtaccaccccgacaagaacaaggagcccaacgccgaggagaagttcaaggagatcgccgaggcctacgacgtgctgagcgaccccaagaagagaggcctgtacgaccagtacggcgaggagggcctgaagaccggcggcggcaccagcggcggcagcagcggcagcttccactacaccttccacggcgacccccacgccaccttcgccagcttcttcggcggcagcaaccccttcgacatcttcttcgccagcagcagaagcaccagacccttcagcggcttcgaccccgacgacatggacgtggacgaggacgaggaccccttcggcgccttcggcagattcggcttcaacggcctgagcagaggccccagaagagcccccgagcccctgtaccccagaagaaaggtgcaggacccccccgtggtgcacgagctgagagtgagcctggaggagatctaccacggcagcaccaagagaatgaagatcaccagaagaagactgaaccccgacggcagaaccgtgagaaccgaggacaagatcctgcacatcgtgatcaagagaggctggaaggagggcaccaagatcaccttccccaaggagggcgacgccacccccgacaacatccccgccgacatcgtgttcgtgctgaaggacaagccccacgcccacttcagaagagacggcaccaacgtgctgtacagcgccctgatcagcctgaaggaggccctgtgcggctgcaccgtgaacatccccaccatcgacggcagagtgatccccctgccctgcaacgacgtgatcaagcccggcaccgtgaagagactgagaggcgagggcctgcccttccccaaggtgcccacccagagaggcgacctgatcgtggagttcaaggtgagattccccgacagactgaccccccagaccagacagatcctgaagcagcacctgccctgcagctag

SEQ ID NO: 50059 - DNA, 1263 bp, Artificial Sequence
  derived and/or modified sequence
atgttcaagagaaccgtgctgagctgccccccccccgccgccccccccctgcaggccagaggcgccttcagaagcttcccccacagctggggcgaggacttcctggccagcctgatgttcaagatccagctggagcccctgaagctgagagcctggaccctgaacggcttcgtgaagttcagaaacaaggagaccagcgccggccccgtggccgtgatgggcaaggactactacaagatcctgggcatccccagcggcgccaacgaggacgagatcaagaaggcctacagaaagatggccctgaagtaccaccccgacaagaacaaggagcccaacgccgaggagaagttcaaggagatcgccgaggcctacgacgtgctgagcgaccccaagaagagaggcctgtacgaccagtacggcgaggagggcctgaagaccggcggcggcaccagcggcggcagcagcggcagcttccactacaccttccacggcgacccccacgccaccttcgccagcttcttcggcggcagcaaccccttcgacatcttcttcgccagcagcagaagcaccagacccttcagcggcttcgaccccgacgacatggacgtggacgaggacgaggaccccttcggcgccttcggcagattcggcttcaacggcctgagcagaggccccagaagagcccccgagcccctgtaccccagaagaaaggtgcaggacccccccgtggtgcacgagctgagagtgagcctggaggagatctaccacggcagcaccaagagaatgaagatcaccagaagaagactgaaccccgacggcagaaccgtgagaaccgaggacaagatcctgcacatcgtgatcaagagaggctggaaggagggcaccaagatcaccttccccaaggagggcgacgccacccccgacaacatccccgccgacatcgtgttcgtgctgaaggacaagccccacgcccacttcagaagagacggcaccaacgtgctgtacagcgccctgatcagcctgaaggaggccctgtgcggctgcaccgtgaacatccccaccatcgacggcagagtgatccccctgccctgcaacgacgtgatcaagcccggcaccgtgaagagactgagaggcgagggcctgcccttccccaaggtgcccacccagagaggcgacctgatcgtggagttcaaggtgagattccccgacagactgaccccccagaccagacagatcctgaagcagcacctgccctgcagctag

SEQ ID NO: 50060 - DNA, 684 bp, Artificial Sequence
  derived and/or modified sequence
agaagacagatcctgaaggagctggccctgtgcctgagaagacaggagatgtacggccccagagccgccagcagaaacaaggagaccagcgccggccccgtggccgtgatgggcaaggactactacaagatcctgggcatccccagcggcgccaacgaggacgagatcaagaaggcctacagaaagatggccctgaagtaccaccccgacaagaacaaggagcccaacgccgaggagaagttcaaggagatcgccgaggcctacgacgtgctgagcgaccccaagaagagaggcctgtacgaccagtacggcgaggagggcctgaagaccggcggcggcaccagcggcggcagcagcggcagcttccactacaccttccacggcgacccccacgccaccttcgccagcttcttcggcggcagcaaccccttcgacatcttcttcgccagcagcagaagcaccagacccttcagcggcttcgaccccgacgacatggacgtggacgaggacgaggaccccttcggcgccttcggcagattcggcttcaacggcctgagcagaggccccagaagagcccccgagcccctgtaccccagaagaaaggtgcaggacccccccgtggtgcacgagctgagagtgagcctggaggagatctaccacggcagcaccaagagaatgaagtag

SEQ ID NO: 50061 - DNA, 1149 bp, Artificial Sequence
  derived and/or modified sequence
atgtttaagatccaacttgagcctcttaagctgagagcatggaccctgaacggatttgtgaagttccgcaacaaagagacttctgctgggccggttgctgttatgggcaaagattactacaagattttgggaatcccatctggggccaatgaggacgaaatcaaaaaagcataccgcaagatggccctcaagtaccatccagataaaaacaaggagcctaatgcagaggaaaagtttaaggaaatagccgaagcctacgacgtcctttcggatcctaagaaacggggcctttacgatcagtatggagaggagggtctgaagacagggggcggcacgagtggagggagctccgggtcattccattacacttttcacggggacccgcacgctaccttcgcgagcttcttcggtggcagcaacccctttgacattttttttgcaagttcacgtagcacccggccgttttcgggttttgaccccgacgatatggatgtcgatgaggacgaagaccccttcggcgcgttcggtaggtttggttttaacgggctttccaggggaccgcgacgagcccctgagccactctacccgagacgtaaggtgcaggatccccctgtggtacacgaacttcgcgtatcattagaggaaatctatcatgggtcaacaaagagaatgaagattacccgtagacgtcttaaccccgacggtaggaccgtgcgcacagaagataagatactgcacattgtaataaagcgcggatggaaggaggggactaagatcacctttccgaaagaaggagacgccacaccagataatattcccgctgacatcgtctttgttctgaaggataagccccacgctcatttccgacgagatgggactaacgtgctgtactctgcgctgatatccctcaaagaagctctgtgtggttgcaccgtgaacatacctaccatcgacggacgcgtgattcctctgccatgtaacgacgtcattaagcccggtactgtgaagcggctgcgcggggaagggctgccctttcccaaggtgccaacccagcggggcgacctgatcgtggaattcaaggtcaggtttccggatcggctcaccccacagaccagacaaattctgaaacagcatctgccgtgcagctag

SEQ ID NO: 50062 - DNA, 1263 bp, Artificial Sequence
  derived and/or modified sequence
atgtttaaaaggaccgtgctgtcctgccctccccccgccgctccgcccctccaagccaggggagccttcaggagcttccctcacagctggggcgaggattttctggcttccctgatgttcaagattcagctggagcccctcaagctgagagcatggacgctaaacgggttcgtgaaattcagaaacaaggagaccagtgcggggccagtcgcagttatgggaaaagactattacaagatcctgggcatcccttccggtgcgaacgaagatgagattaagaaagcctaccggaagatggcacttaagtaccaccccgataagaacaaagaacccaacgccgaagagaagtttaaggaaattgccgaggcatacgatgtcctatcggatcctaaaaaacgcggcctgtacgatcaatatggagaggaaggactcaaaactggcgggggaacaagcggcggcagtagtggatccttccactatacctttcatggggatcctcacgccactttcgcatcattcttcggcggcagtaacccattcgacatcttttttgccagctctcgttccacaaggcccttttccgggttcgaccccgacgacatggacgttgacgaagatgaagatcctttcggcgcatttggacgattcggatttaacggactttctagagggcccagaagagccccagagccactgtacccacgccgaaaggttcaagaccctcctgtggtccatgagttgagggtcagccttgaagagatttaccatggctcaaccaagcggatgaagataaccaggagacggctgaaccccgatggcaggaccgtaaggaccgaggacaagatcttacatattgtgatcaaacgaggctggaaggaaggcactaaaattacattccccaaggagggcgacgccacacccgacaatatccccgcagatatcgtgttcgttctgaaggacaaaccacacgctcactttcgccgcgatggaaccaatgtgttgtactctgctctcatttcactgaaggaggccctctgtgggtgtactgtcaatattccgactattgacggaagagtgatccctctcccatgcaatgacgtgatcaaacccgggacggttaagcggctgcgaggcgagggcctccccttccccaaagtgccgacccagcggggcgatctgattgttgagttcaaagtccggttcccagaccgtttgaccccacaaacgaggcagattctgaagcagcacctcccatgttcctag

SEQ ID NO: 50063 - DNA, 684 bp, Artificial Sequence
  derived and/or modified sequence
cgaaggcaaattttgaaagaattggccctttgccttaggcggcaagagatgtacggtccacgcgctgcttctcggaacaaagagacgtctgccggaccagttgccgtgatgggcaaggattattacaagatcctgggcattccttccggggcaaatgaggacgagatcaaaaaggcctaccgcaagatggcactcaagtaccaccccgataagaacaaagagcctaatgcagaagagaaattcaaggagattgccgaggcctacgatgttctctcagatcccaaaaagaggggattgtacgatcagtatggggaagaagggctgaagacaggcggaggcacgagcgggggctcttccggatccttccattacacctttcacggcgacccccacgcaacctttgcaagtttctttggcggtagtaacccattcgatattttttttgcctccagtcgatcaacgcgccctttcagtggattcgaccccgacgacatggatgtggatgaagacgaggatccttttggggctttcgggcggttcggcttcaatggtctgagtagggggccacggcgagcgcccgaacctctgtaccctcgaaggaaagtgcaggaccctcccgtggtacacgaacttcgcgtctctctagaagagatctatcacggatcgactaagcgcatgaagtag

SEQ ID NO: 50064 - DNA, 1149 bp, Artificial Sequence
  derived and/or modified sequence
atgttcaagatccagctggagcccctgaagctgcgggcctggaccctgaatggatttgtgaagttcaggaacaaggagaccagcgctggccctgtggccgtgatgggcaaggactactacaagatcctgggcatccccagcggggccaatgaagatgagatcaagaaggcctacaggaagatggccctgaagtaccacccagacaagaacaaggagcccaatgctgaggagaagttcaaggagattgctgaggcctatgatgtgctgagtgaccccaagaagaggggcctgtatgaccagtatggagaggagggcctgaagacaggaggcggcaccagcggcggcagcagcggcagcttccactacaccttccatggagacccccacgccacctttgccagcttcttcggcggcagcaacccctttgacatcttctttgccagcagccgcagcacccggcccttcagcggctttgatcctgatgacatggatgtggatgaagatgaggacccctttggagccttcggccgcttcggcttcaacggcctgagccggggcccccggcgggcccctgagcccctgtaccccaggaggaaggtgcaggacccccctgtggtgcatgagctgcgggtgtccctggaggagatctaccacggcagcaccaagaggatgaagatcacccggcggcggctgaacccagatggccgcacagtgaggacagaggacaagatcctgcacatcgtcatcaagaggggctggaaggagggcaccaagatcaccttccccaaggagggagatgccaccccagacaacatcccagctgacatcgtgtttgtgctgaaggacaagccccacgcccacttcagaagagatggcaccaacgtgctgtacagcgccctgatcagcctgaaggaggccctgtgtggctgcaccgtgaacatccccaccattgatggccgggtcatccccctgccctgcaatgatgtgatcaagccaggcaccgtgaagaggctgcggggggagggcctgcccttccccaaggtgcccacccagagaggagacctgattgtggagttcaaggtgcgcttcccagaccggctgaccccccagacccggcagatcctgaagcagcacctgccctgcagctag

SEQ ID NO: 50065 - DNA, 1263 bp, Artificial Sequence
  derived and/or modified sequence
atgttcaagaggacagtgctgagctgccccccacctgctgccccacccctgcaggcccggggggccttccgctccttcccccacagctggggcgaggacttcctggccagcctgatgttcaagatccagctggagcccctgaagctgcgggcctggaccctgaatggatttgtgaagttcaggaacaaggagaccagcgctggccctgtggccgtgatgggcaaggactactacaagatcctgggcatccccagcggggccaatgaagatgagatcaagaaggcctacaggaagatggccctgaagtaccacccagacaagaacaaggagcccaatgctgaggagaagttcaaggagattgctgaggcctatgatgtgctgagtgaccccaagaagaggggcctgtatgaccagtatggagaggagggcctgaagacaggaggcggcaccagcggcggcagcagcggcagcttccactacaccttccatggagacccccacgccacctttgccagcttcttcggcggcagcaacccctttgacatcttctttgccagcagccgcagcacccggcccttcagcggctttgatcctgatgacatggatgtggatgaagatgaggacccctttggagccttcggccgcttcggcttcaacggcctgagccggggcccccggcgggcccctgagcccctgtaccccaggaggaaggtgcaggacccccctgtggtgcatgagctgcgggtgtccctggaggagatctaccacggcagcaccaagaggatgaagatcacccggcggcggctgaacccagatggccgcacagtgaggacagaggacaagatcctgcacatcgtcatcaagaggggctggaaggagggcaccaagatcaccttccccaaggagggagatgccaccccagacaacatcccagctgacatcgtgtttgtgctgaaggacaagccccacgcccacttcagaagagatggcaccaacgtgctgtacagcgccctgatcagcctgaaggaggccctgtgtggctgcaccgtgaacatccccaccattgatggccgggtcatccccctgccctgcaatgatgtgatcaagccaggcaccgtgaagaggctgcggggggagggcctgcccttccccaaggtgcccacccagagaggagacctgattgtggagttcaaggtgcgcttcccagaccggctgaccccccagacccggcagatcctgaagcagcacctgccctgcagctag

SEQ ID NO: 50066 - DNA, 684 bp, Artificial Sequence
  derived and/or modified sequence
agacggcagatcctgaaggagctggccctgtgcctgcggcggcaggagatgtatggcccccgggccgccagcaggaacaaggagaccagcgctggccctgtggccgtgatgggcaaggactactacaagatcctgggcatccccagcggggccaatgaagatgagatcaagaaggcctacaggaagatggccctgaagtaccacccagacaagaacaaggagcccaatgctgaggagaagttcaaggagattgctgaggcctatgatgtgctgagtgaccccaagaagaggggcctgtatgaccagtatggagaggagggcctgaagacaggaggcggcaccagcggcggcagcagcggcagcttccactacaccttccatggagacccccacgccacctttgccagcttcttcggcggcagcaacccctttgacatcttctttgccagcagccgcagcacccggcccttcagcggctttgatcctgatgacatggatgtggatgaagatgaggacccctttggagccttcggccgcttcggcttcaacggcctgagccggggcccccggcgggcccctgagcccctgtaccccaggaggaaggtgcaggacccccctgtggtgcatgagctgcgggtgtccctggaggagatctaccacggcagcaccaagaggatgaagtag

SEQ ID NO: 50067 - DNA, 1149 bp, Artificial Sequence
  derived and/or modified sequence
atgttcaagatccagctggagcccctgaagctgcgggcctggaccctcaacggctttgtgaagtttcgcaacaaagagacatctgcaggacccgtcgccgtgatgggaaaagattattacaagatcctgggcattcccagtggagctaatgaggatgaaatcaagaaggcctaccgtaaaatggcacttaagtaccatccagataagaacaaagaacccaacgctgaagagaagtttaaggagatagcagaggcatacgacgtacttagtgaccccaaaaaacgcggcctgtatgaccagtatggagaggaagggctgaaaaccgggggtggaacctccggcggatcgagcgggtcatttcattacacattccacggggatcctcacgctacttttgcatccttcttcggagggagtaaccctttcgatatcttttttgcaagctcccgctctacccgcccatttagtggatttgatccagacgacatggacgtggatgaggatgaggatccatttggcgcctttgggagattcggctttaatgggctgtcgagaggccccaggcgagcccccgaaccgctgtatcccaggcgaaaagtccaggacccccctgtggtgcacgaactgagggtgtctttagaggagatctatcatgggagtactaagcgcatgaagatcacacggaggcgtctgaaccctgatgggcggacagtgcggaccgaggacaagatcctccatatcgtgatcaagagggggtggaaagagggaacaaaaattacctttccgaaagaaggcgacgcgacccccgataacattccagcagacatagtgtttgtgctgaaagacaagcctcatgcccacttcaggagagacggaacaaatgtgctgtattcagccctgatttcacttaaggaagccctgtgcggatgcacagtcaacattcctaccattgacggaagagtgatcccactcccctgcaatgacgtgattaagcccggcactgttaagcgtttacggggagaagggctgccatttccaaaggtgccaacacagcggggggatctcatcgttgagtttaaggtccgcttcccagatcgactaacgccccagacaagacagattctgaagcagcatttgccatgcagctag

SEQ ID NO: 50068 - DNA, 1263 bp, Artificial Sequence
  derived and/or modified sequence
atgttcaagcggaccgtgctgagctgccccccccccgccgcccccccattacaggctcgaggggccttcaggtctttccctcacagctggggggaggactttctggcctctttaatgtttaagatccagctggaaccgctgaaactgagggcttggacgctaaatggcttcgtaaagtttagaaacaaggagactagcgctggtcccgtagccgtgatggggaaagattattataaaattttggggatccctagtggcgccaacgaagatgaaatcaaaaaagcttaccgtaaaatggccctgaaatatcatcccgacaagaataaggagccaaatgctgaagaaaagtttaaggagattgcggaagcttatgacgtgctctctgacccgaagaagcgcggcctttacgaccagtacggggaagaaggcctcaagacagggggaggaaccagcggaggatcctccggctcattccattatacatttcatggggatccacacgctactttcgcctcgtttttcggaggttcaaacccgttcgacatcttctttgcttcctctcgaagcacgcggcccttctccgggttcgatcctgatgacatggatgtggacgaagatgaagaccctttcggcgcctttggacgcttcgggttcaacggcttaagtcgcggccctcggagagcccccgagcccctttacccaaggagaaaagtacaggatccacccgtggtccatgagctgagggtctcactggaggagatatatcatggctcaactaaaaggatgaagattaccagaagacgtctcaacccagacggccgaactgtcagaaccgaagacaagatcctgcatatcgtgattaagcgcggttggaaagagggtaccaagatcacattcccaaaagagggagatgctacacccgataatatccccgccgacatcgtctttgttctgaaggacaaaccccatgcccactttagacgggatggaaccaacgtgttgtactctgcgctcattagcctcaaagaggccctgtgcggctgcaccgttaatattcccaccatagacggtagagttattccattgccatgcaatgacgtgattaagcctgggacagtgaaaaggttacggggtgaggggctgccctttcctaaggtacccacgcagcgcggggatttgattgttgaattcaaggttaggttcccagatcgtctaaccccccagaccaggcagattctgaagcaacatttgccatgctcctag

SEQ ID NO: 50069 - DNA, 684 bp, Artificial Sequence
  derived and/or modified sequence
cggcggcagatcctgaaggagctggccctgtgcctgcggcggcaggagatgtatggacctagagctgcttcccgcaataaagaaacaagcgctggacctgttgccgttatgggcaaagactactataagatcctggggatcccttcaggggccaacgaggatgaaattaaaaaagcttataggaagatggctctcaaataccatcccgacaagaataaggagccaaatgctgaagagaaattcaaagaaatcgccgaggcatatgatgtactatccgatccgaagaaaaggggcctgtatgaccagtacggggaggaggggctcaaaacaggcggtggaacatcgggtggcagctcaggtagtttccactatacttttcatggtgatccacacgcaacctttgcttcttttttcgggggctcgaacccattcgacattttctttgcttctagtagatccacacgaccatttagtggattcgaccccgacgacatggacgtggatgaagacgaggaccccttcggtgcattcgggagatttggctttaatgggctgtccagaggtcctcgcagggctccagaacctttgtatccaaggagaaaagtccaggacccacccgttgtgcacgaactcagagtcagtctggaggagatttaccacggctcaactaaacggatgaaatag

SEQ ID NO: 50070 - DNA, 1149 bp, Artificial Sequence
  derived and/or modified sequence
atgttcaagatccaactggaaccgctgaagctgcgcgcatggactctcaacggttttgtgaagtttcgaaataaggagacctctgcagggccagtcgccgttatgggcaaggattattacaagatactaggtatcccatccggcgctaatgaagatgagatcaaaaaggcatacagaaaaatggctctgaaataccatccagataaaaataaagaacctaacgcagaggaaaaattcaaggagatcgccgaggcatacgatgtcttaagtgacccaaagaagcgcggtctgtacgaccaatatggcgaagagggcctaaagactggcggtggcacgtcgggaggttcgtccggatccttccactacacatttcacggagacccgcatgctactttcgctagtttttttggagggtcaaatccattcgatatattcttcgccagtagtcgctcgacacgtcccttctccgggttcgatcctgacgacatggatgtggatgaagacgaagatcctttcggtgccttcgggaggtttggcttcaatggcctaagtcgcggtcctcggagggcacctgagccactatatcctcgtagaaaagtgcaggaccctcccgttgtgcacgagttacgcgtttccctcgaggagatttatcacggaagtaccaaacgcatgaagatcacccggcgtcgcttaaatcccgatggcaggaccgtgcgaacggaagacaagatactacacatcgtaattaagagaggctggaaggagggtacaaaaatcacattcccgaaggagggagacgccacccccgataatataccagccgacattgtatttgtgcttaaggataagcctcacgcccattttagacgcgacgggactaatgttctatactcagctctgatcagtctgaaggaagccctgtgtggctgcaccgtcaacatccctacaattgacggtagagtcattccactcccttgtaacgacgtgattaagcccggtaccgttaaacgcctgaggggtgaagggctaccattccccaaagttcccacccagcgcggagacttaattgtcgagtttaaggtcaggttccccgatagactgacacctcagactaggcagattctaaaacagcatctcccttgctcctag

SEQ ID NO: 50071 - DNA, 1263 bp, Artificial Sequence
  derived and/or modified sequence
atgttcaaacggactgtcctatcttgcccccctcccgcagcaccccctctccaggcgagaggcgcatttcggtccttcccccattcctggggcgaggacttcctcgccagtctcatgttcaaaatacaattggagcctttgaaacttagagcctggaccttgaacggcttcgtgaagtttcggaataaagagactagcgccggacccgtcgctgtgatgggaaaggactactacaaaatattggggatcccatcaggagcgaatgaggacgaaatcaaaaaggcatatcggaagatggctctaaagtaccacccagataagaataaggagccaaacgctgaggaaaagtttaaagaaatcgctgaagcatatgatgtcctgtccgatccgaaaaagcgaggcttgtatgatcagtatggcgaggagggcttaaaaactgggggtggcacctccggcggttcttcaggatcttttcattacacctttcacggcgaccctcatgctacctttgctagcttctttggcggtagcaacccttttgatatttttttcgcatctagtaggtctacaaggccgttcagtggttttgaccccgacgacatggatgtggatgaagatgaggacccatttggcgctttcgggagatttggcttcaatggcctaagtagaggccctcgtagagcccctgaacccctgtaccctagacggaaggtgcaggaccctcctgttgttcatgagctgagagtgagtcttgaggagatctatcatggttctaccaagcggatgaaaatcacacgaaggcgtctcaatcccgacggacgcacagtgcgaacagaagataagatcttgcatatcgtgattaaaagaggttggaaggaggggaccaagatcacctttccaaaggagggagacgctactccagataatatcccagccgacatagtgtttgtactgaaggataagccacatgcacacttcaggagagacgggaccaatgtactttacagcgccttgatctcgctgaaagaagccttatgtggctgcaccgtgaatatccccaccattgatggtagagtgatcccccttccttgcaatgacgtgatcaagcctggaaccgtgaagagattgcggggagagggactgccgtttcccaaggtgcccacccagcgaggagatctcatcgtcgaatttaaggtaagatttccggaccggttaacgcctcagacccgacagattctgaaacagcacctcccctgctcctag

SEQ ID NO: 50072 - DNA, 684 bp, Artificial Sequence
  derived and/or modified sequence
cgacgacagatcctgaaggagctggcactgtgcttgcgcaggcaggagatgtatggacccagggcagctagccgcaacaaagagacatctgctggtcctgtcgcagtgatgggtaaagactattacaagatcttaggcatccccagtggcgctaacgaggacgaaatcaagaaggcttatcggaagatggcattgaagtaccacccagacaagaataaggagcccaacgcggaggaaaagttcaaggagatcgcagaagcctacgatgtgcttagcgatcccaaaaagcgaggcctttatgaccagtacggggaggagggccttaagactggaggagggaccagcggcggttcctcaggaagcttccactacacattccatggcgacccccacgctacctttgccagcttctttggcggatccaacccttttgacattttctttgcatctagtagaagtactagacccttttcaggtttcgatcccgacgatatggatgtggatgaggatgaagacccctttggcgcattcggtagattcggtttcaatggtttatcgcgagggcctcggcgtgcaccagagccactctacccgagacgcaaagttcaggatccccctgtggtgcacgaactgagggtctctctcgaggagatctaccatggatccactaaacgcatgaagtag

SEQ ID NO: 50073 - DNA, 615 bp, Artificial Sequence
  derived and/or modified sequence
cacctcgctcagcagggcctctcaggggtcctcagtctggcccaaggaccagggcctcagcctagccccaagagtgggccacaaccttcagcttcctgctgggaaaacccaggagaaacaaggagaccagtgctggtccagtggctgtgatgggaaaagattattacaagattcttgggatcccatcgggggccaacgaggatgagatcaagaaagcctaccggaagatggccttgaagtaccacccagacaagaataaagaacccaacgctgaggagaagtttaaggagattgcagaggcctatgatgtgctaagtgaccccaagaaacggggcctgtatgaccagtatggggaggaaggcctgaagaccggcggtggcacatcaggtggctccagtggctcctttcactacacctttcatggggacccccatgccacctttgcctccttctttggtggctccaaccccttcgatatcttctttgccagcagccgctccactcggcccttcagtggctttgacccagatgacatggatgtggatgaagatgaggacccatttggcgctttcggccgttttggcttcaatgggctgagtaggggtccaaggcgag

SEQ ID NO: 50074 - DNA, 2818 bp, Artificial Sequence
  derived and/or modified sequence
cattgagtaggttcttggggattggggtcgggtcctccccagtgagaggcgacaggagctcactgcctctcgggccctcacaatcacacctgtcacaggtatacacgctgccactcacaaacacacgcttgcactcccagcctcactgacacgctgccatacagccgctcacagccagccagacactgctgcacctgagagcaggtggccgcgggtcttctcccttcactctccacatttggggatcaggtccggcacctgctgcgccagacaggccttgctgggcacgcgcctctgagagtccaaggaggtggcttccagagctgcagcacttcaggccggctccggtggagcgatcagaggtgaggggcttggctgggcatgtttaagcgcacagtgctctcctgcccacccccagcagcacccccactgcaggcccgaggagctttccggagcttcccacactcctggggagaagacttcttagccagcttgatgtttaaaattcagctggagcccttaaaacttcgagcgtggacgctgaatgggtttgtaaagtttcgaaacaaggagaccagtgctggtccagtggctgtgatgggaaaagattattacaagattcttgggatcccatcgggggccaacgaggatgagatcaagaaagcctaccggaagatggccttgaagtaccacccagacaagaataaagaacccaacgctgaggagaagtttaaggagattgcagaggcctatgatgtgctaagtgaccccaagaaacggggcctgtatgaccagtatggggaggaaggcctgaagaccggcggtggcacatcaggtggctccagtggctcctttcactacacctttcatggggacccccatgccacctttgcctccttctttggtggctccaaccccttcgatatcttctttgccagcagccgctccactcggcccttcagtggctttgacccagatgacatggatgtggatgaagatgaggacccatttggcgctttcggccgttttggcttcaatgggctgagtaggggtccaaggcgagccccagaaccactgtaccctcggcgcaaggtgcaggaccccccagtggtgcacgagctgcgggtgtccctggaggagatctaccatggctccaccaagcgcatgaagatcacaaggcgtcgcctcaaccctgatgggcgaactgtgcgcaccgaggacaagatcctgcacatagtcatcaagcgtggctggaaggaaggcaccaagatcaccttccccaaagaaggcgacgccacacctgacaacatccctgctgacatcgtctttgtgctcaaagacaagccccatgcacacttccgccgagatggcaccaacgtgctctacagtgccctgatcagcctcaaggaggcgctgtgtggctgcactgtgaacattcccactatcgacggccgagtgatccctttgccctgcaatgatgtcatcaagccaggcaccgtgaagagactccgtggggagggccttcccttccccaaagtgccaactcagcgaggagacctcattgttgagttcaaagttcgcttcccagacagattaacaccacagacaagacagatccttaagcagcacctaccctgttcctaggctctgccccagccagtccagagcctaccacagcaatacccccaacactcactccactcaatgtgcacccagcttgatgtccactggacactggcaactttttctaaaatgcaaaaaaaagccactggttttcaggaaaatgttcctgtccctgaccccttttagagctgggctgcctggggggagtgggagggaggtggggagagctagcccaggccaggggtcaatgttcatgtcactagctttcaatccagtttccactgcagtggctggagagtgacctgagtgctacttgaagatatgtagagattccttatccatgcctgtacatagcatgtcctcctcccctcagctttgctaataccagtcccctcccttccctttggcttcctgctgttgggggtggaaaagactagaaaggacattgctttctcagccccacccccaggtccacagtgtccaaggtaatggcacacatattcatgcacaagaagcactcacctagagctgtctgtgcctctctgggagaaaggagagaggataagaagggaaagttcacaacctgtgaacagggacttgagcacgagacacttttcatctggagcaggggggtgagctcctcagcagcctccgtaacagctgccctgcctacacctgcagagctggaggttctgtcctccctgctgctctcaggagtgttcaagggtggagggcagggaatggggcctgaggtattaaggctaagaggtgggggacagggcccatctaccagccttcatcaggaagggaaagggctttggggtcaggtggcagctattccccaccaagagattcagggtcacaggtttttccccacacctctgaactcagggcctagccacccccaaacttccaaatcccacttttgtgatatgtgaagctactcatttcttacccttggaggctgtgtggggaatttccagcccttttatgcctgtgtgatcccaccccacccccatagttgtataaaggtcatagtgaagaagctgggggaagactgcttcagccagatcctggggtggggtctttaggttttctcactttgacaacccccgaatgtttttatagtagtttttttgtatttttttgtaatgacagtattatgtaaaaaataaagtattttaaaaatatggca

SEQ ID NO: 50075 - DNA, 2391 bp, Artificial Sequence
  derived and/or modified sequence
gggggcgggctcccggtcccgctatcggcggccggcgggcaggcgactcctgtcccgggtggaggcggcggagccggagccgggggagggggcagcggctgtctcacggaccacggcggcgcccgcagctcctcaccgaaacaaggagaccagtgctggtccagtggctgtgatgggaaaagattattacaagattcttgggatcccatcgggggccaacgaggatgagatcaagaaagcctaccggaagatggccttgaagtaccacccagacaagaataaagaacccaacgctgaggagaagtttaaggagattgcagaggcctatgatgtgctaagtgaccccaagaaacggggcctgtatgaccagtatggggaggaaggcctgaagaccggcggtggcacatcaggtggctccagtggctcctttcactacacctttcatggggacccccatgccacctttgcctccttctttggtggctccaaccccttcgatatcttctttgccagcagccgctccactcggcccttcagtggctttgacccagatgacatggatgtggatgaagatgaggacccatttggcgctttcggccgttttggcttcaatgggctgagtaggggtccaaggcgagccccagaaccactgtaccctcggcgcaaggtgcaggaccccccagtggtgcacgagctgcgggtgtccctggaggagatctaccatggctccaccaagcgcatgaagatcacaaggcgtcgcctcaaccctgatgggcgaactgtgcgcaccgaggacaagatcctgcacatagtcatcaagcgtggctggaaggaaggcaccaagatcaccttccccaaagaaggcgacgccacacctgacaacatccctgctgacatcgtctttgtgctcaaagacaagccccatgcacacttccgccgagatggcaccaacgtgctctacagtgccctgatcagcctcaaggaggcgctgtgtggctgcactgtgaacattcccactatcgacggccgagtgatccctttgccctgcaatgatgtcatcaagccaggcaccgtgaagagactccgtggggagggccttcccttccccaaagtgccaactcagcgaggagacctcattgttgagttcaaagttcgcttcccagacagattaacaccacagacaagacagatccttaagcagcacctaccctgttcctaggctctgccccagccagtccagagcctaccacagcaatacccccaacactcactccactcaatgtgcacccagcttgatgtccactggacactggcaactttttctaaaatgcaaaaaaaagccactggttttcaggaaaatgttcctgtccctgaccccttttagagctgggctgcctggggggagtgggagggaggtggggagagctagcccaggccaggggtcaatgttcatgtcactagctttcaatccagtttccactgcagtggctggagagtgacctgagtgctacttgaagatatgtagagattccttatccatgcctgtacatagcatgtcctcctcccctcagctttgctaataccagtcccctcccttccctttggcttcctgctgttgggggtggaaaagactagaaaggacattgctttctcagccccacccccaggtccacagtgtccaaggtaatggcacacatattcatgcacaagaagcactcacctagagctgtctgtgcctctctgggagaaaggagagaggataagaagggaaagttcacaacctgtgaacagggacttgagcacgagacacttttcatctggagcaggggggtgagctcctcagcagcctccgtaacagctgccctgcctacacctgcagagctggaggttctgtcctccctgctgctctcaggagtgttcaagggtggagggcagggaatggggcctgaggtattaaggctaagaggtgggggacagggcccatctaccagccttcatcaggaagggaaagggctttggggtcaggtggcagctattccccaccaagagattcagggtcacaggtttttccccacacctctgaactcagggcctagccacccccaaacttccaaatcccacttttgtgatatgtgaagctactcatttcttacccttggaggctgtgtggggaatttccagcccttttatgcctgtgtgatcccaccccacccccatagttgtataaaggtcatagtgaagaagctgggggaagactgcttcagccagatcctggggtggggtctttaggttttctcactttgacaacccccgaatgtttttatagtagtttttttgtatttttttgtaatgacagtattatgtaaaaaataaagtattttaaaaatatgg

SEQ ID NO: 50076 - DNA, 683 bp, Artificial Sequence
  derived and/or modified sequence
aggaggcagatcctgaaagagcttgccctgtgtctgcggaggcaagagatgtatgggcctagagcagctagcagaaacaaggagaccagtgctggtccagtggctgtgatgggaaaagattattacaagattcttgggatcccatcgggggccaacgaggatgagatcaagaaagcctaccggaagatggccttgaagtaccacccagacaagaataaagaacccaacgctgaggagaagtttaaggagattgcagaggcctatgatgtgctaagtgaccccaagaaacggggcctgtatgaccagtatggggaggaaggcctgaagaccggcggtggcacatcaggtggctccagtggctcctttcactacacctttcatggggacccccatgccacctttgcctccttctttggtggctccaaccccttcgatatcttctttgccagcagccgctccactcggcccttcagtggctttgacccagatgacatggatgtggatgaagatgaggacccatttggcgctttcggccgttttggcttcaatgggctgagtaggggtccaaggcgagccccagaaccactgtaccctcggcgcaaggtgcaggaccccccagtggtgcacgagctgcgggtgtccctggaggagatctaccatggctccaccaagcgcatgaagat

SEQ ID NO: 50077 - DNA, 5228 bp, Artificial Sequence
  derived and/or modified sequence
cgagggaggagactcccgtcagtgacttcattgagtaggttcttggggattggggtcgggtcctccccagtgagaggcgacaggagctcactgcctctcgggccctcacaatcacacctgtcacaggtatacacgctgccactcacaaacacacgcttgcactcccagcctcactgacacgctgccatacagccgctcacagccagccagacactgctgcacctgagagcaggtggccgcgggtcttctcccttcactctccacatttggggatcaggtccggcacctgctgcgccagacaggccttgctgggcacgcgcctctgagagtccaaggaggtggcttccagagctgcagcacttcaggccggctccggtggagcgatcagaggtgaggggcttggctgggcatgtttaagcgcacagtgctctcctgcccacccccagcagcacccccactgcaggcccgaggagctttccggagcttcccacactcctggggagaagacttcttagccagcttgatgtttaaaattcagctggagcccttaaaacttcgagcgtggacgctgaatgggtttgtaaagtttcggtaagtccctccggagaagggcactcacacccatacccagtcaaaccctccacgcggccatcccctccattgccttcctgcttcctccaactcatcctcatcccctctgtgacatacaggaacccccctccggcctcacccacatatttgaatgaattgcaccccttatcattccttttctcaaacccttcaggtatccattttccacagacatttcctccattatttcaactctccacattcctccctttcaacccatcattaacccattttccacctcagccatttccatctgtcactcatccccctccatcagtacctcattttctgtatcagccatctcccctccctgtacctcaacagtccccctcgccattttctccccatttttccttcctgcctctaccttaacatcctcctcattcttctccatcaaaggcagtgccatgccatggggctcctttgtcattccaacacgtggcctgtgggtaggggggaagggaaggagggaggaaagcagaaagagaaaaaggaggcagatcctgaaagagcttgccctgtgtctgcggaggcaagagatgtatgggcctagagcagctagcaggtgggtaccagggaggaagctggccgggtgtggaggtaatgcagggacaccaaaaggaggtgggtggttggtgagccgttccactggccctctgcctggaagctgctctcgttctctaggggcaccctcttggtgtgctagggttctttcccagtcccaggggaaagaaggtgtgggttgaggcagaaatggcagaccacccccccccgctccctctcagacggcttttgctgccatttccgaaaacggttgcccccccccccaacgaggtgctctttcttctctgcctctcccaaccccaccccccaccccatctcccccacagacgtgacatgctggtggggggcaatgggggagtacccgcctttgtggagccttttcttcgtcagagaaaggtgactcccagaaccatgagtcaacccagccacctgcagcagggcctgtgggggcagcagtgagggccattgtccctgcccacctagggccttgggcgcctcccccttacccggttacaggcctcactcctggaaggacaccctgtacacctccctgctgtgaagcagtcagaggcagaaaggcaggtctcagctgtggctgccagcctaggacattgctagaaagactctggttctcctggctttggcaggggttggccaagtctcagaagggctgagaatggcttctggccatcccccagagagctctagctacaggaaagtcccccttcccctgatatccaccacagacacaccgatagagggagactggaatggaagaattcgggttgtacgtttctcttataacaaatgctcctgcacccaccttaaaagggactcagaggaatatgggtctgatgatgggccggatcctaaaccacagggtggactgggggcgtagggtgaggctaggagaggtattaaggaaatggtggttggttagtgcccaattgtctcctaacagctggggttgaaaaagtcctgtccccaggatgcttttgttcactcacactggtgcttaggcggcacagccctcacagttttgtgtgtagacgctggcaaatgagtaaagggaactgttgccctggttgggggaaggatagtgtcgccccccctgctaatgagggagttggaaacagcagtttccaaaggctgtgagtcaccctgtgatctgagtcacacgtgaggcttagcatcgtcagaggggtgggggcggggaggcctggggtctccgatggcagacaggactccagacacccattccctgactcagtctggctggccaggacagctggcggaagacccaggcctgttcccggtcctgggccactgccccagctgccctcagcctgggcaccatgcctgaggcgtggcgtaggagaccacgatgctcaggtgacctcacccgttacactgaccttcgccagctcctgtgtgtgggtcgctcagtccatggtgccacctcgctcagcagggcctctcaggggtcctcagtctggcccaaggaccagggcctcagcctagccccaagagtgggccacaaccttcagcttcctgctgggaaaacccaggaggtgaggacggaatcacagaattctagaatgtcagagccagaagagatcatctagtccaaacctttcattttacagatggggggacgcaggcccacagaacaggcatgacctgctgaaggttacccagggagtcatttagggattgcaagatcatcaggaacagggctggggcagaagagaaggcatcaagtcttggccctgggtttctttcagaaacaaggagaccagtgctggtccagtggctgtgatgggaaaagattattacaagattcttgggatcccatcgggggccaacgaggatgagatcaagaaagcctaccggaagatggccttgaagtaccacccagacaagaataaagaacccaacgctgaggagaagtttaaggagattgcagaggcctatgatgtgctaagtgaccccaagaaacggggcctgtatgaccagtatggggaggaaggcctgaagaccggcggtggcacatcaggtggctccagtggctcctttcactacacctttcatggggacccccatgccacctttgcctccttctttggtggctccaaccccttcgatatcttctttgccagcagccgctccactcggcccttcagtggctttgacccagatgacatggatgtggatgaagatgaggacccatttggcgctttcggccgttttggcttcaatgggctgagtaggggtccaaggcgagccccagaaccactgtaccctcggcgcaaggtgcaggaccccccagtggtgcacgagctgcgggtgtccctggaggagatctaccatggctccaccaagcgcatgaagatcacaaggcgtcgcctcaaccctgatgggcgaactgtgcgcaccgaggacaagatcctgcacatagtcatcaagcgtggctggaaggaaggcaccaagatcaccttccccaaagaaggcgacgccacacctgacaacatccctgctgacatcgtctttgtgctcaaagacaagccccatgcacacttccgccgagatggcaccaacgtgctctacagtgccctgatcagcctcaaggaggcgctgtgtggctgcactgtgaacattcccactatcgacggccgagtgatccctttgccctgcaatgatgtcatcaagccaggcaccgtgaagagactccgtggggagggccttcccttccccaaagtgccaactcagcgaggagacctcattgttgagttcaaagttcgcttcccagacagattaacaccacagacaagacagatccttaagcagcacctaccctgttcctaggctctgccccagccagtccagagcctaccacagcaatacccccaacactcactccactcaatgtgcacccagcttgatgtccactggacactggcaactttttctaaaatgcaaaaaaaagccactggttttcaggaaaatgttcctgtccctgaccccttttagagctgggctgcctggggggagtgggagggaggtggggagagctagcccaggccaggggtcaatgttcatgtcactagctttcaatccagtttccactgcagtggctggagagtgacctgagtgctacttgaagatatgtagagattccttatccatgcctgtacatagcatgtcctcctcccctcagctttgctaataccagtcccctcccttccctttggcttcctgctgttgggggtggaaaagactagaaaggacattgctttctcagccccacccccaggtccacagtgtccaaggtaatggcacacatattcatgcacaagaagcactcacctagagctgtctgtgcctctctgggagaaaggagagaggataagaagggaaagttcacaacctgtgaacagggacttgagcacgagacacttttcatctggagcaggggggtgagctcctcagcagcctccgtaacagctgccctgcctacacctgcagagctggaggttctgtcctccctgctgctctcaggagtgttcaagggtggagggcagggaatggggcctgaggtattaaggctaagaggtgggggacagggcccatctaccagccttcatcaggaagggaaagggctttggggtcaggtggcagctattccccaccaagagattcagggtcacaggtttttccccacacctctgaactcagggcctagccacccccaaacttccaaatcccacttttgtgatatgtgaagctactcatttcttacccttggaggctgtgtggggaatttccagcccttttatgcctgtgtgatcccaccccacccccatagttgtataaaggtcatagtgaagaagctgggggaagactgcttcagccagatcctggggtggggtctttaggttttctcactttgacaacccccgaatgtttttatagtagtttttttgtatttttttgtaatgacagtattatgtaaaaaataaagtattttaaaaata

SEQ ID NO: 50078 - DNA, 3068 bp, Artificial Sequence
  derived and/or modified sequence
ggggattggggtcgggtcctccccagtgagaggcgacaggagctcactgcctctcgggccctcacaatcacacctgtcacaggtatacacgctgccactcacaaacacacgcttgcactcccagcctcactgacacgctgccatacagccgctcacagccagccagacactgctgcacctgagagcaggtggccgcgggtcttctcccttcactctccacatttggggatcaggtccggcacctgctgcgccagacaggccttgctgggcacgcgcctctgagagtccaaggaggtggcttccagagctgcagcacttcaggccggctccggtggagcgatcagagaaacaaggagaccagtgctggtccagtggctgtgatgggaaaagattattacaagattcttgggatcccatcgggggccaacgaggatgagatcaagaaagcctaccggaagatggccttgaagtaccacccagacaagaataaagaacccaacgctgaggagaagtttaaggagattgcagaggcctatgatgtgctaagtgaccccaagaaacggggcctgtatgaccagtatggggaggaaggcctgaagaccggcggtggcacatcaggtggctccagtggctcctttcactacacctttcatggggacccccatgccacctttgcctccttctttggtggctccaaccccttcgatatcttctttgccagcagccgctccactcggcccttcagtggctttgacccagatgacatggatgtggatgaagatgaggacccatttggcgctttcggccgttttggcttcaatgggctgagtaggggtccaaggcgagccccagaaccactgtaccctcggcgcaaggtgcaggaccccccagtggtgcacgagctgcgggtgtccctggaggagatctaccatggctccaccaagcgcatgaagatcacaaggcgtcgcctcaaccctgatgggcgaactgtgcgcaccgaggacaagatcctgcacatagtcatcaagcgtggctggaaggaaggcaccaagatcaccttccccaaagaaggcgacgccacacctgacaacatccctgctgacatcgtctttgtgctcaaagacaagccccatgcacacttccgccgagatggcaccaacgtgctctacagtgccctgatcagcctcaaggaggcgctgtgtggctgcactgtgaacattcccactatcgacggccgagtgatccctttgccctgcaatgatgtcatcaagccaggcaccgtgaagagactccgtggggagggccttcccttccccaaagtgccaactcagcgaggagacctcattgttgagttcaaagttcgcttcccagacagattaacaccacagacaagacagatccttaagcagcacctaccctgttcctaggctctgccccagccagtccagagcctaccacagcaatacccccaacactcactccactcaatgtgcacccagcttgatgtccactggacactggcaactttttctaaaatgcaaaaaaaagccactggttttcaggaaaatgttcctgtccctgaccccttttagagctgggctgcctggggggagtgggagggaggtggggagagctagcccaggccaggggtcaatgttcatgtcactagctttcaatccagtttccactgcagtggctggagagtgacctgagtgctacttgaagatatgtagagattccttatccatgcctgtacatagcatgtcctcctcccctcagctttgctaataccagtcccctcccttccctttggcttcctgctgttgggggtggaaaagactagaaaggacattgctttctcagccccacccccaggtccacagtgtccaaggtaatggcacacatattcatgcacaagaagcactcacctagagctgtctgtgcctctctgggagaaaggagagaggataagaagggaaagttcacaacctgtgaacagggacttgagcacgagacacttttcatctggagcaggggggtgagctcctcagcagcctccgtaacagctgccctgcctacacctgcagagctggaggttctgtcctccctgctgctctcaggagtgttcaagggtggagggcagggaatggggcctgaggtattaaggctaagaggtgggggacagggcccatctaccagccttcatcaggaagggaaagggctttggggtcaggtggcagctattccccaccaagagattcagggtcacaggtttttccccacacctctgaactcagggcctagccacccccaaacttccaaatcccacttttgtgatatgtgaagctactcatttcttacccttggaggctgtgtggggaatttccagcccttttatgcctgtgtgatcccaccccacccccatagttgtataaaggtcatagtgaagaagctgggggaagactgcttcagccagatcctggggtggggtctttaggttttctcactttgacaacccccgaatgtttttatagtagtttttttgtatttttttgtaatgacagtattatgtaaaaaataaagtattttaaaaatatggcatctgagcaggagcaacaaacctgggatgggggtggctgaggagggccactgtcatcctccctcccgggctctggtcacctttgagaagcccaagcaggccctcagtataagctgaagctgacctctgccttcctcgaagcctcctgggatttctaaaacttatacttcaaacacagcacagacagaaagtaccactcagctattagaagaaacatctatttgggaaggaaaaatatccctgctcatgagagacagagaccattgtcttcagatgtgctagcatgaaaacagattttctcttcttgtctaaattttctctgagtcagacaaattttccttctaggagaaaatttttttctaggagggggtggagaactttttttttttttttttttttttgacacggagtcttgctctgtcgcccaggctggagtgcagtgatgcgatcttggttcactgcagcctct

SEQ ID NO: 50079 - DNA, 2347 bp, Artificial Sequence
  derived and/or modified sequence
gcgggcaggcgactcctgtcccgggtggaggcggcggagccggagccgggggagggggcagcggctgtctcacggaccacggcggcgcccgcagctcctcaccgaaacaaggagaccagtgctggtccagtggctgtgatgggaaaagattattacaagattcttgggatcccatcgggggccaacgaggatgagatcaagaaagcctaccggaagatggccttgaagtaccacccagacaagaataaagaacccaacgctgaggagaagtttaaggagattgcagaggcctatgatgtgctaagtgaccccaagaaacggggcctgtatgaccagtatggggaggaaggcctgaagaccggcggtggcacatcaggtggctccagtggctcctttcactacacctttcatggggacccccatgccacctttgcctccttctttggtggctccaaccccttcgatatcttctttgccagcagccgctccactcggcccttcagtggctttgacccagatgacatggatgtggatgaagatgaggacccatttggcgctttcggccgttttggcttcaatgggctgagtaggggtccaaggcgagccccagaaccactgtaccctcggcgcaaggtgcaggaccccccagtggtgcacgagctgcgggtgtccctggaggagatctaccatggctccaccaagcgcatgaagatcacaaggcgtcgcctcaaccctgatgggcgaactgtgcgcaccgaggacaagatcctgcacatagtcatcaagcgtggctggaaggaaggcaccaagatcaccttccccaaagaaggcgacgccacacctgacaacatccctgctgacatcgtctttgtgctcaaagacaagccccatgcacacttccgccgagatggcaccaacgtgctctacagtgccctgatcagcctcaaggaggcgctgtgtggctgcactgtgaacattcccactatcgacggccgagtgatccctttgccctgcaatgatgtcatcaagccaggcaccgtgaagagactccgtggggagggccttcccttccccaaagtgccaactcagcgaggagacctcattgttgagttcaaagttcgcttcccagacagattaacaccacagacaagacagatccttaagcagcacctaccctgttcctaggctctgccccagccagtccagagcctaccacagcaatacccccaacactcactccactcaatgtgcacccagcttgatgtccactggacactggcaactttttctaaaatgcaaaaaaaagccactggttttcaggaaaatgttcctgtccctgaccccttttagagctgggctgcctggggggagtgggagggaggtggggagagctagcccaggccaggggtcaatgttcatgtcactagctttcaatccagtttccactgcagtggctggagagtgacctgagtgctacttgaagatatgtagagattccttatccatgcctgtacatagcatgtcctcctcccctcagctttgctaataccagtcccctcccttccctttggcttcctgctgttgggggtggaaaagactagaaaggacattgctttctcagccccacccccaggtccacagtgtccaaggtaatggcacacatattcatgcacaagaagcactcacctagagctgtctgtgcctctctgggagaaaggagagaggataagaagggaaagttcacaacctgtgaacagggacttgagcacgagacacttttcatctggagcaggggggtgagctcctcagcagcctccgtaacagctgccctgcctacacctgcagagctggaggttctgtcctccctgctgctctcaggagtgttcaagggtggagggcagggaatggggcctgaggtattaaggctaagaggtgggggacagggcccatctaccagccttcatcaggaagggaaagggctttggggtcaggtggcagctattccccaccaagagattcagggtcacaggtttttccccacacctctgaactcagggcctagccacccccaaacttccaaatcccacttttgtgatatgtgaagctactcatttcttacccttggaggctgtgtggggaatttccagcccttttatgcctgtgtgatcccaccccacccccatagttgtataaaggtcatagtgaagaagctgggggaagactgcttcagccagatcctggggtggggtctttaggttttctcactttgacaacccccgaatgtttttatagtagtttttttgtatttttttgtaatgacagtattatgtaaaaaataaagtatttt

SEQ ID NO: 50080 - protein, 381 aa, Artificial Sequence
  derived and/or modified sequence
MNEKSCSFHSKEELRDGQGERLSAGYSPSYDKDKSVLAFRGIPISELKNHGILQALTTEAYEWEPRVVSTEVVRAQEEWEAVDTIQPETGSQASSEQPGQLISFSEALQHFQTVDLSPFKKRIQPTIRRTGLAALRHYLFGPPKLHQRLREERDLVLTIAQCGLDSQDPVHGRVLQTIYKKLTGSKFDCALHGNHWEDLGFQGANPATDLRGAGFLALLHLLYLVMDSKTLPMAQEIFRLSRHHIQQFPFCLMSVNITHIAIQALREECLSRECNRQQKVIPVVNSFYAATFLHLAHVWRTQRKTISDSGFVLKELEVLAKKSPRRLLKTLELYLARVSKGQASLLGAQKCYGPEAPPFKDLTFTGESDLQSHSSEGVWLI

SEQ ID NO: 50081 - protein, 254 aa, Artificial Sequence
  derived and/or modified sequence
MNEKSCSFHSKEELRDGQGERLSAGYSPSYDKDKSVLAFRGIPISELKNHGILQALTTEAYEWEPRVVSTEVVRAQEEWEAVDTIQPETGSQASSEQPGQLISFSEALQHFQTVDLSPFKKRIQPTIRRTGLAALRHYLFGPPKLHQRLREERDLVLTIAQCGLDSQDPVHGRVLQTIYKKLTGSKFDCALHGNHWEDLGFQGANPATDLRGAGFLALLHLLYLVMDSKTLPMAQEIFRLSRHHIQIERNQGKG

SEQ ID NO: 50082 - DNA, 1146 bp, Artificial Sequence
  derived and/or modified sequence
atgaacgagaagagctgcagcttccacagcaaggaggagctgagagacggccagggcgagagactgagcgccggctacagccccagctacgacaaggacaagagcgtgctggccttcagaggcatccccatcagcgagctgaagaaccacggcatcctgcaggccctgaccaccgaggcctacgagtgggagcccagagtggtgagcaccgaggtggtgagagcccaggaggagtgggaggccgtggacaccatccagcccgagaccggcagccaggccagcagcgagcagcccggccagctgatcagcttcagcgaggccctgcagcacttccagaccgtggacctgagccccttcaagaagagaatccagcccaccatcagaagaaccggcctggccgccctgagacactacctgttcggcccccccaagctgcaccagagactgagagaggagagagacctggtgctgaccatcgcccagtgcggcctggacagccaggaccccgtgcacggcagagtgctgcagaccatctacaagaagctgaccggcagcaagttcgactgcgccctgcacggcaaccactgggaggacctgggcttccagggcgccaaccccgccaccgacctgagaggcgccggcttcctggccctgctgcacctgctgtacctggtgatggacagcaagaccctgcccatggcccaggagatcttcagactgagcagacaccacatccagcagttccccttctgcctgatgagcgtgaacatcacccacatcgccatccaggccctgagagaggagtgcctgagcagagagtgcaacagacagcagaaggtgatccccgtggtgaacagcttctacgccgccaccttcctgcacctggcccacgtgtggagaacccagagaaagaccatcagcgacagcggcttcgtgctgaaggagctggaggtgctggccaagaagagccccagaagactgctgaagaccctggagctgtacctggccagagtgagcaagggccaggccagcctgctgggcgcccagaagtgctacggccccgaggccccccccttcaaggacctgaccttcaccggcgagagcgacctgcagagccacagcagcgagggcgtgtggctgatctag

SEQ ID NO: 50083 - DNA, 1146 bp, Artificial Sequence
  derived and/or modified sequence
atgaacgaaaagagttgttcctttcactcgaaagaggagctcagagatggccagggagagagactgtctgccgggtacagtccttcctatgacaaggataagagcgtgctggccttcaggggcatacccataagtgagctcaagaaccacggaatcctccaggcattgacaactgaggcgtatgagtgggagcctcgtgtggtctctacggaggtggttcgtgcccaagaagaatgggaagcagtcgatacaatccagcccgaaaccggatcccaagcttccagtgagcagcccgggcaattaatcagtttctccgaggcgctccaacacttccaaactgtggacttgtcaccattcaaaaaaaggatacagccaactattaggcggactggcctggcggcactgcggcactatttatttggaccccccaagctgcaccagaggttgcgagaggaacgggacctcgtgctaacaattgcccagtgtggcttagatagccaggatcccgttcatgggagagtgcttcaaaccatctacaagaagctcaccggatccaagttcgactgcgccctgcacggcaatcattgggaggacctcggatttcagggggccaaccctgccaccgacctgagaggggctggttttttggcactgctccacctcctctatctggtgatggattcaaaaacactccctatggcccaagaaatctttcgtctgtcaagacatcatattcagcagttcccattttgtctgatgtccgtaaatattacacatattgcgatccaagcactgcgggaagagtgccttagccgcgagtgcaatcgtcagcagaaggtgatccccgtggttaacagcttttacgctgctacctttttgcacctggctcatgtttggcgcacccagcggaagaccatttcagattccggctttgttctgaaggaattagaagtgctcgcgaagaagtcaccacggaggctactgaagacgctcgaactgtaccttgctagggtaagcaaaggccaggcgagcttactcggcgcccagaagtgctatgggccagaggcgccccccttcaaggatctgacgttcactggcgagagtgatctgcagtcacatagcagtgagggcgtatggttaatctag

SEQ ID NO: 50084 - DNA, 1146 bp, Artificial Sequence
  derived and/or modified sequence
atgaacgagaaaagctgctcctttcactctaaagaagagctgagggacggccaaggagaaagactttcagctgggtattccccaagctatgacaaagataagagtgttcttgccttcagaggcatcccgatttccgagctgaagaaccacggcattctgcaagctctgactactgaggcttacgagtgggagcctcgagtcgtgagtaccgaagttgtacgggcccaggaggagtgggaggccgtggacaccattcaacccgagacaggctcccaggctagttctgaacagcccggacagcttatttctttcagcgaagcactgcagcattttcagactgtggacctgagccccttcaagaagcgcatccagcccacaatccgacgaaccggattggccgctctgcggcactatttgttcggcccgccaaagctgcatcaacgactccgagaggaacgggacctggttctcactatcgcccaatgcgggcttgactctcaagacccggtgcacggacgtgttctgcagaccatttacaaaaagttaacaggctcgaagttcgattgtgcgttacacggcaaccattgggaggacctcggttttcagggggccaaccccgctactgaccttcggggagccgggtttcttgcccttctgcacctcctgtacctggtcatggactctaaaacgctgccgatggcccaggagatctttagactttcgcggcatcatatccaacagtttccattctgcttgatgagcgtcaatatcacccatattgccattcaagcacttcgtgaagagtgtctaagccgcgaatgtaaccgccagcagaaggttatccctgtggtgaactccttctacgcagcaacctttctccacctggcccatgtttggcgcacccagcgaaaaaccattagcgacagtggattcgtactgaaggaactagaagtgctcgctaaaaagtctcctcggcgtctcctcaaaaccttggagctttatctcgctagagtgagcaaaggccaggccagtctgcttggggctcaaaagtgctacggacctgaggcgcctccctttaaagacctgacattcaccggagaaagcgacctccaatcacactcgtctgaaggagtatggctgatttag

SEQ ID NO: 50085 - DNA, 1146 bp, Artificial Sequence
  derived and/or modified sequence
atgaatgagaagtcttgttctttccacagcaaggaagagcttcgagacggacagggggagagactttcagccggatattcaccctcgtatgacaaagacaaatccgtgctggcgttccggggcatccccatcagcgagctgaagaaccacggcattctccaggccctgactacagaggcttacgagtgggagcctagggtagtcagcactgaagttgtgcgtgcccaggaagagtgggaagctgtcgacacgattcagccggaaacaggttcacaggcgtcatcagagcagcctgggcagctgatctccttctccgaggctctccagcacttccagacagtggacctttcccccttcaagaagcgtatccagcccacaattagaaggacagggctggccgctctgcgtcactatctgttcgggcctccaaagctgcatcagcgcttaagagaagagcgggatctggtcctcacaatcgctcagtgtgggctcgactctcaagaccccgttcacgggagggtgttgcaaaccatctataagaagctcacaggtagcaagtttgactgtgccttgcacggcaaccattgggaagacctcgggttccagggggcaaaccccgccactgatcttaggggggcaggctttcttgccctcttgcacctgctgtatctagtcatggactctaaaaccttgcctatggctcaggaaatcttccggctgtcccgacaccacatacagcagttcccattctgtctcatgtctgtgaacattacgcacatagccattcaagctctgcgagaggagtgcctgtcacgggaatgcaaccgccagcaaaaggtcattcccgttgtgaattctttctacgcggccacgttcctgcaccttgcccatgtgtggcgaacccaacggaagaccatctcagacagtggctttgttctgaaggagctcgaggtgctggccaaaaaaagccctcgacgactcctgaaaaccctggaactctatctcgctagggtaagtaaggggcaggcaagcctcctcggtgcacagaaatgttacggtccagaggcccccccattcaaagacctgacattcactggggaatctgatctgcagtcccattctagcgagggggtgtggctcatatag

SEQ ID NO: 50086 - DNA, 1146 bp, Artificial Sequence
  derived and/or modified sequence
atgaacgaaaagagctgtagctttcattctaaggaggaactccgggatgggcaaggggaacgactatctgccgggtattccccttcttacgataaggataagagcgttctggccttccggggaatacctatctccgagctgaagaaccatggtatcctgcaggccctgaccacagaagcctatgaatgggagccccgggtggtcagcaccgaggttgtgagagcccaggaagagtgggaagccgtggacaccatccagcccgaaaccggatcgcaggccagctcagaacagccaggacagctgataagcttcagcgaagcactccagcactttcaaaccgtggacctgtccccttttaaaaagagaatccagccaaccatccgtaggaccggcctggcagcactccgtcattatctttttgggccacccaaacttcaccagcgacttcgcgaagaaagggatttagtgctgaccattgctcagtgtggacttgatagccaggatccagtccatggccgcgtcctgcagaccatctataagaagctgactggctccaagttcgactgcgccctacacggaaatcattgggaggacctggggttccagggtgcgaaccctgctaccgatctccggggagccggtttcttagcccttctacacttgctatatctagttatggatagtaaaactctccccatggcccaggaaattttccggctgtcgcgacaccatatccagcagttcccattttgtctaatgtccgtcaatattacacacattgcaattcaggcactcagagaggagtgcctgtcccgcgaatgtaatcggcagcaaaaagtgatcccggtggttaactcattctatgccgccaccttcctccacctagctcacgtgtggaggactcaaaggaaaactatctcagactcaggctttgtgcttaaggaactggaggtactcgccaagaagagccccaggaggctgttgaaaacattagagctgtatctggccagagtgagtaagggccaagccagtctgctgggagcacagaaatgttacggtcctgaagcgcccccttttaaagacctcacgttcacgggggagtctgatcttcagtcacattcatctgaaggcgtgtggctgatctag

SEQ ID NO: 50087 - DNA, 2332 bp, Artificial Sequence
  derived and/or modified sequence
gcggctgtgcgcatgagcagatgaggcctagccgaggcggcgggacccccaagtttggaaagctcttttaacggctatgcgaaagttctgtccaaaggctgctcacagcccctgtctgactggttgtcatgatgaattgagctctctgttacctgcgcatcacaaccgagctgaggcttcgaagacctcagaggacttctctcagcactcacagaaacctcctacaccctcggatggcacaaagggactgttttcttactcttagtctgagtgactgccaaggaaggcaaaggtagagcaactggatctctggctctccacatagcttctgatctcagaccttactaaaatgctttctgggcccaaggacaaagctcacatgaacaaatgattttgagtcatgaatgaaaaatcttgctctttccatagtaaagaagaattaagagatggacagggtgaaagattgtctgctggatattctccatcatatgacaaggacaagagtgttctggctttcagaggaatccctatctcagagttgaagaaccatggcattctccaggctctgaccacagaagcttatgaatgggagccacgtgttgtgagtacagaggtggtcagagcccaagaagaatgggaagctgtggacaccatccagccagagacagggagccaagctagctcagagcagcctgggcagctaatctccttcagtgaggccctgcagcacttccagactgtggacctttcccccttcaagaaaagaatccagccaactattcgaaggactgggctcgccgccctccgacactacctcttcgggcctccaaagctccaccagcgccttcgggaagaaagggacttggtcctgaccattgctcagtgtggcctggatagccaagacccagtgcatggccgagtcctccagaccatctataagaagctgaccggctccaagtttgactgtgcccttcatggaaaccactgggaggacctgggctttcagggagcgaatccagccacagacctgagaggcgcaggcttccttgccctcctgcatctgctctacctggtgatggactcaaagaccttgccgatggcgcaggagattttccgcctgtctcgtcaccacatccagcaattccctttctgtttgatgtccgtgaacatcacccacattgccatccaggccttgagagaggagtgtctctccagagagtgtaatcggcagcagaaggtcatccccgtggtgaacagcttctatgccgccacattcctccacctcgcacatgtctggaggacacagcggaagaccatctcagactcgggctttgtcctcaaagagttggaagtattggccaagaagagcccacggcggctgctcaagaccctggagctgtacttggccagggtgtcaaagggacaggcctccttgttgggagcacagaagtgctatgggccagaagcccctcccttcaaggatctcaccttcacaggtgagagtgacctgcagtctcactcatccgaaggcgtatggctgatctgacctccgagatgaatggaggcttaaaggctgagctgcaggggctttcagggggtcagtggagccatgtcaggagcctggccaggccgcaccccttgctgtctcagcagatgggatataggaagctcctgggcttagctgtgggaagccaagtaccctcaccggcatgggacatgaggggcagctagacttcacccccttcccgcagacctgcctccagagcaaggagaattctgccttaatctgttgggctccagtctccgggttgaattccagtgtatcccactgggagtgaatggatcatgaggtgggatggccccatctggatgttctgcagatccccacatgggaggagattcccaagtagaggcagccagaattctgactccctggcagcagcagggctttcaggcaccagtgtctgtgttgttagaactcagaggaagaggcaggggcagcagccgacagggggcagcatgacccaagcaaggggcctgaggcctcagtgggggtagggcaaggaggtacctcacaggtgggtgtgaggccccctctggagtttctggccattcacttacccactctcttctccccctgacccccgctccattgtttatgatggaaaaacggacatttggctaggtgtctctcacggctgctccatcctagcccccacaagctggggcttcctcctgtagatgctgtgcatgccccatgatgagtttctggcctaattgagggaaggaggaaattcataccagcagttttcaaataaaagaattgttctaa

SEQ ID NO: 50088 - DNA, 2413 bp, Artificial Sequence
  derived and/or modified sequence
aaatgtagttctcggggccaggggagccggcacggaagcggctgtgcgcatgagcagatgaggcctagccgaggcggcgggacccccaagtttggaaagctcttttaacggctatgcgaaagttctgtccaaaggctgctcacagcccctgtctgactggttgtcatgatgaattgagctctctgttacctgcgcatcacaaccgatagtaactgtccctactgaaggccccaggagtgctccagccagagctgaggcttcgaagacctcagaggacttctctcagcactcacagaaacctcctacaccctcggatggcacaaagggactgttttcttactcttagtctgagtgactgccaaggaaggcaaaggtagagcaactggatctctggctctccacatagcttctgatctcagaccttactaaaatgctttctgggcccaaggacaaagctcacatgaacaaatgattttgagtcatgaatgaaaaatcttgctctttccatagtaaagaagaattaagagatggacagggtgaaagattgtctgctggatattctccatcatatgacaaggacaagagtgttctggctttcagaggaatccctatctcagagttgaagaaccatggcattctccaggctctgaccacagaagcttatgaatgggagccacgtgttgtgagtacagaggtggtcagagcccaagaagaatgggaagctgtggacaccatccagccagagacagggagccaagctagctcagagcagcctgggcagctaatctccttcagtgaggccctgcagcacttccagactgtggacctttcccccttcaagaaaagaatccagccaactattcgaaggactgggctcgccgccctccgacactacctcttcgggcctccaaagctccaccagcgccttcgggaagaaagggacttggtcctgaccattgctcagtgtggcctggatagccaagacccagtgcatggccgagtcctccagaccatctataagaagctgaccggctccaagtttgactgtgcccttcatggaaaccactgggaggacctgggctttcagggagcgaatccagccacagacctgagaggcgcaggcttccttgccctcctgcatctgctctacctggtgatggactcaaagaccttgccgatggcgcaggagattttccgcctgtctcgtcaccacatccagcaattccctttctgtttgatgtccgtgaacatcacccacattgccatccaggccttgagagaggagtgtctctccagagagtgtaatcggcagcagaaggtcatccccgtggtgaacagcttctatgccgccacattcctccacctcgcacatgtctggaggacacagcggaagaccatctcagactcgggctttgtcctcaaagagttggaagtattggccaagaagagcccacggcggctgctcaagaccctggagctgtacttggccagggtgtcaaagggacaggcctccttgttgggagcacagaagtgctatgggccagaagcccctcccttcaaggatctcaccttcacaggtgagagtgacctgcagtctcactcatccgaaggcgtatggctgatctgacctccgagatgaatggaggcttaaaggctgagctgcaggggctttcagggggtcagtggagccatgtcaggagcctggccaggccgcaccccttgctgtctcagcagatgggatataggaagctcctgggcttagctgtgggaagccaagtaccctcaccggcatgggacatgaggggcagctagacttcacccccttcccgcagacctgcctccagagcaaggagaattctgccttaatctgttgggctccagtctccgggttgaattccagtgtatcccactgggagtgaatggatcatgaggtgggatggccccatctggatgttctgcagatccccacatgggaggagattcccaagtagaggcagccagaattctgactccctggcagcagcagggctttcaggcaccagtgtctgtgttgttagaactcagaggaagaggcaggggcagcagccgacagggggcagcatgacccaagcaaggggcctgaggcctcagtgggggtagggcaaggaggtacctcacaggtgggtgtgaggccccctctggagtttctggccattcacttacccactctcttctccccctgacccccgctccattgtttatgatggaaaaacggacatttggctaggtgtctctcacggctgctccatcctagcccccacaagctggggcttcctcctgtagatgctgtgcatgccccatgatgagtttctggcctaattgagggaaggaggaaattcataccagcagttttcaaataaaagaattgttctaa

SEQ ID NO: 50089 - DNA, 2564 bp, Artificial Sequence
  derived and/or modified sequence
ggaagcggctgtgcgcatgagcagatgaggcctagccgaggcggcgggacccccaagtttggaaagctcttttaacggctatgcgaaagttctgtccaaaggctgctcacagcccctgtctgactggttgtcatgatgaattgagctctctgttacctgcgcatcacaaccgatagtaactgtccctactgaaggccccaggagtgctccagccaggtgtggaaagctggtcacgattctatgctacttggttcattttctacacagcaacagaagagccctcctgagattgctattaccatacccgcctgtcaccttgccaaggctggccaatgccgagcgtgttggctcatgcctgtaatcccagcactttggaaggccgaggcaggcggatcacgagagctgaggcttcgaagacctcagaggacttctctcagcactcacagaaacctcctacaccctcggatggcacaaagggactgttttcttactcttagtctgagtgactgccaaggaaggcaaaggtagagcaactggatctctggctctccacatagcttctgatctcagaccttactaaaatgctttctgggcccaaggacaaagctcacatgaacaaatgattttgagtcatgaatgaaaaatcttgctctttccatagtaaagaagaattaagagatggacagggtgaaagattgtctgctggatattctccatcatatgacaaggacaagagtgttctggctttcagaggaatccctatctcagagttgaagaaccatggcattctccaggctctgaccacagaagcttatgaatgggagccacgtgttgtgagtacagaggtggtcagagcccaagaagaatgggaagctgtggacaccatccagccagagacagggagccaagctagctcagagcagcctgggcagctaatctccttcagtgaggccctgcagcacttccagactgtggacctttcccccttcaagaaaagaatccagccaactattcgaaggactgggctcgccgccctccgacactacctcttcgggcctccaaagctccaccagcgccttcgggaagaaagggacttggtcctgaccattgctcagtgtggcctggatagccaagacccagtgcatggccgagtcctccagaccatctataagaagctgaccggctccaagtttgactgtgcccttcatggaaaccactgggaggacctgggctttcagggagcgaatccagccacagacctgagaggcgcaggcttccttgccctcctgcatctgctctacctggtgatggactcaaagaccttgccgatggcgcaggagattttccgcctgtctcgtcaccacatccagcaattccctttctgtttgatgtccgtgaacatcacccacattgccatccaggccttgagagaggagtgtctctccagagagtgtaatcggcagcagaaggtcatccccgtggtgaacagcttctatgccgccacattcctccacctcgcacatgtctggaggacacagcggaagaccatctcagactcgggctttgtcctcaaagagttggaagtattggccaagaagagcccacggcggctgctcaagaccctggagctgtacttggccagggtgtcaaagggacaggcctccttgttgggagcacagaagtgctatgggccagaagcccctcccttcaaggatctcaccttcacaggtgagagtgacctgcagtctcactcatccgaaggcgtatggctgatctgacctccgagatgaatggaggcttaaaggctgagctgcaggggctttcagggggtcagtggagccatgtcaggagcctggccaggccgcaccccttgctgtctcagcagatgggatataggaagctcctgggcttagctgtgggaagccaagtaccctcaccggcatgggacatgaggggcagctagacttcacccccttcccgcagacctgcctccagagcaaggagaattctgccttaatctgttgggctccagtctccgggttgaattccagtgtatcccactgggagtgaatggatcatgaggtgggatggccccatctggatgttctgcagatccccacatgggaggagattcccaagtagaggcagccagaattctgactccctggcagcagcagggctttcaggcaccagtgtctgtgttgttagaactcagaggaagaggcaggggcagcagccgacagggggcagcatgacccaagcaaggggcctgaggcctcagtgggggtagggcaaggaggtacctcacaggtgggtgtgaggccccctctggagtttctggccattcacttacccactctcttctccccctgacccccgctccattgtttatgatggaaaaacggacatttggctaggtgtctctcacggctgctccatcctagcccccacaagctggggcttcctcctgtagatgctgtgcatgccccatgatgagtttctggcctaattgagggaaggaggaaattcataccagcagttttcaaataaaagaattgttctaa

SEQ ID NO: 50090 - DNA, 2601 bp, Artificial Sequence
  derived and/or modified sequence
aaatgtagttctcggggccaggggagccggcacggaagcggctgtgcgcatgagcagatgaggcctagccgaggcggcgggacccccaagtttggaaagctcttttaacggctatgcgaaagttctgtccaaaggctgctcacagcccctgtctgactggttgtcatgatgaattgagctctctgttacctgcgcatcacaaccgatagtaactgtccctactgaaggccccaggagtgctccagccaggtgtggaaagctggtcacgattctatgctacttggttcattttctacacagcaacagaagagccctcctgagattgctattaccatacccgcctgtcaccttgccaaggctggccaatgtgtgttttgtcataggctgtcatggaggccatgatggaggaaaaggaaaggggaggcagatgttgagagctgaggcttcgaagacctcagaggacttctctcagcactcacagaaacctcctacaccctcggatggcacaaagggactgttttcttactcttagtctgagtgactgccaaggaaggcaaaggtagagcaactggatctctggctctccacatagcttctgatctcagaccttactaaaatgctttctgggcccaaggacaaagctcacatgaacaaatgattttgagtcatgaatgaaaaatcttgctctttccatagtaaagaagaattaagagatggacagggtgaaagattgtctgctggatattctccatcatatgacaaggacaagagtgttctggctttcagaggaatccctatctcagagttgaagaaccatggcattctccaggctctgaccacagaagcttatgaatgggagccacgtgttgtgagtacagaggtggtcagagcccaagaagaatgggaagctgtggacaccatccagccagagacagggagccaagctagctcagagcagcctgggcagctaatctccttcagtgaggccctgcagcacttccagactgtggacctttcccccttcaagaaaagaatccagccaactattcgaaggactgggctcgccgccctccgacactacctcttcgggcctccaaagctccaccagcgccttcgggaagaaagggacttggtcctgaccattgctcagtgtggcctggatagccaagacccagtgcatggccgagtcctccagaccatctataagaagctgaccggctccaagtttgactgtgcccttcatggaaaccactgggaggacctgggctttcagggagcgaatccagccacagacctgagaggcgcaggcttccttgccctcctgcatctgctctacctggtgatggactcaaagaccttgccgatggcgcaggagattttccgcctgtctcgtcaccacatccagcaattccctttctgtttgatgtccgtgaacatcacccacattgccatccaggccttgagagaggagtgtctctccagagagtgtaatcggcagcagaaggtcatccccgtggtgaacagcttctatgccgccacattcctccacctcgcacatgtctggaggacacagcggaagaccatctcagactcgggctttgtcctcaaagagttggaagtattggccaagaagagcccacggcggctgctcaagaccctggagctgtacttggccagggtgtcaaagggacaggcctccttgttgggagcacagaagtgctatgggccagaagcccctcccttcaaggatctcaccttcacaggtgagagtgacctgcagtctcactcatccgaaggcgtatggctgatctgacctccgagatgaatggaggcttaaaggctgagctgcaggggctttcagggggtcagtggagccatgtcaggagcctggccaggccgcaccccttgctgtctcagcagatgggatataggaagctcctgggcttagctgtgggaagccaagtaccctcaccggcatgggacatgaggggcagctagacttcacccccttcccgcagacctgcctccagagcaaggagaattctgccttaatctgttgggctccagtctccgggttgaattccagtgtatcccactgggagtgaatggatcatgaggtgggatggccccatctggatgttctgcagatccccacatgggaggagattcccaagtagaggcagccagaattctgactccctggcagcagcagggctttcaggcaccagtgtctgtgttgttagaactcagaggaagaggcaggggcagcagccgacagggggcagcatgacccaagcaaggggcctgaggcctcagtgggggtagggcaaggaggtacctcacaggtgggtgtgaggccccctctggagtttctggccattcacttacccactctcttctccccctgacccccgctccattgtttatgatggaaaaacggacatttggctaggtgtctctcacggctgctccatcctagcccccacaagctggggcttcctcctgtagatgctgtgcatgccccatgatgagtttctggcctaattgagggaaggaggaaattcataccagcagttttcaaataaaagaattgttctaatt

SEQ ID NO: 50091 - DNA, 1146 bp, Artificial Sequence
  derived and/or modified sequence
atgaatgagaagagctgcagcttccacagcaaggaggagctgagagatggccagggcgagcggctgtctgctggctacagccccagctatgacaaggacaagtctgtgctggccttccggggcatccccatcagcgagctgaagaaccacggcatcctgcaggccctgaccacagaggcctatgagtgggagccccgggtggtgtccacagaggtggtgcgggcccaggaggagtgggaggccgtggacaccatccagcctgagaccggcagccaggccagcagcgagcagcccggccagctgatctccttcagcgaggccctgcagcacttccagacagtggacctgagccccttcaagaagaggatccagcccaccatccggaggacaggcctggccgccctgcggcactacctgtttggcccccccaagctgcaccagaggctgcgggaggagcgggacctggtgctgaccatcgcccagtgtggcctggacagccaggaccctgtgcacggccgggtgctgcagaccatctacaagaagctgaccggcagcaagtttgactgtgccctgcacggcaaccactgggaggacctgggcttccagggcgccaacccagccacagacctgcggggagctggcttcctggccctgctgcacctgctgtacctggtgatggacagcaagaccctgcccatggcccaggagatcttccggctgagccgccaccacatccagcagttccccttctgcctgatgtctgtgaacatcacccacatcgccatccaggccctgcgggaggagtgcctgagccgggagtgcaaccggcagcagaaggtgattcctgtggtgaacagcttctatgctgccaccttcctgcacctggcccacgtgtggaggacccagaggaagaccatcagtgacagcggctttgtgctgaaggagctggaggtgctggccaagaagagcccccggcggctgctgaagaccctggagctgtacctggcccgggtgtccaagggccaggccagcctgctgggcgcccagaagtgctacggccctgaggccccacccttcaaggacctgaccttcaccggggagagtgacctgcagagccacagcagcgagggcgtgtggctgatctag

SEQ ID NO: 50092 - DNA, 1146 bp, Artificial Sequence
  derived and/or modified sequence
atgaacgagaagagctgcagcttccacagcaaggaggagctgcgggacggccagggcgaacggttgtccgctggctacagcccgagctatgacaaggacaaatcagttctggcatttcgagggatccccatctccgaattgaaaaaccacggaatcttgcaggcactaacgaccgaggcatatgagtgggagcccagggtagtttcaaccgaggtggtccgtgcccaggaagaatgggaagcagtggacacgatccaacccgagacaggatcccaagcgtcctctgaacaaccaggtcagctcatcagcttttccgaggccctgcagcacttccagaccgtcgacctgagccccttcaagaaaagaatccaacccacaatcagacggaccgggctggcagcgctcagacattacctgttcggtcccccaaaactgcaccagaggctgagagaggagcgggacttagtcttgactattgctcagtgcgggttggattcgcaggatcccgtgcatgggcgcgtcctccagactatctacaagaagctgacagggagcaaatttgactgcgccctgcacggcaatcactgggaagatctagggttccagggtgcaaatcccgctactgatcttagaggggcagggttcctggcactgctccaccttctttacctcgtcatggatagcaagactctcccgatggcacaggagatatttcgtctgagtcgacaccacattcaacaattccctttctgcttgatgagcgtgaatataactcatatcgccatccaagcccttagagaagagtgcctgtcaagggaatgtaatagacagcaaaaggtaattcccgtcgtgaatagcttttacgccgcgacattcctgcacttggcacacgtttggcgtacccagcgaaagacgatctcagattcggggttcgtgctcaaggaactagaggtgctggctaagaaatcaccgcgccgactattgaagaccctcgaattgtatctagcaagagtgtccaagggccaggccagcctgctgggcgcccagaagtgttacggaccagaagctccccctttcaaggatctcacgttcactggggagtcggacctccagagtcacagtagtgagggggtttggttgatctag

SEQ ID NO: 50093 - DNA, 1146 bp, Artificial Sequence
  derived and/or modified sequence
atgaacgagaagagctgcagcttccacagcaaggaggagctgcgggatggtcagggtgaacgcctctctgccggctacagtcccagctacgataaggacaaaagcgttctggcatttcgtggaatacccattagtgaactgaagaatcacggtatcctgcaagccctcaccacggaagcatacgaatgggagcctagagttgtgagtacagaggtggtaagggcgcaggaagaatgggaggccgtagatactattcagcccgaaactggctctcaggcaagcagcgagcagccggggcagttgattagtttcagcgaagcgcttcagcattttcaaactgtggatctcagccctttcaagaaacggattcagcccaccatccgccgaacaggcctcgctgccctgaggcattacctattcggtcctcccaaattgcatcaaagactgagggaagaacgcgatctcgtgctcactatagcacagtgtgggctggactcccaggaccctgtacatggccgcgtgctccagaccatctataagaaattgactggaagcaagtttgactgtgccctgcacggcaaccattgggaagatctgggcttccaaggcgctaaccccgctaccgacctgcgcggagctgggttcctggccctcttgcacctgctttacctggtgatggatagcaaaacactgcccatggcccaagagatattccgattgagccgccaccatatacaacaattccctttttgtcttatgagtgtgaacattactcacattgctatccaggccctacgggaggagtgtcttagtcgggagtgtaatcgccagcagaaagtcatccctgtggtgaactcattctatgccgctactttccttcacctcgcccacgtctggaggacacagaggaaaacaattagtgacagcggctttgtgctcaaggagcttgaagtgctggccaagaagagcccaaggcgactgctgaagaccctagagctgtacctggcccgggtctctaaagggcaggcctccttgctgggcgcacagaaatgctatggccccgaggctccgccattcaaggatcttacttttaccggcgaatcagacctccagtctcattccagcgaaggagtttggcttatctag

SEQ ID NO: 50094 - DNA, 1146 bp, Artificial Sequence
  derived and/or modified sequence
atgaacgagaagagctgcagcttccacagcaaggaggagctgcgggatgggcagggcgaaagactatcagcaggctattctccaagctatgacaaagataaaagtgtgctggcattcagagggatccccataagcgagttaaagaatcatggaatactccaggccctgactacagaggcctatgagtgggaacctagggtcgtgagcacggaggtcgtcagggctcaggaagagtgggaagcggtggataccatccaaccagaaacaggaagccaggctagctccgagcaacctggtcagctaatttcgttttctgaggccctgcagcacttccaaacggtggatcttagcccattcaagaagcggattcagcctactattcggagaaccggtttggctgcactgcggcactacctcttcggccccccaaagctccaccagcgattaagagaagaaagagaccttgtactgacaatcgcccaatgcgggctagatagtcaggaccccgtgcacggcagagtgctgcagacaatctacaagaagttgaccggatccaagtttgattgcgctctccacggtaaccattgggaagaccttgggtttcagggggctaatcccgccaccgatctgcgaggcgctggcttcctagctcttctccacttactgtacttggtgatggacagtaagacgttaccaatggcccaggagatcttcaggttatcgcgacaccatatacagcaattccctttctgcttaatgagtgtgaacattacacatatcgccattcaggccctgagagaagagtgtctaagccgcgagtgcaatcggcagcagaaggtcattccggtggtgaattccttctacgccgccaccttcctccacctggctcatgtctggagaacccagcgtaagacaatcagcgacagcgggttcgtgctaaaagaactggaagtactggctaagaagtcccctcggaggctgctgaaaactctggaactttacctggcccgggtgtcaaaagggcaggcctctcttctgggagcgcagaagtgctatggcccggaggcccccccattcaaagacctgacttttacaggggagtcggatctgcagtcgcacagctctgaaggcgtgtggctaatctag

SEQ ID NO: 50095 - DNA, 1146 bp, Artificial Sequence
  derived and/or modified sequence
atgaacgagaagagctgcagcttccacagcaaggaggagctgcgggatggacagggggaacgtctcagcgccggatattcgccttcttacgataaggacaaatcggttctggccttcagagggatacccatcagcgagctgaagaaccacggtatcctgcaggcgttgacaacagaggcctacgagtgggagccacgcgttgtgagtactgaagtggtgcgggcccaggaggagtgggaggccgtggacacgatccagcccgagactgggtcacaagcctcatctgagcaacctggccagctgatctcattcagcgaggcactccagcacttccagacagtggacctgagtcctttcaaaaagcgcatccagcctacgatacgccgcacgggactggctgccctgagacactatttgtttggtccacccaagctgcatcagcggctgcgcgaagagagggatcttgtccttacgatagcgcaatgtggcctcgacagccaggatcccgttcacggtagggtgctgcagactatttataagaagttaacagggagtaagttcgattgcgctctgcatggtaatcattgggaagacttgggtttccagggcgcaaatcctgcaacagatctgcgcggcgcaggattcctagccctgctgcacttactctatcttgtgatggattcgaagaccctccctatggcccaggaaatattccgattgagcaggcaccacatacagcagtttccattttgcttgatgagtgtcaatattacccacattgctattcaagccttaagggaggaatgtttgtcaagggagtgcaaccgccagcagaaagtgatccccgtggtgaatagcttttacgctgctacatttctacacttagcgcatgtgtggagaacccaacgcaagaccatcagcgacagtggctttgtgttgaaggaattggaggtacttgccaagaagagcccccggaggttgctcaagactctagagctatatttagctcgcgtgagcaagggacaggctagcctcctcggggcccagaagtgttatggccctgaagccccaccatttaaagatctaacatttaccggagagtcagacctgcagtcccactccagtgagggagtctggctcatctag

SEQ ID NO: 50096 - DNA, 1146 bp, Artificial Sequence
  derived and/or modified sequence
atgaatgagaaaagttgcagctttcactccaaggaggagctcagggatgggcagggagaaagactctcagccggttacagcccttcatacgataaggataagtcagttttggctttccggggaatcccaataagcgaactcaagaaccatgggatcttgcaggccctgacgacagaggcctacgagtgggaaccgagggtggtgagcactgaggtcgtgcgcgctcaggaagagtgggaagcggttgacaccatccagcccgagaccggtagccaagctagctccgaacagcccggtcagctcattagcttttctgaagcgctgcagcatttccaaactgttgatctgagtccctttaagaagcgtattcaacccaccatccgacgtacagggttggctgcgttaaggcactatctgttcggcccacctaaattacatcagcgcctgcgcgaggaaagggacctggtgctgaccattgctcagtgcgggctggactcccaggatccagtccacggccgagtgctgcaaaccatttacaagaagctgacgggtagtaagttcgactgcgctctgcacggaaatcactgggaagatctgggatttcaaggcgcaaaccccgcaactgatcttcgcggagccggatttcttgctctgctacacctcctatacctcgtgatggacagtaagaccctgcctatggcgcaagaaattttcagactaagtagacatcatatacagcagttcccattttgtctgatgtctgttaatattacccatatagctattcaagccttgagggaggagtgcctttccagagagtgtaatcgacagcagaaagttattcctgtggtgaatagcttttatgcagccacgtttctgcacttagctcacgtctggaggacacagcgcaaaacgattagcgattcgggttttgtgctcaaagagctggaggtcctcgctaagaagagtccaagaaggctgttgaagactctggaactgtatttagcaagagtctcgaagggacaagcctccctgctaggagctcagaaatgctatggccctgaggcaccacctttcaaggacttgactttcactggggagagcgatttacagtctcatagctcagaaggagtgtggctaatctag

SEQ ID NO: 50097 - DNA, 1146 bp, Artificial Sequence
  derived and/or modified sequence
atgaacgagaagagctgtagctttcattccaaggaggaactgcgggatggtcagggagaacgcctgtccgccggatacagtccatcttacgataaagataaaagtgtcctggcatttcgagggattccaatttccgagttaaagaaccacgggatccttcaggctttgaccaccgaggcatatgagtgggagccccgagtggtgagcacggaagtcgtacgtgcccaggaagaatgggaagccgttgataccatccagcctgaaaccggctcccaagcttcatccgagcagccaggtcagctgatcagcttttctgaggccttgcagcacttccagacagtggatttgagcccattcaagaaacggatccagccgaccatccgccgtaccgggcttgctgctctccggcactacctgttcgggcctccaaaactgcaccaacggctgagagaggaacgcgacctcgtgctgaccatagcacagtgtgggctggactcacaggacccggttcacggcagggtgctccagaccatctacaaaaagctcaccggcagcaagtttgactgtgcacttcatggaaaccactgggaggatctcggattccagggggctaacccagctactgacctgaggggtgctgggttcctcgctttgttgcacctgctgtacttagttatggactccaagacccttccaatggcacaagaaatttttagacttagccggcatcacatccagcagttccctttctgtctcatgagcgtcaatattactcatatagctatccaagccctcagagaagaatgcctaagccgggaatgtaaccgccaacagaaagttatccctgtggtgaatagtttctacgcagctacatttctgcatctcgcgcacgtttggcggacgcagcggaagaccatatctgactccggatttgtgctgaaagagctggaggtgctagccaaaaaaagtcccagacgactgctcaagaccctggaactgtaccttgcccgtgtgagtaaggggcaggcaagcttactgggcgcacagaagtgctatggtccagaagcccctccattcaaggatttgactttcaccggcgagagcgacctgcaaagccattcatctgagggggtgtggctaatttag

SEQ ID NO: 50098 - DNA, 1146 bp, Artificial Sequence
  derived and/or modified sequence
atgaatgaaaagtcctgttctttccatagtaaagaggaacttcgtgatggccagggagaaaggctgagcgcaggatactccccatcctatgataaggataagtccgtgttggcctttagggggatccctatctctgaactcaagaaccacggtattctccaggctttgacaactgaggcctacgagtgggaacccagagtggtgagtactgaggtggtaagggcacaagaagaatgggaagcggtcgacaccatccaacccgaaaccgggagccaggccagtagtgagcaacctggccagctgatcagcttctctgaggccttgcaacacttccaaacagtggatctatccccattcaagaagcgtatccagcccacgatccgcagaactggcctcgctgctttgagacactacttgtttgggccacctaagctacaccagagactgcgggaagagcgagaccttgttcttactatagcccagtgtggcctggattcgcaagaccccgtccatggtcgagtcctgcagactatctacaaaaaactgacgggcagtaagtttgactgcgcccttcatggtaaccactgggaagacctgggattccagggggctaatcctgctacagatctccggggagcaggatttcttgctctgctgcacctgttgtatttggtcatggactccaagaccctgcctatggcccaggagatcttccggctctccaggcatcatatccagcagttcccattctgcctcatgtccgtgaacatcacccacatcgccattcaggccctcagggaggaatgtctatctagagagtgcaaccggcagcaaaaagtcatacctgtggtgaatagcttctatgcggctacgttcctgcacctggctcatgtgtggagaactcaacgtaagaccatcagcgattctgggttcgtgctcaaggagttggaggtgctagctaagaaaagccccaggagactgctcaaaacgttggagttgtacctagcaagggtctctaagggacaggcatcactgcttggtgcacaaaaatgttatggccctgaggccccaccttttaaagacctcaccttcacaggagaatccgacctgcagtcgcactcttctgagggcgtgtggctcatttag

SEQ ID NO: 50099 - DNA, 1146 bp, Artificial Sequence
  derived and/or modified sequence
atgaatgagaaaagttgtagctttcactctaaagaagaacttcgtgacggccagggggagcgtctttctgccggatattccccatcctatgataaggataagtccgtactcgctttcagggggatccccattagcgagctgaagaaccacggtatcctccaggcactgacgacggaggcatatgagtgggaaccacgggtcgtgtccacagaagtggtgagagcccaggaggaatgggaggccgtggacactatacagccggaaaccggaagccaggcaagttctgagcagcctggccagcttatcagtttttccgaagctttgcagcactttcagacagtcgatctgagcccctttaaaaagcggatccaaccgacgatccgacgtacaggcctagctgcgttgaggcattatttatttggtccacctaagctccatcagcggctgcgggaagaacgggatctcgtcctaacgatcgctcagtgcgggctggattcacaagaccccgtgcacggtagagtgctacagactatttacaaaaagctcactggaagtaagttcgattgtgccttgcatggaaatcactgggaagatcttggcttccaaggcgcaaacccagctacggacctgcgcggtgctgggtttctcgcactgctgcatcttttatacttggttatggattcaaagaccctcccaatggcccaggagatcttcagactgtctcggcaccacattcaacagtttccgttctgtttgatgtctgtgaacatcacgcatatagccattcaggcgctgagggaagaatgcctgagccgtgagtgcaacagacagcaaaaagttatccccgtggtgaactccttctacgccgcaaccttccttcacctggcgcatgtttggcgtacccagagaaagactatatcagattccggcttcgtgctcaaggagctcgaggttctcgctaagaagagccctaggcggttgctgaagactctggagctgtatctggctagggtaagcaaggggcaggcctccttgctcggagcacaaaaatgttatggccctgaggccccaccatttaaagatctcaccttcacaggagagtcagacctgcagtctcattcatcagagggagtttggctgatatag

SEQ ID NO: 50100 - protein, 486 aa, Artificial Sequence
  derived and/or modified sequence
MQSGGAEGSPGAGRTGRGPGSGKAPPAEISSGAPDFPGGDPIKILMPSLSPTMEEGNIVKWLKKEGEAVSAGDALCEIETDKAVVTLDASDDGILAKIVVEEGSKNIRLGSLIGLIVEEGEDWKHVEIPKDVGPPPPVSKPSEPRPSPEPQISIPVKKEHIPGTLRFRLSPAARNILEKHSLDASQGTATGPRGIFTKEDALKLVQLKQTGKITESRPTPAPTATPTAPSPLQATAGPSYPRPVIPPVSTPGQPNAVGTFTEIPASNIRRVIAKRLTESKSTVPHAYATADCDLGAVLKVRQDLVKDDIKVSVNDFIIKAAAVTLKQMPDVNVSWDGEGPKQLPFIDISVAVATDKGLLTPIIKDAAAKGIQEIADSVKALSKKARDGKLLPEEYQGGSFSISNLGMFGIDEFTAVINPPQACILAVGRFRPVLKLTEDEEGNAKLQQRQLITVTMSSDSRVVDDELATRFLKSFKANLENPIRLA

SEQ ID NO: 50101 - DNA, 1461 bp, Artificial Sequence
  derived and/or modified sequence
atgcagagcggcggcgccgagggcagccccggcgccggcagaaccggcagaggccccggcagcggcaaggccccccccgccgagatcagcagcggcgcccccgacttccccggcggcgaccccatcaagatcctgatgcccagcctgagccccaccatggaggagggcaacatcgtgaagtggctgaagaaggagggcgaggccgtgagcgccggcgacgccctgtgcgagatcgagaccgacaaggccgtggtgaccctggacgccagcgacgacggcatcctggccaagatcgtggtggaggagggcagcaagaacatcagactgggcagcctgatcggcctgatcgtggaggagggcgaggactggaagcacgtggagatccccaaggacgtgggcccccccccccccgtgagcaagcccagcgagcccagacccagccccgagccccagatcagcatccccgtgaagaaggagcacatccccggcaccctgagattcagactgagccccgccgccagaaacatcctggagaagcacagcctggacgccagccagggcaccgccaccggccccagaggcatcttcaccaaggaggacgccctgaagctggtgcagctgaagcagaccggcaagatcaccgagagcagacccacccccgcccccaccgccacccccaccgcccccagccccctgcaggccaccgccggccccagctaccccagacccgtgatcccccccgtgagcacccccggccagcccaacgccgtgggcaccttcaccgagatccccgccagcaacatcagaagagtgatcgccaagagactgaccgagagcaagagcaccgtgccccacgcctacgccaccgccgactgcgacctgggcgccgtgctgaaggtgagacaggacctggtgaaggacgacatcaaggtgagcgtgaacgacttcatcatcaaggccgccgccgtgaccctgaagcagatgcccgacgtgaacgtgagctgggacggcgagggccccaagcagctgcccttcatcgacatcagcgtggccgtggccaccgacaagggcctgctgacccccatcatcaaggacgccgccgccaagggcatccaggagatcgccgacagcgtgaaggccctgagcaagaaggccagagacggcaagctgctgcccgaggagtaccagggcggcagcttcagcatcagcaacctgggcatgttcggcatcgacgagttcaccgccgtgatcaaccccccccaggcctgcatcctggccgtgggcagattcagacccgtgctgaagctgaccgaggacgaggagggcaacgccaagctgcagcagagacagctgatcaccgtgaccatgagcagcgacagcagagtggtggacgacgagctggccaccagattcctgaagagcttcaaggccaacctggagaaccccatcagactggcctag

SEQ ID NO: 50102 - DNA, 1461 bp, Artificial Sequence
  derived and/or modified sequence
atgcagtcaggaggcgccgaggggtctcccggagctgggaggaccggtcgcggccccggatcaggaaaagctcccccggccgagatctccagcggagcaccagactttcccggaggtgaccccattaaaattctgatgccctctctctcacctaccatggaggaagggaatatcgtaaagtggctgaagaaagaaggcgaagccgtgagtgccggagacgccttgtgtgagatcgagaccgataaggctgtggtgacactggacgcctctgacgacggcatactcgcgaaaatagtggtggaagaggggagcaagaacattagacttggcagcctcatcgggttaatcgtcgaagagggcgaagactggaagcacgttgaaatccccaaggacgtcgggcccccccctccagtatctaagccgtcagagcctcgccctagccctgagccgcagatcagcatccccgttaaaaaggaacacatccccggaacactacgtttcagactgtctcctgccgctaggaacatccttgaaaaacatagcctcgatgcgtcccagggtaccgctactggtccacgaggcatttttacaaaggaggacgctctcaagcttgtgcagctgaaacaaaccgggaagatcacagaaagtcgtccgacccccgctcccacagcgactcctacagctccctccccactgcaagctaccgccggccctagctatccccgccccgtgattcctcctgtgagcacacctggacagcccaacgctgtggggaccttcacagagatcccagcgtctaacattaggcgtgtgattgctaaacgactcaccgagtctaaatccaccgttccacatgcttacgccacagcggactgtgatctgggtgccgttctcaaggtaagacaggaccttgtaaaggatgacataaaggtgtcagtgaatgactttattatcaaggccgcagcagtgaccctaaaacagatgcccgacgttaacgtgagttgggatggagagggacctaaacagctgcccttcattgatatttccgttgcagttgcaacggataaggggctgctcactccaattatcaaagatgccgccgccaagggaatccaggagatcgctgatagcgtaaaggccctgtctaagaaggcacgggacgggaaactgctgccagaggagtaccaaggtggatccttcagcatctccaatctcggaatgtttggcattgacgaattcacagcggtgattaacccaccccaggcctgtatcctggcagtcgggcggttccgccctgttctcaaactgacagaggatgaggaaggcaatgccaaactgcagcagcggcagcttattacagtcacaatgtcctctgactcaagagtcgtcgatgatgaacttgcaacccggttcctgaagtcttttaaggcaaacttggaaaaccccataaggttagcctag

SEQ ID NO: 50103 - DNA, 1461 bp, Artificial Sequence
  derived and/or modified sequence
atgcagagcggcggcgctgagggcagccctggggccggccgcacaggccggggccctggcagcggcaaggcccctcctgctgagatcagcagcggggccccagacttccctggaggagaccccatcaagatcctgatgcccagcctgagccccaccatggaggagggcaacatcgtgaagtggctgaagaaggagggggaggccgtgtctgctggagatgccctgtgtgaaattgaaacagacaaggctgtggtgaccctggatgccagtgatgatggcatcctggccaagatcgtggtggaggagggcagcaagaacatccggctgggcagcctgattggcctcatcgtggaggagggggaggactggaagcacgtggagatccccaaggatgtgggccccccacctcctgtgtccaagcccagcgagccccggcccagccctgagccccagatcagcatccctgtgaagaaggagcacatccctggcaccctgcgcttccggctgagccctgctgccaggaacatcctggagaagcacagcctggatgccagccagggcacagccaccggcccccggggcatcttcaccaaggaggatgccctgaagctggtgcagctgaagcagacaggcaagatcacagagagccggcccaccccagcccccacagccacccccacagcccccagccccctgcaggccacagctggccccagctaccccaggcctgtgatcccccctgtgtccaccccaggccagcccaatgctgtgggcaccttcacagagatcccagccagcaacatcagaagagtcatcgccaagaggctgacagagagcaagagcacagtgccccacgcctatgccacagctgactgtgacctgggcgctgtgctgaaggtgcggcaggacctggtgaaggatgacatcaaggtgtctgtgaatgacttcatcatcaaggctgctgctgtgaccctgaagcagatgccagatgtgaatgtgtcctgggatggagagggccccaagcagctgcccttcatcgacatctctgtggccgtggccacagacaagggcctgctgacccccatcatcaaggatgctgctgccaagggcatccaggagattgctgacagcgtgaaggccctgagcaagaaggccagagatggcaagctgctgcctgaggagtaccagggcggcagcttcagcatcagcaacctgggcatgtttggaattgatgagttcaccgctgtgatcaaccccccccaggcctgcatcctggccgtgggccgcttccggcctgtgctgaagctgacagaagatgaggagggcaatgccaagctgcagcagaggcagctgatcaccgtgaccatgagcagtgacagccgggtggtggatgatgagctggccacccgcttcctgaagagcttcaaggccaacctggagaaccccatccggctggcctag

SEQ ID NO: 50104 - DNA, 1461 bp, Artificial Sequence
  derived and/or modified sequence
atgcagagcggcggcgccgagggcagccccggcgccggccggaccgggcgcggaccagggagcgggaaggcgccacccgcggagatttccagcggagctcctgactttcccggaggcgatccaatcaaaatcttgatgccatctctgtcgcctaccatggaagaagggaacattgtgaaatggttgaagaaggagggagaggctgtatcagccggcgatgcactttgcgagattgagactgacaaggccgttgttaccctggatgcaagtgacgacggcattttagcaaaaatagtcgtggaagaaggttccaaaaatatccgtctgggctcgcttataggcctcattgtggaagagggcgaggactggaagcacgtggagatccccaaagacgtggggccaccaccccccgtgtccaagcccagcgaaccaagaccctcccctgaaccccagatcagcatcccggttaagaaagagcacataccaggaaccctcaggtttagactcagtccggcggccagaaacattttagaaaaacattctcttgacgcgagtcagggcaccgctacagggccaagaggaatttttacaaaggaagacgcccttaaattggtgcagctcaagcagacaggtaaaatcactgagagccgtccgactcccgcacctacagcaacacccacggcaccatccccactgcaggcaactgcaggaccaagctatccgcggccagtgatccctcccgtgagcacgcccggccaaccaaatgctgttggtacatttactgagattccggcttccaatatccgccgagtcattgcaaaaagattaactgaaagcaagagcacggtaccacatgcctatgctacggccgactgcgacctcggagccgttttaaaagtgcggcaggatctagtcaaggatgatatcaaggtctcagtcaatgacttcattatcaaagccgccgctgtaactctgaagcagatgccagatgtgaacgtgtcctgggacggagagggccccaaacagcttccctttattgatatctccgttgcagtagcaactgacaaagggctgctcacacctatcataaaagatgctgccgccaagggaattcaggagattgctgactcagtgaaggcgcttagtaagaaggcccgtgacggaaagctccttccggaagagtatcagggggggagtttctctattagcaacctggggatgttcggtattgacgaattcaccgctgtgataaacccccctcaggcgtgcatattggcagtaggtagatttaggccagtactcaaactcaccgaagatgaagaaggaaacgctaagctgcagcaacgtcagcttattacagtcacgatgtctagcgatagtcgggttgtagacgacgagctggccacacgtttcctcaaatcgtttaaagctaacctggagaatcctattagattggcatag

SEQ ID NO: 50105 - DNA, 1461 bp, Artificial Sequence
  derived and/or modified sequence
atgcagagtgggggagccgaaggatctccaggagccggtcgcacaggcaggggacctggcagcggaaaggctccaccagcggaaattagctccggcgcaccagacttccctggcggagatcccattaaaatactaatgccctcactgagtcccaccatggaggaaggtaacattgtcaagtggctcaagaaggagggagaggctgtatccgccggtgacgccctttgcgagatcgaaaccgataaagcagtggtgacactggatgcttcagacgacggtatcctagccaagatcgtagtggaggaaggatccaagaatatcaggttaggatccctaattggcctcatcgtggaagaaggagaagactggaagcatgtggaaatcccgaaagacgtgggccctccacctccagttagtaagccctccgaacctcgcccatctcctgagccacagatcagtatacctgtgaagaaggaacatatccctggcacccttaggttccggttatcacctgccgcacgcaatatcctggaaaagcatagtctggacgcttctcagggaacagcaactggccctaggggcatatttacaaaagaggacgctctgaaacttgtgcagctgaagcaaacagggaagatcacagaatcacggccaactccggcaccaacagccacccccacagctccctcaccactgcaggccaccgctggaccatcatatcctcgccctgtgatccctcctgtgagtacccccggacagccgaatgcagttgggacatttacagagatccccgcttcgaacatccgcagggtgatcgcaaaaagattgactgagtcaaagtccactgtaccccacgcatacgctacagcggattgcgatctgggggctgtcctgaaagtgcgtcaggacctggtgaaagacgacatcaaggtttctgtcaacgatttcattattaaagctgccgcagtgacactcaagcaaatgccggatgtcaacgtttcttgggatggcgagggacccaagcagctgccatttatcgacatctccgttgctgtggctaccgataaaggtctgctcacccctatcataaaagacgctgctgccaaaggtatccaagagattgccgatagcgttaaagcgcttagtaaaaaagctagagatggcaagctcttgcctgaggagtatcaggggggttctttctcaatctcgaacctaggtatgttcggaattgatgaattcaccgccgtcattaatcccccacaggcatgcatcctcgccgtgggtcgttttaggccagttctgaaactgacggaagacgaggaggggaatgcgaaacttcagcaaagacagctgattaccgttacaatgagtagtgactctcgtgtggtggacgacgaattggccacccgtttcctcaagagttttaaggccaacttggaaaatcccattcgactagcatag

SEQ ID NO: 50106 - DNA, 2503 bp, Artificial Sequence
  derived and/or modified sequence
aaacgcccggcccgctaccctgcgcccagctccagccgccgggtcccgcctgggcctctcctcctgggaataccgggcaccggtggccccgcccctacctgcgcgccgcatctccgggaacaacagtctccctcccgagcatcacagccagacatggcccagaccagggacccgcgcggcctccaatctccgcacggctttgcgcgcggcgcttagcctgggatacggcagcgaggccgcaaatgcaatcaggcggcgctgagggcagcccgggggcggggcgaacggggcgggggccggggtctggtaaggccccgccggctgagatatccagcggcgcacctgacttcccgggaggtgatcccattaagatactaatgccatcactgtctcctacaatggaagaaggaaacattgtgaaatggctgaaaaaggaaggtgaagcggtgagtgctggagatgcattatgtgaaattgagactgacaaagctgtggttaccttagatgcaagtgatgatggaatcttggccaaaatcgtggttgaagaaggaagtaaaaatatacggctaggttcactaattggtttgatagtagaagaaggagaagattggaaacatgttgaaattcccaaagacgtaggtcctccaccaccagtttcaaaaccttcagagcctcgcccctcaccagaaccacagatttccatccctgtcaagaaggaacacatacccgggacactacggttccgtttaagtccagctgcccgcaatattctggaaaaacactcactggatgctagccagggcacagccactggccctcgggggatattcactaaagaggatgctctcaaacttgtccagttgaaacaaacgggcaagattaccgagtccagaccaactccagcccccacagccactcccacagcaccttcgcccctacaggccacagctggaccatcttatccccggcctgtgatcccaccagtatcaactcctggacaacccaatgcagtgggcacattcactgaaatccccgccagcaatattcgaagagttattgccaagagattaactgaatctaaaagtactgtacctcatgcatatgctactgctgactgtgaccttggagctgttttaaaagttaggcaagatctggtcaaagatgacattaaagtatcagtaaatgattttatcatcaaggcagcagctgttacccttaaacaaatgccagatgttaatgtaagctgggatggagagggcccaaagcaactgccatttattgacatttcagtggctgtggcaacagataaaggcttacttactccaatcataaaagatgctgctgctaaaggtatccaggaaattgctgactctgtaaaggctctatcaaagaaagcaagagatggaaaattgttgcctgaagaataccaaggaggatcttttagtatttccaacttggggatgtttggcatcgacgaatttactgcagtgattaaccctcctcaggcctgcattttggcggttgggaggttccgacctgtgctgaagctcactgaggatgaagagggaaatgccaaactgcagcagcgccagctcataacagtcacaatgtcaagtgacagtcgagtggttgatgacgaactggcaaccaggtttcttaaaagttttaaagcaaacctagagaatcctatccgacttgcctagtcctcaaagataagaagttggtgttcagcttagttgattcagtagttgttaccaagaaacatatgttataggaaaacaacttggtatttaagtatgaagtggatgaaatgtttatttatttaaggtgaaagcatttgacccagggtgtcttcatcttcaatttgggtttaatgttatagaaataaatgatgataaactctaactaataaaggaaagagaatatttggttactcagatccatttttaacctctggtgctgtataaagggaatattaaactagatgtaaatcaaagtatatgtttggctcatttgagcattttggaatatttgagaatgtatgatacatgtaaaattaaaaaaactattagaactgtaccataattatgttgaaggtagaagtgatcttcaaagagatggccattaacttagcagtgggacctcacttttacaagcactgctctagatatacttgaagaatttaataggtacagaagtttattctggataataaataaataaggatcacactgtattaggggttatggcaacattattgaattttttatgtacataaagccatatgtttagggtggtttctatctgtcttgtttttcacttatataacactgtgaacttctaaagcaagaggataaaagaagcatgaatgaaaagaatgacatttcaaaaaaatggttcaatgaaaaactatagctaaaatatgtaaacctttctaggtaaaccgcttgccttcatcttgagtcggaatatatttaaataaattgtgttatctcttgccaaa

SEQ ID NO: 50107 - protein, 284 aa, Artificial Sequence
  derived and/or modified sequence
MPRSFLVKSKKAHTYHQPRVQEDEPLWPPALTPVPRDQAPSNSPVLSTLFPNQCLDWTNLKREPELEQDQNLARMAPAPEGPIVLSRPQDGDSPLSDSPPFYKPSFSWDTLATTYGHSYRQAPSTMQSAFLEHSVSLYGSPLVPSTEPALDFSLRYSPGMDAYHCVKCNKERSFECRMCGKAFKRSSTLSTHLLIHSDTRPYPCQFCGKRFHQKSDMKKHTYIHTGEKPHKCQVCGKAFSQSSNLITHSRKHTGFKPFSCELCTKGFQRKVDLRRHRESQHNLK

SEQ ID NO: 50108 - DNA, 183 bp, Artificial Sequence
  derived and/or modified sequence
atggccctgccttgcggcatgggtaccgcctggtatctcgatagtacagagaatgcactgacagtgaatgttcccagagcacaaaaccacaaagccagtcacaactccatgtggaagctgggaagtcatttctattgcatcttactggtgaccaaggatcccccaggctttactatggtgtag

SEQ ID NO: 50109 - DNA, 855 bp, Artificial Sequence
  derived and/or modified sequence
atgccccgctccttcctggttaagtctaagaaagcccacacataccaccagccaagagtgcaggaagacgagccactgtggccgccagctctgacgcctgtccctagggaccaggccccttcgaacagcccggtgctatcaacactgtttccaaaccagtgtcttgattggacaaatttaaaacgggagcctgagctggaacaggaccagaatttagcgaggatggcccctgcacctgagggccccatcgtgctttctcggcctcaggatggcgattcacccctgtctgactctccacccttctacaaaccctctttctcatgggacacattggccaccacttacggacactcttacagacaggccccctccactatgcaaagtgcatttcttgagcacagcgtgtccctctatgggagccctttagtgcctagtactgagcctgctctcgacttctccttgcgatactcccccgggatggatgcctatcactgcgtgaagtgcaataaagagcgctcctttgagtgtcgcatgtgcggcaaagcctttaaacgaagctctacattgagcactcacctgttgatccatagtgacacccgcccctatccttgtcagttctgcggaaagcggttccaccaaaaatctgacatgaagaagcatacctacattcacacaggcgagaaaccacacaagtgtcaagtgtgcggtaaggcattctctcagtcaagtaatcttattacccactcccgcaaacacacgggatttaaaccgttttcatgcgagttgtgcaccaaaggttttcagaggaaagttgatcttcggaggcatagagaatcacaacacaacctgaaatag

SEQ ID NO: 50110 - DNA, 855 bp, Artificial Sequence
  derived and/or modified sequence
atgccccggagcttcctcgtcaaaagtaagaaggcccacacctaccatcagccgagggtgcaggaggacgaacctctgtggccacccgctctcacgcctgttcctcgggatcaagcaccaagtaattcccccgtactgagcacactctttcctaatcagtgcctggattggacgaacttgaaaagagaacccgagctggagcaggaccagaatctcgcccggatggcaccggccccagagggaccaattgtcttgagtcgcccgcaggacggggattcccctctctcagattctccgcccttctataagccttcgttttcctgggacactctagcaaccacctatggacacagctaccggcaggctcctagcaccatgcagagcgccttcttggagcattcagttagcctgtacgggtctccactggttccatccaccgaaccggccctcgatttttcactgaggtactcaccggggatggatgcgtaccactgcgttaagtgcaataaagagcgttcttttgaatgtcgcatgtgcggaaaagccttcaagcgcagctctactctgagcacacacctgctcattcatagcgataccagaccctatccttgtcagttctgcggaaaaaggtttcaccagaaaagcgacatgaagaagcacacttatatacacacgggggaaaagccccataaatgtcaggtctgcgggaaagcattttcccagtctagcaacctgattacccacagcaggaagcacactggtttcaagccttttagctgcgaactttgcaccaagggcttccaacggaaggttgatctgcggcgacatagggagtcacaacacaacctcaagtag

SEQ ID NO: 50111 - DNA, 855 bp, Artificial Sequence
  derived and/or modified sequence
atgccccggtccttcttagtgaagtccaagaaggcgcacacctaccaccagcctcgggtccaggaagacgagccactgtggcctcccgccctgaccccagtccctcgagaccaggcacccagtaattcaccagtcctttcgaccctgttcccgaatcagtgccttgactggacaaacctcaaaagggaaccggagttggaacaggaccagaacttggctcggatggcccccgcccctgagggccctatagttctctctcgaccgcaggatggggactcacctctcagtgactcccccccattttataaacccagcttctcctgggataccctcgcaacaacctatggacacagctacaggcaggctcccagtaccatgcagtctgccttcctagagcattcggtatcattgtatggatcccccctcgtgccctcaaccgagccggccctggatttttccctccggtattctccaggaatggatgcctatcactgcgttaagtgtaacaaagagcgcagctttgaatgcaggatgtgcggcaaagccttcaaacgctctagtacattatccacccacctgctgatccacagcgatacgaggccttacccttgtcaattctgcggaaagaggttccatcagaagtctgacatgaaaaagcatacttatatccatactggggagaagccccacaagtgccaggtctgcggtaaggcctttagtcagtcctccaatctgataactcactcgaggaaacacaccggtttcaaacccttttcctgtgagctgtgcactaagggattccagcgcaaggtggatctccgcaggcaccgagagagccaacacaatctgaagtag

SEQ ID NO: 50112 - DNA, 1515 bp, Artificial Sequence
  derived and/or modified sequence
caggtgtggggtgcacactgaaaatgccacgctccttcctggtgaagagcaagaaggctcacacctaccaccagccccgtgtgcaggaagatgaaccgctctggcctcctgcccttaccccggtgcccagagaccaggctccaagcaacagccctgtccttagcactctattcccaaaccagtgcctggactggaccaacctcaaacgagagccggagctggagcaggaccagaacttggccaggatggccccggcaccagagggccccattgtgctgtcccgaccccaggatggggactctccactgtccgactcacccccattctacaagcctagcttctcctgggacaccttggccacaacctatggccacagctaccggcaggccccctccaccatgcagtcagccttcctggagcactccgtcagcctgtacggcagtcctcttgtgcccagcactgagcccgccttggacttcagcctccgctactccccaggcatggatgcgtaccactgtgtgaagtgcaacaaggagcgcagcttcgagtgccgcatgtgcggcaaggccttcaagcgctcgtccacgctgtccacccacctgctcatccactcagacacgcggccctacccctgccagttctgcggcaagcgtttccaccagaagtccgacatgaagaagcacacctacatccacacaggtgagaagccgcacaagtgccaggtgtgcggaaaggccttcagccagagctccaacctcatcacccacagccgcaagcacacaggcttcaagcccttcagctgtgagctgtgcaccaaaggcttccagcgcaaggtggacctgcggcggcaccgcgagagccagcacaatctcaagtgaggctgcgccggctcccagctcctggccagcctgccctgcggtcctgtcacctggaggccagcctcacatgcccaaatctccagtctcctggaggtgggactggacaggagtctaccagcttgttttgagactcatgaaattgctgtgtgaccttgggcaagtcacttaccctgtctggatcaacatttctcctgctgccaagtgtgggagcctggctgggtctttctcagcagaagttgtttccaggtgtgctcaagtgccttcctctagcagagcacagaaagctagaatacccccagggagacagggatgccaagagtagaccagagctgggacccacagacagaacctccacctgcctgctgcccactgagctgggacctggtcaccttggattttagccggcctctttctggctataacaggcagagtcggagctgcctcccaccccagtcagaagcctggcaccccctctgcttcggccagatgtgctggctgactccgacttccgaccagcactcagctggcctctggggattctagctccacaaccaggccgtgaggctggagaaactggcagttattgctgtcaaaagcctgttctctcaactgctgtcaataaaattaaagatacaga

SEQ ID NO: 50113 - DNA, 2314 bp, Artificial Sequence
  derived and/or modified sequence
ctttattgcgaggctgagtatgatgggctccatccagcacgaacacaaagccctgtgagaggaggcagagtgagatgaagtcgaactgtgggatatgaaaggcattttgaaggagtaggcatcaggctggtttttgttcgaggaaagctactcaggagcttgggaggattgcttgagaccaggagttcaagaccagcctgggctacagagcaagaccccatctttttgaaacttcctgcaactcgcatctggaaaagtgctgttatttgaaagggtgccgacattgtgaaaaacacggagtattgatctctgaagctgagatttttgtcctaaagaatactcaagatgtgtccctggctgggcacagcagctcgtgcctgtaatcccagcactttgggaggctgaggcaggaggatcgcttgaggccaggagttcaagaccagcctattgtgaatagtaccactataaatagagaaagcgtgccgctccaagtgtcgagggttagaaatgagaattcgaagtcttgtgtcctggaaagttttgataagcaaatacggctgagctcccgcgctctcttcattggctgcttgttcaccgccagattttgacacaaataatcagattgaaaatcagggaggggaacagaagaggaaaaacacacagagagacagagcaaaaaggagaagtatctatttgtgcaaagagtcacacagttgacagagtggaggccagtcccgagagaggctttgcagttcccacctcgggaagctccggcagaacccaggcgagggacagctccggacaggtgtggggtgcacactgaaaatgccacgctccttcctggtgaagagcaagaaggctcacacctaccaccagccccgtgtgcaggaagatgaaccgctctggcctcctgcccttaccccggtgcccagagaccaggctccaagcaacagccctgtccttagcactctattcccaaaccagtgcctggactggaccaacctcaaacgagagccggagctggagcaggaccagaacttggccaggatggccccggcaccagagggccccattgtgctgtcccgaccccaggatggggactctccactgtccgactcacccccattctacaagcctagcttctcctgggacaccttggccacaacctatggccacagctaccggcaggccccctccaccatgcagtcagccttcctggagcactccgtcagcctgtacggcagtcctcttgtgcccagcactgagcccgccttggacttcagcctccgctactccccaggcatggatgcgtaccactgtgtgaagtgcaacaaggagcgcagcttcgagtgccgcatgtgcggcaaggccttcaagcgctcgtccacgctgtccacccacctgctcatccactcagacacgcggccctacccctgccagttctgcggcaagcgtttccaccagaagtccgacatgaagaagcacacctacatccacacaggtgagaagccgcacaagtgccaggtgtgcggaaaggccttcagccagagctccaacctcatcacccacagccgcaagcacacaggcttcaagcccttcagctgtgagctgtgcaccaaaggcttccagcgcaaggtggacctgcggcggcaccgcgagagccagcacaatctcaagtgaggctgcgccggctcccagctcctggccagcctgccctgcggtcctgtcacctggaggccagcctcacatgcccaaatctccagtctcctggaggtgggactggacaggagtctaccagcttgttttgagactcatgaaattgctgtgtgaccttgggcaagtcacttaccctgtctggatcaacatttctcctgctgccaagtgtgggagcctggctgggtctttctcagcagaagttgtttccaggtgtgctcaagtgccttcctctagcagagcacagaaagctagaatacccccagggagacagggatgccaagagtagaccagagctgggacccacagacagaacctccacctgcctgctgcccactgagctgggacctggtcaccttggattttagccggcctctttctggctataacaggcagagtcggagctgcctcccaccccagtcagaagcctggcaccccctctgcttcggccagatgtgctggctgactccgacttccgaccagcactcagctggcctctggggattctagctccacaaccaggccgtgaggctggagaaactggcagttattgctgtcaaaagcctgttctctcaactgctgtcaataaaattaaagatac

SEQ ID NO: 50114 - DNA, 1652 bp, Artificial Sequence
  derived and/or modified sequence
aaaaaggagaagtatctatttgtgcaaagagtcacacagttgacagagtggaggccagtcccgagagaggctttgcagttcccacctcgggaagctccggcagaacccaggcgagggacagctccggacaggtgtggggtgcacactgaaaatgccacgctccttcctggtgaagagcaagaaggctcacacctaccaccagccccgtgtgcaggaagatgaaccgctctggcctcctgcccttaccccggtgcccagagaccaggctccaagcaacagccctgtccttagcactctattcccaaaccagtgcctggactggaccaacctcaaacgagagccggagctggagcaggaccagaacttggccaggatggccccggcaccagagggccccattgtgctgtcccgaccccaggatggggactctccactgtccgactcacccccattctacaagcctagcttctcctgggacaccttggccacaacctatggccacagctaccggcaggccccctccaccatgcagtcagccttcctggagcactccgtcagcctgtacggcagtcctcttgtgcccagcactgagcccgccttggacttcagcctccgctactccccaggcatggatgcgtaccactgtgtgaagtgcaacaaggagcgcagcttcgagtgccgcatgtgcggcaaggccttcaagcgctcgtccacgctgtccacccacctgctcatccactcagacacgcggccctacccctgccagttctgcggcaagcgtttccaccagaagtccgacatgaagaagcacacctacatccacacaggtgagaagccgcacaagtgccaggtgtgcggaaaggccttcagccagagctccaacctcatcacccacagccgcaagcacacaggcttcaagcccttcagctgtgagctgtgcaccaaaggcttccagcgcaaggtggacctgcggcggcaccgcgagagccagcacaatctcaagtgaggctgcgccggctcccagctcctggccagcctgccctgcggtcctgtcacctggaggccagcctcacatgcccaaatctccagtctcctggaggtgggactggacaggagtctaccagcttgttttgagactcatgaaattgctgtgtgaccttgggcaagtcacttaccctgtctggatcaacatttctcctgctgccaagtgtgggagcctggctgggtctttctcagcagaagttgtttccaggtgtgctcaagtgccttcctctagcagagcacagaaagctagaatacccccagggagacagggatgccaagagtagaccagagctgggacccacagacagaacctccacctgcctgctgcccactgagctgggacctggtcaccttggattttagccggcctctttctggctataacaggcagagtcggagctgcctcccaccccagtcagaagcctggcaccccctctgcttcggccagatgtgctggctgactccgacttccgaccagcactcagctggcctctggggattctagctccacaaccaggccgtgaggctggagaaactggcagttattgctgtcaaaagcctgttctctcaactgctgtcaataaaattaaagatacagatttgctgcc

SEQ ID NO: 50115 - DNA, 855 bp, Artificial Sequence
  derived and/or modified sequence
atgcccaggagcttcctggtgaagagcaagaaggcccacacctaccaccagccccgggtgcaggaggatgagcccctgtggcccccagccctgacccctgtgccccgggaccaggcccccagcaacagccctgtgctgagcaccctcttccccaaccagtgcctggactggaccaacctgaagcgggagcctgagctggagcaggaccagaacctggccaggatggccccagcccctgagggccccatcgtgctgagccggccccaggatggagacagccccctgagtgacagcccccccttctacaagcccagcttctcctgggacaccctggccaccacctacggccacagctaccggcaggcccccagcaccatgcagagcgccttcctggagcacagcgtgtccctgtatggcagccccctggtgcccagcacagagcccgccctggacttcagcctgcgctacagccctggcatggatgcctaccactgtgtgaagtgcaacaaggagaggagctttgaatgtaggatgtgtgggaaggccttcaagaggagcagcaccctgagcacccacctgctgatccacagcgacacccggccctacccctgccagttctgtgggaagcgcttccaccagaagagtgacatgaagaagcacacctacatccacactggagagaagccccacaagtgccaggtgtgtgggaaggccttcagccagagcagcaacctgatcacccacagcaggaagcacacaggcttcaagcccttcagctgtgagctgtgcaccaagggcttccagaggaaggtggacctgcggcggcaccgggagagccagcacaacctgaagtag

SEQ ID NO: 50116 - DNA, 855 bp, Artificial Sequence
  derived and/or modified sequence
atgccccggagcttcctggtgaagagcaagaaggcccacacctaccatcaaccaagagtgcaggaggacgagccactgtggccaccagcattgacgcccgttccgcgcgaccaagctccttcaaactcacctgtgttgtcaacactttttccaaaccagtgcctggattggacaaatttaaaacgcgagcccgagcttgaacaggaccaaaacttggcccggatggcacccgccccggaaggccctatagtgttatccaggccccaggacggcgatagcccactgtcggatagcccaccattttataagccgtcattctcatgggatactctagctacgacttacggacattcatatcggcaggctccctctactatgcaatctgccttcctggaacactcggtttccctttatggcagtccccttgtcccgagtactgagccggctctcgattttagcctcaggtatagccccggcatggacgcttaccattgtgtcaagtgcaacaaggagcggagttttgagtgtcgcatgtgtggcaaggcctttaagaggagttctactttatcaacccatctcctgattcatagcgatacccggccctatccttgccaattctgcggaaagcggttccaccaaaaatcagacatgaaaaaacacacttacatccacaccggcgaaaagccccacaagtgccaggtctgcggcaaggcctttagtcagtcaagtaatttgattacgcatagtcggaagcataccggcttcaagcccttcagctgcgaactctgcacaaaggggtttcagcggaaggtggatctcagacgccacagggagtctcaacacaacttaaaatag

SEQ ID NO: 50117 - DNA, 855 bp, Artificial Sequence
  derived and/or modified sequence
atgccccggagcttcctggtgaagagcaagaaggcccacacctaccaccaacctagagtgcaggaagatgaaccgctttggccgcccgctctgacccctgtgccccgcgatcaggccccaagtaacagtcctgttttgtcgacattgttccctaatcagtgtctggactggactaacctcaaaagggaacctgaactggagcaggaccagaacctggcccgcatggctcctgccccggaaggacctatcgtcttgtccaggcctcaggacggcgattctcctctgtcggactctccccccttttataaaccgtccttctcctgggacacactggcaaccacctacgggcactcatatcggcaagccccaagtactatgcagagtgcatttctggaacacagcgtctctctctatgggtcccctcttgttccgtctaccgagcccgcattggacttttctcttcgctactcacccgggatggacgcgtatcattgtgtcaagtgcaataaggaacgcagtttcgagtgtcgcatgtgcggaaaagctttcaagcgcagctcgacattgagtacacacttgctcattcactcagataccagaccatatccctgccagttttgcggaaagcgcttccatcaaaagtccgatatgaagaagcatacatacatccacaccggcgaaaagccgcataagtgccaggtgtgtggcaaagcatttagccagagctctaacttaatcacccactcaaggaagcacacgggcttcaagccctttagctgtgaactgtgtaccaaaggttttcagagaaaggtagacttgcgcagacacagagagagccagcacaaccttaagtag

SEQ ID NO: 50118 - DNA, 855 bp, Artificial Sequence
  derived and/or modified sequence
atgccccggagcttcctggtgaagagcaagaaggcccacacctaccatcagcctagagtgcaggaagacgagcccctgtggccccccgctctaacccccgtccccagagaccaggcccccagcaacagtcctgttctgagcaccctgtttcctaatcagtgtctggattggaccaacttaaagcgagaacccgaactagaacaggaccagaatcttgcccgcatggctcctgcgccagaggggccaattgtgctatcccggccccaggatggggactctcctctcagtgactcgcccccattctacaagccgtctttctcttgggatacgctcgccacgacttatgggcactcctaccgccaagcaccatcaactatgcagtcagcatttttggagcacagcgtgtccttgtatggcagtccgctggttcctagcaccgagcccgctctggatttctccctcagatactccccggggatggatgcataccactgcgttaaatgcaataaggaacggtcctttgagtgccggatgtgcggtaaggccttcaaacgctcgagcacccttagcacacatctcctcatccattccgacacccgcccatacccatgccagttctgcggaaaacgtttccatcagaagtccgatatgaaaaagcatacctatattcacacaggggaaaaacctcataagtgccaagtttgcggcaaggcattctcacaaagcagtaacctcattacccacagccgcaaacacaccgggttcaaaccattcagttgtgagctgtgcacgaagggatttcagcgcaaggtggatttgagaaggcatagggaaagtcagcacaacttgaagtag

SEQ ID NO: 50119 - DNA, 855 bp, Artificial Sequence
  derived and/or modified sequence
atgcccaggtctttcctggtgaaaagcaaaaaggcccatacctaccaccagcccagggtccaagaggacgagccgctgtggccaccggctttgacaccagtgcctagggaccaggctccaagtaattctcccgtgttatccacactgttccctaaccagtgtctggactggaccaacctgaagcgagaacctgagttagaacaggaccaaaacctggcaaggatggccccagctcctgagggtcccattgtcttgagtcggccacaggatggggacagtcctctttccgactccccaccgttctacaagccgagcttctcttgggacactctggctactacctacggtcactcataccgccaagcgccttccacgatgcaatctgcattcctcgagcactccgtctcactttatggcagccccctggtgcccagcaccgaacccgctctcgatttttccctccggtatagtccaggaatggacgcatatcactgtgtcaagtgcaacaaagaaagatcattcgagtgccgaatgtgcggtaaggcttttaaaaggtcttctacactttcaactcatttactaatacactctgacactcgtccctacccttgtcagttttgcgggaaacggttccatcaaaagtctgatatgaaaaagcacacgtatatccacacaggcgaaaagcctcataaatgccaagtctgcggcaaggcgttctcccagtctagcaacctgatcacacattctagaaaacatacaggctttaagccattctcttgtgagctgtgtacaaaaggattccagagaaaggtggacctgcgacgccatcgagagtctcaacacaatctgaagtag

SEQ ID NO: 50120 - DNA, 855 bp, Artificial Sequence
  derived and/or modified sequence
atgcctcgaagctttttagtgaagtcaaagaaggcacatacctaccaccagccacgggtgcaggaggacgaacccctatggccaccggctttgacccctgtgccgagagatcaggcgccatctaatagtcccgtgctctccaccctctttcccaaccaatgtctcgactggaccaatcttaaaagggagcccgaactggagcaggatcagaacctcgcgcgaatggctccagccccagagggaccaattgtactgtctcgtccacaggacggggactcccctctgagcgattcacccccattctacaagccctcttttagttgggacacccttgcgacaacatacggacacagttataggcaggctcctagcaccatgcaaagcgcgttccttgagcattccgtaagcctgtatggctccccgttggtcccgagtacggagccagctttagatttctcattaagatattcgcctgggatggacgcataccactgtgtgaagtgtaacaaggagaggagcttcgagtgtaggatgtgtggtaaggcgttcaaacggagctctaccctttcaacacacctgctcattcacagcgacacccgaccatacccatgtcagttctgcgggaagcgtttccaccagaagtccgatatgaagaagcatacctatatccataccggcgagaaaccccacaaatgccaagtttgcggtaaggccttcagccagtcatcaaacctgattacacacagtagaaagcacacaggcttcaagccgttctcctgcgaattgtgcacaaaggggtttcaaagaaaagttgacctgcggagacatcgtgaatcccagcacaatctcaagtag

SEQ ID NO: 50121 - DNA, 855 bp, Artificial Sequence
  derived and/or modified sequence
atgccaagatcttttttagtaaagtctaagaaggcccacacatatcatcagccgcgagtgcaagaagatgagcccttgtggccccctgcgctgaccccggtgcctcgcgatcaggctccgtccaatagtcctgttctttcaactctctttcctaaccagtgccttgactggactaatctgaagcgcgagcccgagcttgaacaggatcagaatctggctcggatggccccagcacctgaaggtcctatcgtgctctctcgtccacaggacggcgacagtcccttatcagactcacctcccttttacaaacccagcttctcatgggatacccttgctaccacatatggacattcttacagacaggccccaagtactatgcaaagtgcatttttagaacatagtgtgtctctgtacggatcgcctctggtaccgagcacagaaccagccctggatttcagtcttcggtactcaccgggaatggatgcctatcactgtgtgaagtgcaataaagagcgcagttttgagtgtagaatgtgcggaaaagcctttaagaggtcatctactttgtcaacccacctgcttatccacagcgatacccgaccatatccttgccaattctgcggcaaaagattccatcagaagagtgacatgaagaagcatacttatattcatacaggggaaaaaccacataagtgtcaggtctgtggtaaggcgttctcccagtcaagcaacttgatcacacattccaggaagcacaccggtttcaagccattctcttgcgagctttgcactaaaggcttccagaggaaagttgacctgagacgacacagagaatcccagcataatcttaagtag

SEQ ID NO: 50122 - DNA, 855 bp, Artificial Sequence
  derived and/or modified sequence
atgcccagaagcttcctggtgaagagcaagaaggcccacacctaccaccagcccagagtgcaggaggacgagcccctgtggccccccgccctgacccccgtgcccagagaccaggcccccagcaacagccccgtgctgagcaccctgttccccaaccagtgcctggactggaccaacctgaagagagagcccgagctggagcaggaccagaacctggccagaatggcccccgcccccgagggccccatcgtgctgagcagaccccaggacggcgacagccccctgagcgacagcccccccttctacaagcccagcttcagctgggacaccctggccaccacctacggccacagctacagacaggcccccagcaccatgcagagcgccttcctggagcacagcgtgagcctgtacggcagccccctggtgcccagcaccgagcccgccctggacttcagcctgagatacagccccggcatggacgcctaccactgcgtgaagtgcaacaaggagagaagcttcgagtgcagaatgtgcggcaaggccttcaagagaagcagcaccctgagcacccacctgctgatccacagcgacaccagaccctacccctgccagttctgcggcaagagattccaccagaagagcgacatgaagaagcacacctacatccacaccggcgagaagccccacaagtgccaggtgtgcggcaaggccttcagccagagcagcaacctgatcacccacagcagaaagcacaccggcttcaagcccttcagctgcgagctgtgcaccaagggcttccagagaaaggtggacctgagaagacacagagagagccagcacaacctgaagtag

SEQ ID NO: 50123 - DNA, 651 bp, Artificial Sequence
  derived and/or modified sequence
atgtccgtgtattatatgatcgtgtgccttattgcattcacaatcaccttaattttgaacgtgactcgcctctgtatgatgtcttctcatctgagaaagacagagaaggcaatcaatgagttctttcggacagaaggggctgagaagttgcagaaggcttttgaaatcgccaagcgaatcccaatcattacaagcgcgaagaccttggagcttgctaaagtgacacagtttaagacaatggagttcgccagatatattgaagagcttgccaggtctgtgcccctacctccgctgattctgaattgccgggcttttgtcgaggagatgtttgaagccgtgagggtggacgacccagacgatctcggcgaacggataaaagagcgccccgcccttaacgctcaggggggcatctacgtgattaatcctgaaatgggcagatccaatagtccaggcggcgattcggacgacggaagtttaaatgaacagggccaagaaatcgctgtgcaggtctctgtgcacctgcagtctgagaccaagagtattgacacggagtctcaagggtcaagccacttcagcccacccgatgacatcgggagcgcagaaagcaactgcaattataaggacggagcctacgagaactgtcagctgtag

SEQ ID NO: 50124 - DNA, 651 bp, Artificial Sequence
  derived and/or modified sequence
atgtctgtgtactacatgattgtgtgcctgattgccttcaccatcaccctcatcctgaatgtgacccggctgtgcatgatgagcagccacctgaggaagacagagaaggccatcaatgagttcttcagaacagagggcgctgagaagctgcagaaggcctttgagatcgccaagaggatccccatcatcaccagcgccaagaccctggagctggccaaggtgacccagttcaagaccatggagtttgcccgctacatcgaggagctggcccggtctgtgcccctgcccccactcatcctgaactgccgggcctttgtggaggagatgtttgaggccgtgcgggtggatgatcctgatgacctgggggagcgcatcaaggagaggcctgccctgaatgcccagggcggcatctacgtgatcaaccctgagatgggccgcagcaacagccctggaggagacagtgatgatggcagcctgaatgagcagggccaggagattgctgtgcaggtgtctgtgcacctgcagagcgagaccaagagcattgacacagagagccagggcagcagccacttcagccccccagatgacatcggcagcgctgagagcaactgcaactacaaggatggagcctatgagaactgccagctgtag

SEQ ID NO: 50125 - DNA, 651 bp, Artificial Sequence
  derived and/or modified sequence
atgagcgtgtactacatgatcgtgtgcctgatcgccttcaccatcactcttattcttaacgttaccaggctgtgcatgatgagtagccacctgcgaaagacagaaaaagctatcaatgaattttttagaacagagggagccgaaaagctgcagaaagcgttcgaaattgccaagcggatacccattatcacctcagctaagaccctggagctcgcgaaggtcacccagtttaaaaccatggaatttgcaagatacatcgaagaacttgcccgatcagtgcccctacccccgctgattttgaactgtagagcctttgttgaggagatgttcgaagctgtgcgggtggacgacccagacgaccttggtgagcgaattaaggagcggcctgccctgaatgctcagggcggtatctacgttattaacccagagatgggacggagcaattcacccggcggggactctgatgacggctccctcaacgagcagggacaggagattgcagtgcaagtctcggtgcacctgcagagcgagaccaaatctatagatacagagagccaaggctcttcccattttagtccacccgacgatatcgggagtgccgagtctaattgcaactacaaggatggcgcctacgagaactgccagctgtag

SEQ ID NO: 50126 - DNA, 651 bp, Artificial Sequence
  derived and/or modified sequence
atgtccgtctattacatgattgtctgtctcatagcattcacgatcaccctgatcctgaacgtgacccgcctatgcatgatgtcttcccacctgagaaagactgagaaggctattaacgagttcttcaggacagagggggcagagaaactgcagaaagccttcgaaatcgccaaacgtatcccaataatcaccagcgccaagactctggagcttgctaaagtcacacagtttaagaccatggagttcgctcgctacattgaagaacttgcccgtagtgttccgttgccacccctgattctcaattgccgggcattcgtggaagaaatgttcgaggccgtgcgcgtagatgacccagacgacctcggggaaaggatcaaggagcgcccagccttgaatgctcaaggaggcatttacgtgattaaccctgagatgggcagatccaactcccctggcggagatagcgacgatggaagccttaatgagcagggccaggaaatcgcagtccaagtgtctgtgcacctccagagcgagacaaagtccatagataccgagtcccaggggtcgtcccattttagtcccccagatgacattggatcagccgaatcgaattgcaactacaaggacggggcatacgaaaattgccagctatag

SEQ ID NO: 50127 - DNA, 651 bp, Artificial Sequence
  derived and/or modified sequence
atgagcgtgtactacatgatcgtgtgcctgatcgccttcaccatcaccctgatcctgaacgtgaccagactgtgcatgatgagcagccacctgagaaagaccgagaaggccatcaacgagttcttcagaaccgagggcgccgagaagctgcagaaggccttcgagatcgccaagagaatccccatcatcaccagcgccaagaccctggagctggccaaggtgacccagttcaagaccatggagttcgccagatacatcgaggagctggccagaagcgtgcccctgccccccctgatcctgaactgcagagccttcgtggaggagatgttcgaggccgtgagagtggacgaccccgacgacctgggcgagagaatcaaggagagacccgccctgaacgcccagggcggcatctacgtgatcaaccccgagatgggcagaagcaacagccccggcggcgacagcgacgacggcagcctgaacgagcagggccaggagatcgccgtgcaggtgagcgtgcacctgcagagcgagaccaagagcatcgacaccgagagccagggcagcagccacttcagcccccccgacgacatcggcagcgccgagagcaactgcaactacaaggacggcgcctacgagaactgccagctgtag

SEQ ID NO: 50128 - protein, 1236 aa, Artificial Sequence
  derived and/or modified sequence
MSAEASARPLRVGSRVEVIGKGHRGTVAYVGATLFATGKWVGVILDEAKGKNDGTVQGRKYFTCDEGHGIFVRQSQIQVFEDGADTTSPETPDSSASKVLKREGTDTTAKTSKLPTRPASTGVAGASSSLGPSGSASAGELSSSEPSTPAQTPLAAPIIPTPVLTSPGAVPPLPSPSKEEEGLRAQVRDLEEKLETLRLKRAEDKAKLKELEKHKIQLEQVQEWKSKMQEQQADLQRRLKEARKEAKEALEAKERYMEEMADTADAIEMATLDKEMAEERAESLQQEVEALKERVDELTTDLEILKAEIEEKGSDGAASSYQLKQLEEQNARLKDALVRMRDLSSSEKQEHVKLQKLMEKKNQELEVVRQQRERLQEELSQAESTIDELKEQVDAALGAEEMVEMLTDRNLNLEEKVRELRETVGDLEAMNEMNDELQENARETELELREQLDMAGARVREAQKRVEAAQETVADYQQTIKKYRQLTAHLQDVNRELTNQQEASVERQQQPPPETFDFKIKFAETKAHAKAIEMELRQMEVAQANRHMSLLTAFMPDSFLRPGGDHDCVLVLLLMPRLICKAELIRKQAQEKFELSENCSERPGLRGAAGEQLSFAAGLVYSLSLLQATLHRYEHALSQCSVDVYKKVGSLYPEMSAHERSLDFLIELLHKDQLDETVNVEPLTKAIKYYQHLYSIHLAEQPEDCTMQLADHIKFTQSALDCMSVEVGRLRAFLQGGQEATDIALLLRDLETSCSDIRQFCKKIRRRMPGTDAPGIPAALAFGPQVSDTLLDCRKHLTWVVAVLQEVAAAAAQLIAPLAENEGLLVAALEELAFKASEQIYGTPSSSPYECLRQSCNILISTMNKLATAMQEGEYDAERPPSKPPPVELRAAALRAEITDAEGLGLKLEDRETVIKELKKSLKIKGEELSEANVRLSLLEKKLDSAAKDADERIEKVQTRLEETQALLRKKEKEFEETMDALQADIDQLEAEKAELKQRLNSQSKRTIEGLRGPPPSGIATLVSGIAGGAIPGQAPGSVPGPGLVKDSPLLLQQISAMRLHISQLQHENSILKGAQMKASLASLPPLHVAKLSHEGPGSELPAGALYRKTSQLLETLNQLSTHTHVVDITRTSPAAKSPSAQLMEQVAQLKSLSDTVEKLKDEVLKETVSQRPGATVPTDFATFPSSAFLRAKEEQQDDTVYMGKVTFSCAAGFGQRHRLVLTQEQLHQLHSRLIS

SEQ ID NO: 50129 - protein, 1253 aa, Artificial Sequence
  derived and/or modified sequence
MAQSKRHVYSRTPSGSRMSAEASARPLRVGSRVEVIGKGHRGTVAYVGATLFATGKWVGVILDEAKGKNDGTVQGRKYFTCDEGHGIFVRQSQIQVFEDGADTTSPETPDSSASKVLKREGTDTTAKTSKLPTRPASTGVAGASSSLGPSGSASAGELSSSEPSTPAQTPLAAPIIPTPVLTSPGAVPPLPSPSKEEEGLRAQVRDLEEKLETLRLKRAEDKAKLKELEKHKIQLEQVQEWKSKMQEQQADLQRRLKEARKEAKEALEAKERYMEEMADTADAIEMATLDKEMAEERAESLQQEVEALKERVDELTTDLEILKAEIEEKGSDGAASSYQLKQLEEQNARLKDALVRMRDLSSSEKQEHVKLQKLMEKKNQELEVVRQQRERLQEELSQAESTIDELKEQVDAALGAEEMVEMLTDRNLNLEEKVRELRETVGDLEAMNEMNDELQENARETELELREQLDMAGARVREAQKRVEAAQETVADYQQTIKKYRQLTAHLQDVNRELTNQQEASVERQQQPPPETFDFKIKFAETKAHAKAIEMELRQMEVAQANRHMSLLTAFMPDSFLRPGGDHDCVLVLLLMPRLICKAELIRKQAQEKFELSENCSERPGLRGAAGEQLSFAAGLVYSLSLLQATLHRYEHALSQCSVDVYKKVGSLYPEMSAHERSLDFLIELLHKDQLDETVNVEPLTKAIKYYQHLYSIHLAEQPEDCTMQLADHIKFTQSALDCMSVEVGRLRAFLQGGQEATDIALLLRDLETSCSDIRQFCKKIRRRMPGTDAPGIPAALAFGPQVSDTLLDCRKHLTWVVAVLQEVAAAAAQLIAPLAENEGLLVAALEELAFKASEQIYGTPSSSPYECLRQSCNILISTMNKLATAMQEGEYDAERPPSKPPPVELRAAALRAEITDAEGLGLKLEDRETVIKELKKSLKIKGEELSEANVRLSLLEKKLDSAAKDADERIEKVQTRLEETQALLRKKEKEFEETMDALQADIDQLEAEKAELKQRLNSQSKRTIEGLRGPPPSGIATLVSGIAGGAIPGQAPGSVPGPGLVKDSPLLLQQISAMRLHISQLQHENSILKGAQMKASLASLPPLHVAKLSHEGPGSELPAGALYRKTSQLLETLNQLSTHTHVVDITRTSPAAKSPSAQLMEQVAQLKSLSDTVEKLKDEVLKETVSQRPGATVPTDFATFPSSAFLRAKEEQQDDTVYMGKVTFSCAAGFGQRHRLVLTQEQLHQLHSRLIS

SEQ ID NO: 50130 - DNA, 3762 bp, Artificial Sequence
  derived and/or modified sequence
atggctcagtctaagcgccacgtgtactctcgcacaccctctggctcacgcatgtctgccgaagcctccgctaggcccctgagggtgggtagtagagtggaggtgatcggaaaggggcatcgtggcaccgtcgcttatgtcggggccacgctgttcgccaccgggaaatgggtgggtgtgatccttgatgaggctaagggcaagaacgatggtacagttcaaggacggaagtatttcacctgcgatgagggccacggtattttcgtgaggcagtcacaaattcaagtctttgaagatggcgccgacaccaccagcccggaaacaccggacagctctgcgagcaaggtcctgaaacgagagggaacggatactactgcaaagacttccaaactgcccacccgacctgctagtaccggagtcgctggagcttccagtagcttggggccctctgggagtgcatcagccggggagctcagttctagcgaaccctcgacccccgcacaaaccccacttgccgcgccaatcattcctacaccggtgttgacaagtcccggcgcggtgccaccgctcccttccccttcgaaggaagaggaaggcttgcgcgcccaggtaagagacctcgaggagaagctggagaccttgcgactgaaacgggcagaagacaaggctaaacttaaagaattggaaaagcacaagatccaattggaacaggtccaggagtggaaaagcaagatgcaggaacaacaggcagatctgcaaaggcggctgaaagaagcacggaaggaagctaaggaggcgctggaggctaaagagaggtatatggaagagatggcggacaccgcggatgcaatcgagatggctacattggataaggagatggcagaggaacgggctgagtcactgcagcaggaggtcgaggccctaaaggaacgggtcgacgagctcaccacagacctcgagattctaaaggcagagatagaagagaaagggagtgatggcgccgcatcaagctaccagttaaagcaattagaagagcagaacgcacgcttgaaggacgcgcttgttaggatgagagacctgagtagctcagagaagcaggaacacgttaaattgcaaaagctcatggaaaagaaaaatcaggagctcgaggttgtccgccagcagagggagaggcttcaggaagagctcagccaggctgagagtacaatagatgagctgaaggagcaggtggatgcagcacttggggcagaggagatggtcgaaatgctcaccgatcggaatctgaacctggaggagaaggtgagggaactgagagaaactgtcggcgacctcgaggcaatgaacgagatgaacgatgagttacaggagaacgctagggagacagagctcgaactacgagagcaattagacatggcgggggcccgagttagggaggctcagaagagggtggaggcagcccaggaaacagtagccgattatcaacagaccatcaaaaagtatcgacagttgaccgcacatcttcaggatgtcaacagagagcttactaatcagcaggaagcttcagtggaaaggcaacagcagccaccccccgagacattcgattttaagattaagtttgccgaaacaaaggcccatgctaaggccatcgaaatggagcttcggcagatggaggtcgctcaagctaataggcacatgagcctgctgaccgccttcatgccagacagctttctacgccccggcggagaccacgactgtgttctggtactgttacttatgcctcgcttaatttgtaaagctgaactgataagaaagcaggcccaggagaaatttgagctcagcgagaattgcagcgaaaggcccggcctaagaggagcagcaggcgaacagttgagttttgctgccgggcttgtgtattctctatcgctcctccaggccaccttgcaccgttacgagcatgcactgagtcagtgttccgtggacgtgtacaaaaaggttgggtccctgtacccggagatgtcggcacacgagcgaagtctggactttttaattgagttgctgcacaaagatcagctagacgaaaccgttaatgtggaaccattgacaaaagcgatcaagtactatcaacacctttattcgattcacctcgcggagcagccagaagactgtacaatgcaattggccgatcacattaaatttacccaatctgctctggactgcatgtcagttgaggtaggcagattacgggccttcctccagggaggccaggaggctaccgacatagccctcttgttacgggatctggagaccagctgttccgacataagacaattttgtaagaagataagacgcaggatgcccggcaccgacgcccccggtatccctgccgctctggcgtttggtcctcaggtcagcgacactctgctcgattgcagaaagcaccttacatgggtggtcgccgtgctacaggaggtggcagccgcagccgctcaactcattgccccgttggccgaaaatgagggcttgctcgtggcggccctcgaggaattggccttcaaagcctcggaacagatatatggaacgccaagcagctccccctatgaatgccttcgccagtcctgtaatattctgattagcacaatgaataaattagctaccgctatgcaggagggtgagtacgatgcagaacgcccccctagcaaacctccgcccgttgaattgcgtgctgctgcacttagagccgagattaccgatgccgaagggttggggctgaagctcgaagatcgagagactgtgattaaggagctgaaaaaatcactgaagatcaaaggggaggagctgtccgaggccaatgtgcgattgagtctgctagaaaaaaagctggacagcgccgccaaagacgcagatgaaaggattgagaaagtgcaaacgagactggaggagacgcaagccctgcttcgtaagaaagagaaggaattcgaggagaccatggacgcactacaggccgacattgaccaattagaggcagaaaaagccgagcttaagcaaagactcaattcccaaagtaagcgcactatcgaagggctgcgaggacccccaccttcaggaatcgcgaccctggtgagtggtatcgcaggaggggctatccctggccaggcgcctggctccgtccccggtccaggccttgttaaggatagtccattgctccttcagcagatatccgccatgagattacacattagtcaactccagcacgaaaactcgatcctcaaaggagcccagatgaaagcatcactggccagtcttccacctctgcacgtggccaaactgagccacgagggacccggaagcgagttgccagctggtgcactctacaggaagacttcacagctactcgagactcttaaccaactctcaacccatacgcacgtggtggacattacccgcaccagtccggccgccaaatcccctagcgcccagttgatggagcaggtagcgcagctcaaatcactctcagacaccgtcgagaagctcaaagatgaagtgttaaaggagaccgtgtctcagcgcccgggtgccacagtcccgacagactttgccaccttccctagcagtgcgtttctcagagccaaggaggagcagcaggacgatactgtgtacatgggtaaagtaaccttctcctgcgctgccggttttgggcagagacatcggcttgtactgacccaggagcagctgcaccagctgcattcgcggttaatcagctag

SEQ ID NO: 50131 - DNA, 3762 bp, Artificial Sequence
  derived and/or modified sequence
atggcccagagcaagagacatgtgtacagcaggacccccagcggcagcaggatgtctgctgaggccagcgcccggcccctgcgggtgggcagccgggtggaggtgattggcaagggccaccggggcaccgtggcctacgtgggcgccaccctgtttgccaccgggaagtgggtgggcgtcatcctggatgaggccaagggcaagaatgatggcaccgtgcagggcaggaagtacttcacctgtgatgagggccacggcatctttgtgcggcagagccagatccaggtgtttgaagatggagctgacaccaccagccctgagaccccagacagcagcgccagcaaggtgctgaagcgggagggcacagacaccacagccaagaccagcaagctgcccaccaggcctgccagcactggagtggccggggccagcagcagcctgggccccagcggcagcgccagcgctggggagctgagcagcagcgagcccagcaccccagcccagacccccctggccgcccccatcatccccacccctgtgctgaccagccctggagctgtgccccccctgcccagccccagcaaggaggaggagggcctgcgggcccaggtgcgggacctggaggagaagctggagaccctgcggctgaagagagctgaggacaaggccaagctgaaggagctggagaagcacaagatccagctggagcaggtgcaggagtggaagagcaagatgcaggagcagcaggccgacctgcagaggcggctgaaggaggccaggaaggaggccaaggaggccctggaggccaaggagcgctacatggaggagatggctgacacagcagatgccatcgagatggccaccctggacaaggagatggccgaggagcgggcagagagcctgcagcaggaggtggaggccctgaaggagcgggtggatgagctgaccacagacctggagatcctgaaggccgagattgaggagaagggcagtgatggagctgccagcagctaccagctgaagcagctggaggagcagaatgcccggctgaaggatgccctggtgaggatgagggacctgagcagcagcgagaagcaggagcacgtgaagctgcagaagctgatggagaagaagaaccaggagctggaggtggtgcggcagcagcgggagcggctgcaggaggagctgagccaggccgagagcaccattgatgagctgaaggagcaggtggatgctgccctgggcgctgaggagatggtggagatgctgacagacaggaacctgaacctggaggagaaggtgcgggagctgcgggagaccgtgggggacctggaggccatgaatgagatgaatgatgagctgcaggagaatgcccgggagacagagctggagctgcgggagcagctggacatggccggggcccgggtgcgggaggcccagaagagggtggaggccgcccaggagaccgtggccgactaccagcagaccatcaagaagtaccggcagctgacagcccacctgcaggatgtgaaccgggagctgaccaaccagcaggaggcctctgtggagcggcagcagcagcccccacctgagacctttgacttcaagatcaagtttgctgagaccaaggcccacgccaaggccatcgagatggagctgcggcagatggaggtggcccaggccaacagacacatgagcctgctgacagccttcatgccagacagcttcctgcggcctggaggagaccatgactgtgtgctggtgctgctgctgatgcccaggctcatctgcaaggccgagctgatcaggaagcaggcccaggagaagtttgagctgtctgagaactgcagcgagcggcccggcctgcggggagctgctggggagcagctgagctttgctgctggcctggtgtacagcctgagcctgctgcaggccaccctgcacagatatgagcacgccctgagccagtgcagcgtggatgtgtacaagaaggtgggcagcctgtacccagagatgtctgcccacgagaggagcctggacttcctgattgagctgctgcacaaggaccagctggatgagaccgtgaatgtggagcccctgaccaaggccatcaagtactaccagcacctgtacagcatccacctggccgagcagcctgaggactgcaccatgcagctggccgaccacatcaagttcacccagagcgccctggactgcatgtctgtggaggtgggccgcctgcgggccttcctgcagggcggccaggaggccacagacatcgccctgctgctgcgggacctggagaccagctgcagcgacatccggcagttctgcaagaagatcagaagaaggatgcctggaacagatgcccctggcatcccagctgccctggccttcggcccccaggtgtctgacaccctgctggactgcaggaagcacctgacctgggtggtggccgtgctgcaggaggtggccgctgctgctgcccagctgattgcccccctggctgaaaatgaaggcctgctggtggccgccctggaggagctggccttcaaggccagcgagcagatctacggcacccccagcagcagcccctatgaatgtctgcggcagagctgcaacatcctgatcagcaccatgaacaagctggccacagccatgcaggagggggagtatgatgctgagaggcctcccagcaagcccccacctgtggagctgcgggctgctgccctgcgggcagagatcacagatgctgagggcctgggcctgaagctggaggaccgggagaccgtcatcaaggagctgaagaagagcctgaagatcaagggggaggagctgtctgaggccaacgtgcggctgagcctgctggagaagaagctggacagcgctgccaaggatgctgatgaaagaattgagaaggtgcagacccggctggaggagacccaggccctgctgaggaagaaggagaaggagtttgaggagaccatggatgccctgcaggccgacatcgaccagctggaggccgagaaggccgagctgaagcagaggctgaacagccagagcaagaggaccatcgagggcctgcggggccccccacccagcggcatcgccaccctggtgtctggaattgctgggggcgccatccctggccaggcccctggctctgtgcccggccctggcctggtgaaggacagccccctgctgctgcagcagatcagcgccatgaggctgcacatcagccagctgcagcatgaaaattccatcctgaagggggcccagatgaaggccagcctggccagcctgccccccctgcacgtggccaagctgagccatgagggccctggcagcgagctgcctgctggggccctgtacaggaagaccagccagctgctggagaccctgaaccagctgagcacccacacccacgtggtggacatcaccaggaccagccctgctgccaagagccccagcgcccagctgatggagcaggtggcccagctgaagagcctgagtgacacagtggagaagctgaaggatgaggtgctgaaggagaccgtgtcccagaggcctggggccaccgtgcccacagactttgccaccttccccagcagcgccttcctgcgggccaaggaggagcagcaggatgacacagtgtacatgggcaaggtgaccttcagctgtgccgccggcttcggccagaggcaccggctggtgctgacccaggagcagctgcaccagctgcacagccgcctcatctcctag

SEQ ID NO: 50132 - DNA, 3762 bp, Artificial Sequence
  derived and/or modified sequence
atggcccagagcaagcggcacgtgtacagccggacccccagcggctcgcgtatgtccgccgaggcatccgccagaccactacgtgtggggtctcgggtggaggttatcgggaaaggacacagggggaccgtggcatacgtcggcgcgaccctatttgccacagggaaatgggtcggcgttatcctggacgaagctaaaggcaagaacgacggtacagttcagggtagaaagtatttcacttgtgacgaaggacacggcatcttcgtaaggcagtcccaaattcaggtgtttgaagacggtgccgatacaacttcccccgagactcccgactctagtgccagtaaggtcctcaagagggaaggaacagatactaccgctaaaacctcaaaactgcccaccaggcctgcatccactggggtggccggcgcgtcctcttctctcggaccttcgggctctgccagcgccggcgaactcagtagctctgaaccatccacccctgcacagactcccttagcagctcctattataccaactcctgtcctcacaagcccaggagcggtgccacctctgccttctccatcgaaggaagaggagggcctgcgagcccaggtcagggatttggaagaaaaattggaaaccttgcgacttaagagggccgaagataaggccaaacttaaggagttagagaaacataaaattcagctggaacaggtgcaagagtggaaatccaaaatgcaagagcaacaggcagatttacagcgtcggcttaaagaagcgagaaaggaagcaaaggaggcattggaggccaaggagaggtatatggaagagatggcagataccgcagacgctatcgaaatggcaactcttgataaggagatggccgaagaacgcgcggagagcctgcagcaggaggtcgaggcgctgaaggaaagagtggacgaattaactaccgatttggaaatcctgaaagccgaaattgaagagaagggtagtgatggcgccgcgtccagttaccagctcaagcagctggaagagcaaaacgcccggctgaaagacgcactggtgagaatgagggatctctcttcaagtgaaaaacaggagcacgtgaagctgcagaaactcatggaaaagaaaaaccaagaactcgaagtagtgagacaacagcgggagcgactgcaagaagagttgtctcaggctgaatctacgatcgacgagctcaaggaacaggtggacgctgcactcggagctgaggaaatggttgaaatgctcacagatcgtaatctgaacttggaagagaaagtgagagagctgcgggagacggtgggcgacctggaggcaatgaacgagatgaacgacgaacttcaggagaatgcaagggaaacagaactggaacttagagaacagctggacatggctggcgcacgggtccgcgaagcacagaagcgagtggaagctgcgcaggagaccgtggccgactatcaacagactatcaagaaatacaggcaactcaccgcccacttgcaggacgtgaatagagagctgactaatcaacaggaggcttcggtggagcgccagcaacaacccccaccagagacattcgactttaagataaaattcgccgaaactaaggctcacgccaaagcaatcgagatggaattgcgccagatggaagtagctcaagcaaacaggcacatgtcactgctcaccgctttcatgccagatagcttccttcgcccaggtggggatcacgattgtgtgcttgtgctattgctgatgccaaggttgatctgcaaagccgagttgatccgtaagcaggcacaagagaagttcgagctgagcgagaactgttcagagcgcccgggtctccggggagcggctggggagcagctgagcttcgccgctggcctggtgtactccctgtccttgctgcaggctaccctccacagatatgagcatgccctcagccagtgttctgtggatgtgtacaagaaagtgggctccctctatcccgaaatgagcgctcacgagcggtcacttgatttcctgatcgagttgttgcataaagaccagttggatgagaccgtcaatgttgaacctctcacaaaggccattaagtactaccaacacttgtattctattcacctggccgagcagcccgaagattgcacaatgcagctcgcagatcacattaaattcacccagtccgctctggactgcatgagtgtggaagtgggcagactgcgcgccttcttacagggtgggcaggaggcaaccgatattgcgctgcttctgagggaccttgaaacttcctgcagcgatattcgacaattctgtaaaaagattaggcgacggatgccagggactgacgccccaggcattccagcagcccttgctttcgggcctcaggtatccgacacactgctggactgccggaagcatctgacgtgggtggtcgccgtcttgcaggaagtggccgcagcagccgcacagctgatagcgcctttggccgagaacgaaggactcctggtagcagctctcgaggaactggcctttaaggcctcagagcaaatatacggcactccctccagcagcccttacgaatgtttaaggcagagctgcaatatacttatcagcacaatgaataagctggccactgctatgcaagaaggagaatacgatgccgaacgtcctccatctaagcctccacccgttgagctgcgagccgctgccctgagggctgaaatcaccgatgcagagggattgggccttaaactcgaggaccgcgagactgttataaaggagctgaagaagagcctcaagatcaagggagaggagcttagcgaagccaatgtaagactgtcacttttggaaaaaaaattggatagcgccgctaaggacgctgacgaacggatcgagaaggtgcagacaagactggaagagacccaagcactcctgcgcaagaaggagaaagagtttgaggaaacaatggacgcgctacaggcggacatcgatcagctcgaagcggagaaagccgagcttaaacaacgtctaaatagccagtcgaaaaggacaatcgagggactgcggggcccaccacctagcggcattgccaccctggtaagcggcatagctggtggcgccatacccggtcaggcccccgggtcagttcccggtccaggtctcgtcaaggacagtccgttgttgctacagcagatctcagcaatgcgcttacacatcagccagctccaacacgaaaatagcatcctcaaaggggctcagatgaaagcctctttggcaagcctcccacccctgcacgtggccaagctgtctcatgagggcccgggaagcgagctccctgcaggtgccttgtaccggaaaaccagccagcttttggaaacactgaatcaactatcaactcacacccatgtggtcgatatcacacggacgtctcctgctgcgaagagtccctctgcccaactcatggagcaggtggctcagcttaagtcacttagtgacactgttgaaaaattgaaggacgaggtgctgaaagagacggtctcccagcgtcctggtgcgacagtacctacagattttgcaacttttccctctagcgccttcctgagagccaaggaagaacagcaggatgataccgtctacatgggaaaagtcacattctcttgtgccgcagggttcggacaacgtcaccggctcgtcctgacacaggaacagcttcaccagctccacagtaggctgatctcctag

SEQ ID NO: 50133 - DNA, 3762 bp, Artificial Sequence
  derived and/or modified sequence
atggcgcagtccaagcgccacgtttattcgcggacaccaagtggctcaaggatgtccgcagaggcgtccgctaggcccttgcgtgtaggaagtcgtgtggaagtgataggcaagggccatagggggaccgttgcctacgtgggggcaactctgttcgctacgggcaaatgggtcggcgtgattctggacgaagcaaaaggaaaaaacgacggcacagtacaaggtaggaaatacttcacatgcgatgaaggacatggcatcttcgtgcggcagtcccaaatccaggtcttcgaagatggagcggatactacatcccccgaaacgccagactccagcgcaagcaaagttctgaagcgcgaagggaccgatacaacagctaagacaagcaaactgcccactcgccctgcctcgactggcgtagctggtgcgtcttctagcttagggcctagcggtagtgcttcggccggagaactgtccagcagtgagccatcaacaccagcacagactcccctggcggctccaataatccccactcccgtgctgacgtcaccaggagccgtgccaccactgccgtccccaagcaaggaggaggaaggcttgcgggcacaagtgcgtgatttagaggaaaaactcgaaacgttacggctgaaacgggctgaggacaaagctaaactgaaagaattggagaagcacaagatccaattggagcaggttcaggaatggaagtcaaagatgcaagagcaacaggcagaccttcagcgaagattgaaggaagcccgtaaagaggcaaaagaagcccttgaagcaaaggaaaggtacatggaggaaatggctgacactgccgacgcaatagaaatggccactctcgataaagagatggctgaggagagagccgagtctttgcaacaggaagtggaagccctgaaagagcgagtggacgaactcacaacagaccttgagattctaaaagccgaaatagaagagaagggtagcgacggagctgcctcaagctaccagctgaagcagctggaggagcaaaacgcaagattaaaggacgctttagtacgaatgcgcgacctgtccagcagcgagaagcaggagcatgtaaaattgcagaagctaatggagaagaagaaccaggagcttgaagtggtccgccagcaaagggagagactgcaagaggaattatcgcaggcggaaagcacaattgatgaactgaaggagcaggttgacgcggctctgggtgcagaagaaatggttgagatgctaacggatagaaacctcaatctggaagaaaaagtgagggagctgcgcgaaacagtgggtgatctagaagcaatgaatgagatgaatgacgaactgcaggagaatgctagggaaaccgagctcgaactccgggagcagctggacatggcgggagccagggtccgtgaggctcagaagcgtgtggaggcagcccaggaaaccgtcgctgactatcagcaaaccatcaagaagtatcgccagctgacggcccatctgcaggatgtgaacagagagctgaccaatcaacaagaagcctccgtagaaaggcagcagcagccccctccggagacctttgacttcaagatcaagtttgctgagaccaaggcccacgcaaaggctatcgagatggaactgagacagatggaggtcgcccaagcgaaccgtcacatgtctctgctgactgccttcatgcccgatagctttctgcgcccaggaggagatcacgactgcgtattggtcctgctactgatgcctagactaatttgtaaggctgaattaatcagaaagcaggctcaagaaaagttcgagctgagcgaaaactgctccgaacgtcccggacttcgcggagctgctggcgagcagttgtccttcgctgcgggtctagtgtacagtcttagcctcttgcaggcaactctacacagatatgaacacgcccttagccagtgtagtgtagatgtgtataagaaggtcggcagcctgtacccagaaatgagtgctcacgaaagaagcctagacttcttgatagaactactgcataaggaccaactcgatgaaactgtaaatgttgagcccctgacaaaggctattaagtattaccagcacctgtattccattcatctagctgagcagccggaggattgcacaatgcagttggcggaccacattaaattcacccagtctgctctggactgcatgagcgtcgaggtgggcaggctcagagcattcctccaaggcggacaggaggctacggatattgcgcttcttctgagagatctggagacttcctgttctgacattcggcagttctgcaaaaagatcaggagaagaatgcccggaacagacgcccctggcatcccagccgcactcgccttcgggcctcaggtgtccgatacgctgttagactgccggaaacacctgacatgggtagtcgcagttcttcaagaggtcgccgcagctgctgcacagcttatagcaccacttgcagagaatgaagggctcctagtagctgctttggaagagctggccttcaaggcctcggaacaaatatacgggacaccatcttcgagtccctacgagtgcctgcgacaaagctgtaacattctgatttcgactatgaacaagctcgctaccgccatgcaagaaggcgagtacgatgctgaaagaccgccttcaaaaccccctcctgttgaattacgagctgccgctttaagagcggagattactgacgccgagggcttgggccttaagctggaggatcgagagacggtgataaaggaactaaaaaaatcactgaaaattaagggggaggaactgtcagaggcgaatgtgcggctgtcccttttggagaagaaacttgacagcgcagctaaggacgccgatgagcgtattgaaaaagtgcagactcggctggaggagactcaagcccttctgagaaaaaaggagaaagagttcgaggaaaccatggatgccctgcaagccgatattgatcagcttgaggctgagaaagctgagctcaagcagcggctgaacagccagtccaagagaacaattgagggtctgcggggtcctccgccttcagggatcgcaacgctcgtatctggaatagccggaggcgctatccccggacaggctcccggatccgtgccgggtcctggcctggtgaaagacagtccactcctcctgcagcaaattagtgccatgagactgcatatatcccagctccagcacgagaactccatcctgaagggcgctcagatgaaggcttccctagcaagcctgccgcctttacacgtggcaaaattgtctcacgagggccctggatctgagctgccagccggtgctctgtatcgaaagaccagccaactgctggaaaccctaaatcagttgagcactcacacccacgtggtcgacattacgaggacttccccagccgctaagagtccctctgcccagcttatggagcaagtggctcaattgaaaagtctctctgacacagtggagaaattaaaagatgaagttttaaaagagaccgtctcccagaggcccggtgccacggttcccactgattttgccacctttcccagctccgcatttctcagggcgaaagaagagcaacaggatgacaccgtatacatgggcaaagttactttctcgtgtgccgcaggcttcggtcagaggcaccggctggtgctcacacaggagcaattgcatcagctgcactcgcgtcttatcagctag

SEQ ID NO: 50134 - DNA, 3762 bp, Artificial Sequence
  derived and/or modified sequence
atggcccagagcaagagacacgtgtacagcagaacccccagcggcagcagaatgagcgccgaggccagcgccagacccctgagagtgggcagcagagtggaggtgatcggcaagggccacagaggcaccgtggcctacgtgggcgccaccctgttcgccaccggcaagtgggtgggcgtgatcctggacgaggccaagggcaagaacgacggcaccgtgcagggcagaaagtacttcacctgcgacgagggccacggcatcttcgtgagacagagccagatccaggtgttcgaggacggcgccgacaccaccagccccgagacccccgacagcagcgccagcaaggtgctgaagagagagggcaccgacaccaccgccaagaccagcaagctgcccaccagacccgccagcaccggcgtggccggcgccagcagcagcctgggccccagcggcagcgccagcgccggcgagctgagcagcagcgagcccagcacccccgcccagacccccctggccgcccccatcatccccacccccgtgctgaccagccccggcgccgtgccccccctgcccagccccagcaaggaggaggagggcctgagagcccaggtgagagacctggaggagaagctggagaccctgagactgaagagagccgaggacaaggccaagctgaaggagctggagaagcacaagatccagctggagcaggtgcaggagtggaagagcaagatgcaggagcagcaggccgacctgcagagaagactgaaggaggccagaaaggaggccaaggaggccctggaggccaaggagagatacatggaggagatggccgacaccgccgacgccatcgagatggccaccctggacaaggagatggccgaggagagagccgagagcctgcagcaggaggtggaggccctgaaggagagagtggacgagctgaccaccgacctggagatcctgaaggccgagatcgaggagaagggcagcgacggcgccgccagcagctaccagctgaagcagctggaggagcagaacgccagactgaaggacgccctggtgagaatgagagacctgagcagcagcgagaagcaggagcacgtgaagctgcagaagctgatggagaagaagaaccaggagctggaggtggtgagacagcagagagagagactgcaggaggagctgagccaggccgagagcaccatcgacgagctgaaggagcaggtggacgccgccctgggcgccgaggagatggtggagatgctgaccgacagaaacctgaacctggaggagaaggtgagagagctgagagagaccgtgggcgacctggaggccatgaacgagatgaacgacgagctgcaggagaacgccagagagaccgagctggagctgagagagcagctggacatggccggcgccagagtgagagaggcccagaagagagtggaggccgcccaggagaccgtggccgactaccagcagaccatcaagaagtacagacagctgaccgcccacctgcaggacgtgaacagagagctgaccaaccagcaggaggccagcgtggagagacagcagcagcccccccccgagaccttcgacttcaagatcaagttcgccgagaccaaggcccacgccaaggccatcgagatggagctgagacagatggaggtggcccaggccaacagacacatgagcctgctgaccgccttcatgcccgacagcttcctgagacccggcggcgaccacgactgcgtgctggtgctgctgctgatgcccagactgatctgcaaggccgagctgatcagaaagcaggcccaggagaagttcgagctgagcgagaactgcagcgagagacccggcctgagaggcgccgccggcgagcagctgagcttcgccgccggcctggtgtacagcctgagcctgctgcaggccaccctgcacagatacgagcacgccctgagccagtgcagcgtggacgtgtacaagaaggtgggcagcctgtaccccgagatgagcgcccacgagagaagcctggacttcctgatcgagctgctgcacaaggaccagctggacgagaccgtgaacgtggagcccctgaccaaggccatcaagtactaccagcacctgtacagcatccacctggccgagcagcccgaggactgcaccatgcagctggccgaccacatcaagttcacccagagcgccctggactgcatgagcgtggaggtgggcagactgagagccttcctgcagggcggccaggaggccaccgacatcgccctgctgctgagagacctggagaccagctgcagcgacatcagacagttctgcaagaagatcagaagaagaatgcccggcaccgacgcccccggcatccccgccgccctggccttcggcccccaggtgagcgacaccctgctggactgcagaaagcacctgacctgggtggtggccgtgctgcaggaggtggccgccgccgccgcccagctgatcgcccccctggccgagaacgagggcctgctggtggccgccctggaggagctggccttcaaggccagcgagcagatctacggcacccccagcagcagcccctacgagtgcctgagacagagctgcaacatcctgatcagcaccatgaacaagctggccaccgccatgcaggagggcgagtacgacgccgagagaccccccagcaagcccccccccgtggagctgagagccgccgccctgagagccgagatcaccgacgccgagggcctgggcctgaagctggaggacagagagaccgtgatcaaggagctgaagaagagcctgaagatcaagggcgaggagctgagcgaggccaacgtgagactgagcctgctggagaagaagctggacagcgccgccaaggacgccgacgagagaatcgagaaggtgcagaccagactggaggagacccaggccctgctgagaaagaaggagaaggagttcgaggagaccatggacgccctgcaggccgacatcgaccagctggaggccgagaaggccgagctgaagcagagactgaacagccagagcaagagaaccatcgagggcctgagaggccccccccccagcggcatcgccaccctggtgagcggcatcgccggcggcgccatccccggccaggcccccggcagcgtgcccggccccggcctggtgaaggacagccccctgctgctgcagcagatcagcgccatgagactgcacatcagccagctgcagcacgagaacagcatcctgaagggcgcccagatgaaggccagcctggccagcctgccccccctgcacgtggccaagctgagccacgagggccccggcagcgagctgcccgccggcgccctgtacagaaagaccagccagctgctggagaccctgaaccagctgagcacccacacccacgtggtggacatcaccagaaccagccccgccgccaagagccccagcgcccagctgatggagcaggtggcccagctgaagagcctgagcgacaccgtggagaagctgaaggacgaggtgctgaaggagaccgtgagccagagacccggcgccaccgtgcccaccgacttcgccaccttccccagcagcgccttcctgagagccaaggaggagcagcaggacgacaccgtgtacatgggcaaggtgaccttcagctgcgccgccggcttcggccagagacacagactggtgctgacccaggagcagctgcaccagctgcacagcagactgatcagctag

SEQ ID NO: 50135 - DNA, 4229 bp, Artificial Sequence
  derived and/or modified sequence
ggccggccccgcagggtcttgggcgtcggtcgtcggtggggtcggagctgggcgcggagcccctcacagtgcagacgcccagcggcagcaggatgagtgcggaggcaagcgcccggcctctgcgggtgggctcccgtgtagaggtgattggaaaaggccaccgaggcactgtggcctatgttggagccacactgtttgccactggcaaatgggtaggcgtgattctggatgaagcaaagggcaaaaatgatggaactgttcaaggcaggaagtacttcacttgtgatgaagggcatggcatctttgtgcgccagtcccagatccaggtatttgaagatggagcagatactacttccccagagacacctgattcttctgcttcaaaagtcctcaaaagagagggaactgatacaactgcaaagactagcaaactgcccacgcgcccagccagtactggggtggctggggccagtagctccctgggcccctctggctcagcgtcagcaggtgagctgagcagcagtgagcccagcaccccggctcagactccgctggcagcacccatcatccccacgccggtcctcacctctcctggagcagtccccccgcttccttccccatccaaggaggaggagggactaagggctcaggtgcgggacctggaggagaaactagagaccctgagactgaaacgggcagaagacaaagcaaagctaaaagagctggagaaacacaaaatccagctggagcaggtgcaggaatggaagagcaaaatgcaggagcagcaggccgacctgcagcggcgcctcaaggaggcgagaaaggaagccaaggaggcgctggaggcaaaggaacgctatatggaggagatggctgatactgctgatgccattgagatggccactttggacaaggagatggctgaagagcgggctgagtccctgcagcaggaggtggaggcactgaaggagcgggtggacgagctcactactgacttagagatcctcaaggctgagattgaagagaagggctcagatggcgctgcatccagttatcagctcaagcagcttgaggagcagaatgcccgcctgaaggatgccctggtgaggatgcgggatctttcttcctcagagaagcaggagcatgtgaagctccagaagctcatggaaaagaagaaccaagagctggaagttgtgaggcaacagcgggagcgtctgcaggaggagctaagccaggcagagagcaccattgatgagctcaaggagcaggtggatgctgctctgggtgctgaggagatggtggagatgctgacagatcggaacctgaatctggaagagaaagtgcgcgagttgagggagactgtgggagacttggaagcgatgaatgagatgaacgatgagctgcaggagaatgcacgtgagacagaactggagctgcgggagcagctggacatggcaggcgcgcgggttcgtgaggcccagaagcgtgtggaggcagcccaggagacggttgcagactaccagcagaccatcaagaagtaccgccagctgaccgcccatctacaggatgtgaatcgggaactgacaaaccagcaggaagcatctgtggagaggcaacagcagccacctccagagacctttgacttcaaaatcaagtttgctgagactaaggcccatgccaaggcaattgagatggaattgaggcagatggaggtggcccaggccaatcgacacatgtccctgctgacagccttcatgcctgacagcttccttcggccaggtggggaccatgactgcgttctggtgctgttgctcatgcctcgtctcatttgcaaggcagagctgatccggaagcaggcccaggagaagtttgaactaagtgagaactgttcagagcggcctgggctgcgaggagctgctggggagcaactcagctttgctgctggactggtgtactcgctgagcctgctgcaggccacgctacaccgctatgagcatgccctctctcagtgcagtgtggatgtgtataagaaagtgggcagcctgtaccctgagatgagtgcccatgagcgctccttggatttcctcattgaactgctgcacaaggatcagctggatgagactgtcaatgtggagcctctcaccaaggccatcaagtactatcagcatctgtacagcatccaccttgccgaacagcctgaggactgtactatgcagctggctgaccacattaagttcacgcagagtgctctggactgcatgagtgtggaggtaggacggctgcgtgccttcttgcagggtgggcaggaggctacagatattgccctcctgctccgggatctggaaacttcatgcagtgacatccgccagttctgcaagaagatccgaaggcgaatgccagggacagatgctcctgggatcccagctgcactggcctttggaccacaggtatctgacacgctcctagactgcaggaaacacttgacgtgggtcgtggctgtgctgcaggaggtggcagctgctgctgcccagctcattgccccactggcagagaatgaggggctacttgtggctgctctggaggaactggctttcaaagcaagcgagcaggtgggcctggatggctgggtagaaggtgtggggagagttagtgaccagtgtggggcttttacttctgcccttggctcctgcagatctatgggaccccctccagcagcccctatgagtgtctgcgccagtcatgcaacatcctcatcagtaccatgaacaagctggccacagccatgcaggagggggagtatgatgcagagcggccccccagcaagcctccaccggttgaactgcgggctgctgcccttcgtgcagagatcacagatgctgaaggcctgggtttgaagctcgaagatcgagagacagttattaaggagttgaagaagtcactcaagattaagggagaggagctaagtgaggccaatgtgcggctgagcctcctggagaagaagttggacagtgctgccaaggatgcagatgagcgcatcgagaaagtccagactcggctggaggagacccaggcactgctgcgaaagaaggagaaagagtttgaggagacaatggatgcactccaggctgacatcgaccagctggaggcagagaaggcagaactaaagcagcgtctgaacagccagtccaaacgcacgattgagggactccggggccctcctccttcaggcattgctactctggtctctggcattgctggtggagccatccctgggcaggctccagggtctgtgccaggcccagggctggtgaaggactcaccactgctgcttcagcagatctctgccatgaggctgcacatctcccagctccagcatgagaacagcatcctcaagggagcccagatgaaggcatccttggcatccctgccccctctgcatgttgcaaagctatcccatgagggccctggcagtgagttaccagctggagcgctgtatcgtaagaccagccagctgctggagacattgaatcaattgagcacacacacgcacgtagtagacatcactcgcaccagccctgctgccaagagcccgtcggcccaacttatggagcaagtggctcagcttaagtccctgagtgacaccgtcgagaagctcaaggatgaggtcctcaaggagacagtatctcagcgccctggagccacagtacccactgactttgccaccttcccttcatcagccttcctcagggccaaggaggagcagcaggatgacacagtctacatgggcaaagtgaccttctcatgtgcggctggttttggacagcgacaccggctggtgctgacccaggagcagctgcaccagcttcacagtcgcctcatctcctaagcactcctttcccctgctgtccccttcgaccctcagccctctggtgccgctctgcccgatgcacagccacctcagccagcccccaggtagaaacgtgggttaagctcttcctgccccgttcagcttcactcccaccctttcagcgtcctgccccttcaccttgacccgggttcccccactcccattccctggcctctgccataatttgttgttcaactgctccctccttcctgaggggcctcagggcttgtggggggtaggctgagaccccaccaccaaaggttaagtgaggtccccttgattgaggacttcaccccttgattaaagcaacttctgcttcagt

SEQ ID NO: 50136 - DNA, 4365 bp, Artificial Sequence
  derived and/or modified sequence
acagtgcgcgtgcgcttatcctgtcccaggtgtccagctttgtgcctgattgatgtaatcccggctgcggtcggtgcgcagttttcagtcagggctggactgcgggaaaagagggttcactcgacccagaacgcctctgggcctctgggccgaagggttctgggcggtcctggaagggtctggcggcgagtcgggcagcccacgagggcggggagggcggggccggccccgcagggtcttgggcgtcggtcgtcggtggggtcggagctgggcgcggagcccctcacagtgcagacgcccagcggcagcaggatgagtgcggaggcaagcgcccggcctctgcgggtgggctcccgtgtagaggtgattggaaaaggccaccgaggcactgtggcctatgttggagccacactgtttgccactggcaaatgggtaggcgtgattctggatgaagcaaagggcaaaaatgatggaactgttcaaggcaggaagtacttcacttgtgatgaagggcatggcatctttgtgcgccagtcccagatccaggtatttgaagatggagcagatactacttccccagagacacctgattcttctgcttcaaaagtcctcaaaagagagggaactgatacaactgcaaagactagcaaactgcccacgcgcccagccagtactggggtggctggggccagtagctccctgggcccctctggctcagcgtcagcaggtgagctgagcagcagtgagcccagcaccccggctcagactccgctggcagcacccatcatccccacgccggtcctcacctctcctggagcagtccccccgcttccttccccatccaaggaggaggagggactaagggctcaggtgcgggacctggaggagaaactagagaccctgagactgaaacgggcagaagacaaagcaaagctaaaagagctggagaaacacaaaatccagctggagcaggtgcaggaatggaagagcaaaatgcaggagcagcaggccgacctgcagcggcgcctcaaggaggcgagaaaggaagccaaggaggcgctggaggcaaaggaacgctatatggaggagatggctgatactgctgatgccattgagatggccactttggacaaggagatggctgaagagcgggctgagtccctgcagcaggaggtggaggcactgaaggagcgggtggacgagctcactactgacttagagatcctcaaggctgagattgaagagaagggctcagatggcgctgcatccagttatcagctcaagcagcttgaggagcagaatgcccgcctgaaggatgccctggtgaggatgcgggatctttcttcctcagagaagcaggagcatgtgaagctccagaagctcatggaaaagaagaaccaagagctggaagttgtgaggcaacagcgggagcgtctgcaggaggagctaagccaggcagagagcaccattgatgagctcaaggagcaggtggatgctgctctgggtgctgaggagatggtggagatgctgacagatcggaacctgaatctggaagagaaagtgcgcgagttgagggagactgtgggagacttggaagcgatgaatgagatgaacgatgagctgcaggagaatgcacgtgagacagaactggagctgcgggagcagctggacatggcaggcgcgcgggttcgtgaggcccagaagcgtgtggaggcagcccaggagacggttgcagactaccagcagaccatcaagaagtaccgccagctgaccgcccatctacaggatgtgaatcgggaactgacaaaccagcaggaagcatctgtggagaggcaacagcagccacctccagagacctttgacttcaaaatcaagtttgctgagactaaggcccatgccaaggcaattgagatggaattgaggcagatggaggtggcccaggccaatcgacacatgtccctgctgacagccttcatgcctgacagcttccttcggccaggtggggaccatgactgcgttctggtgctgttgctcatgcctcgtctcatttgcaaggcagagctgatccggaagcaggcccaggagaagtttgaactaagtgagaactgttcagagcggcctgggctgcgaggagctgctggggagcaactcagctttgctgctggactggtgtactcgctgagcctgctgcaggccacgctacaccgctatgagcatgccctctctcagtgcagtgtggatgtgtataagaaagtgggcagcctgtaccctgagatgagtgcccatgagcgctccttggatttcctcattgaactgctgcacaaggatcagctggatgagactgtcaatgtggagcctctcaccaaggccatcaagtactatcagcatctgtacagcatccaccttgccgaacagcctgaggactgtactatgcagctggctgaccacattaagttcacgcagagtgctctggactgcatgagtgtggaggtaggacggctgcgtgccttcttgcagggtgggcaggaggctacagatattgccctcctgctccgggatctggaaacttcatgcagtgacatccgccagttctgcaagaagatccgaaggcgaatgccagggacagatgctcctgggatcccagctgcactggcctttggaccacaggtatctgacacgctcctagactgcaggaaacacttgacgtgggtcgtggctgtgctgcaggaggtggcagctgctgctgcccagctcattgccccactggcagagaatgaggggctacttgtggctgctctggaggaactggctttcaaagcaagcgagcagatctatgggaccccctccagcagcccctatgagtgtctgcgccagtcatgcaacatcctcatcagtaccatgaacaagctggccacagccatgcaggagggggagtatgatgcagagcggccccccagcaagcctccaccggttgaactgcgggctgctgcccttcgtgcagagatcacagatgctgaaggcctgggtttgaagctcgaagatcgagagacagttattaaggagttgaagaagtcactcaagattaagggagaggagctaagtgaggccaatgtgcggctgagcctcctggagaagaagttggacagtgctgccaaggatgcagatgagcgcatcgagaaagtccagactcggctggaggagacccaggcactgctgcgaaagaaggagaaagagtttgaggagacaatggatgcactccaggctgacatcgaccagctggaggcagagaaggcagaactaaagcagcgtctgaacagccagtccaaacgcacgattgagggactccggggccctcctccttcaggcattgctactctggtctctggcattgctggtggagccatccctgggcaggctccagggtctgtgccaggcccagggctggtgaaggactcaccactgctgcttcagcagatctctgccatgaggctgcacatctcccagctccagcatgagaacagcatcctcaagggagcccagatgaaggcatccttggcatccctgccccctctgcatgttgcaaagctatcccatgagggccctggcagtgagttaccagctggagcgctgtatcgtaagaccagccagctgctggagacattgaatcaattgagcacacacacgcacgtagtagacatcactcgcaccagccctgctgccaagagcccgtcggcccaacttatggagcaagtggctcagcttaagtccctgagtgacaccgtcgagaagctcaaggatgaggtcctcaaggagacagtatctcagcgccctggagccacagtacccactgactttgccaccttcccttcatcagccttcctcagggccaaggaggagcagcaggatgacacagtctacatgggcaaagtgaccttctcatgtgcggctggttttggacagcgacaccggctggtgctgacccaggagcagctgcaccagcttcacagtcgcctcatctcctaagcactcctttcccctgctgtccccttcgaccctcagccctctggtgccgctctgcccgatgcacagccacctcagccagcccccaggtagaaacgtgggttaagctcttcctgccccgttcagcttcactcccaccctttcagcgtcctgccccttcaccttgacccgggttcccccactcccattccctggcctctgccataatttgttgttcaactgctccctccttcctgaggggcctcagggcttgtggggggtaggctgagaccccaccaccaaaggttaagtgaggtccccttgattgaggacttcaccccttgattaaagcaacttctgcttcag

SEQ ID NO: 50137 - DNA, 4024 bp, Artificial Sequence
  derived and/or modified sequence
atcagctggcaagcaggattctgtgtctctgggttcaggaatcctcaggcagcagaggggacttgctcctcagcccccatcactgcccccacccctacccgtgtaggccaccgagtgaggcccatggactggggagggctgtgcctgacgactcctgtgtccctctatgagggcccagcgccctgaccctcctgcctaggtttctaccttttctctctgtctttggccagctgggggagggggtagaggccgggtgagcaacatggcacagagcaagaggcacgtgtacagccggacgcccagcggcagcaggatgagtgcggaggcaagcgcccggcctctgcgggtgggctcccgtgtagaggtgattggaaaaggccaccgaggcactgtggcctatgttggagccacactgtttgccactggcaaatgggtaggcgtgattctggatgaagcaaagggcaaaaatgatggaactgttcaaggcaggaagtacttcacttgtgatgaagggcatggcatctttgtgcgccagtcccagatccaggtatttgaagatggagcagatactacttccccagagacacctgattcttctgcttcaaaagtcctcaaaagagagggaactgatacaactgcaaagactagcaaactgcccacgcgcccagccagtactggggtggctggggccagtagctccctgggcccctctggctcagcgtcagcaggtgagctgagcagcagtgagcccagcaccccggctcagactccgctggcagcacccatcatccccacgccggtcctcacctctcctggagcagtccccccgcttccttccccatccaaggaggaggagggactaagggctcaggtgcgggacctggaggagaaactagagaccctgagactgaaacgggcagaagacaaagcaaagctaaaagagctggagaaacacaaaatccagctggagcaggtgcaggaatggaagagcaaaatgcaggagcagcaggccgacctgcagcggcgcctcaaggaggcgagaaaggaagccaaggaggcgctggaggcaaaggaacgctatatggaggagatggctgatactgctgatgccattgagatggccactttggacaaggagatggctgaagagcgggctgagtccctgcagcaggaggtggaggcactgaaggagcgggtggacgagctcactactgacttagagatcctcaaggctgagattgaagagaagggctcagatggcgctgcatccagttatcagctcaagcagcttgaggagcagaatgcccgcctgaaggatgccctggtgaggatgcgggatctttcttcctcagagaagcaggagcatgtgaagctccagaagctcatggaaaagaagaaccaagagctggaagttgtgaggcaacagcgggagcgtctgcaggaggagctaagccaggcagagagcaccattgatgagctcaaggagcaggtggatgctgctctgggtgctgaggagatggtggagatgctgacagatcggaacctgaatctggaagagaaagtgcgcgagttgagggagactgtgggagacttggaagcgatgaatgagatgaacgatgagctgcaggagaatgcacgtgagacagaactggagctgcgggagcagctggacatggcaggcgcgcgggttcgtgaggcccagaagcgtgtggaggcagcccaggagacggttgcagactaccagcagaccatcaagaagtaccgccagctgaccgcccatctacaggatgtgaatcgggaactgacaaaccagcaggaagcatctgtggagaggcaacagcagccacctccagagacctttgacttcaaaatcaagtttgctgagactaaggcccatgccaaggcaattgagatggaattgaggcagatggaggtggcccaggccaatcgacacatgtccctgctgacagccttcatgcctgacagcttccttcggccaggtggggaccatgactgcgttctggtgctgttgctcatgcctcgtctcatttgcaaggcagagctgatccggaagcaggcccaggagaagtttgaactaagtgagaactgttcagagcggcctgggctgcgaggagctgctggggagcaactcagctttgctgctggactggtgtactcgctgagcctgctgcaggccacgctacaccgctatgagcatgccctctctcagtgcagtgtggatgtgtataagaaagtgggcagcctgtaccctgagatgagtgcccatgagcgctccttggatttcctcattgaactgctgcacaaggatcagctggatgagactgtcaatgtggagcctctcaccaaggccatcaagtactatcagcatctgtacagcatccaccttgccgaacagcctgaggactgtactatgcagctggctgaccacattaagttcacgcagagtgctctggactgcatgagtgtggaggtaggacggctgcgtgccttcttgcagggtgggcaggaggctacagatattgccctcctgctccgggatctggaaacttcatgcagtgacatccgccagttctgcaagaagatccgaaggcgaatgccagggacagatgctcctgggatcccagctgcactggcctttggaccacaggtatctgacacgctcctagactgcaggaaacacttgacgtgggtcgtggctgtgctgcaggaggtggcagctgctgctgcccagctcattgccccactggcagagaatgaggggctacttgtggctgctctggaggaactggctttcaaagcaagcgagcagatctatgggaccccctccagcagcccctatgagtgtctgcgccagtcatgcaacatcctcatcagtaccatgaacaagctggccacagccatgcaggagggggagtatgatgcagagcggccccccagcaagcctccaccggttgaactgcgggctgctgcccttcgtgcagagatcacagatgctgaaggcctgggtttgaagctcgaagatcgagagacagttattaaggagttgaagaagtcactcaagattaagggagaggagctaagtgaggccaatgtgcggctgagcctcctggagaagaagttggacagtgctgccaaggatgcagatgagcgcatcgagaaagtccagactcggctggaggagacccaggcactgctgcgaaagaaggagaaagagtttgaggagacaatggatgcactccaggctgacatcgaccagctggaggcagagaaggcagaactaaagcagcgtctgaacagccagtccaaacgcacgattgagggactccggggccctcctccttcaggcattgctactctggtctctggcattgctggtggagccatccctgggcaggctccagggtctgtgccaggcccagggctggtgaaggactcaccactgctgcttcagcagatctctgccatgaggctgcacatctcccagctccagcatgagaacagcatcctcaagggagcccagatgaaggcatccttggcatccctgccccctctgcatgttgcaaagctatcccatgagggccctggcagtgagttaccagctggagcgctgtatcgtaagaccagccagctgctggagacattgaatcaattgagcacacacacgcacgtagtagacatcactcgcaccagccctgctgccaagagcccgtcggcccaacttatggagcaagtggctcagcttaagtccctgagtgacaccgtcgagaagctcaaggatgaggtcctcaaggagacagtatctcagcgccctggagccacagtacccactgactttgccaccttcccttcatcagccttcctcagggccaaggaggagcagcaggatgacacagtctacatgggcaaagtgaccttctcatgtgcggctggttttggacagcgacaccggctggtgctgacccaggagcagctgcaccagcttcacagtcgcctcatctcctaa

SEQ ID NO: 50138 - protein, 1139 aa, Artificial Sequence
  derived and/or modified sequence
MMRQAPTARKTTTRRPKPTRPASTGVAGASSSLGPSGSASAGELSSSEPSTPAQTPLAAPIIPTPVLTSPGAVPPLPSPSKEEEGLRAQVRDLEEKLETLRLKRAEDKAKLKELEKHKIQLEQVQEWKSKMQEQQADLQRRLKEARKEAKEALEAKERYMEEMADTADAIEMATLDKEMAEERAESLQQEVEALKERVDELTTDLEILKAEIEEKGSDGAASSYQLKQLEEQNARLKDALVRMRDLSSSEKQEHVKLQKLMEKKNQELEVVRQQRERLQEELSQAESTIDELKEQVDAALGAEEMVEMLTDRNLNLEEKVRELRETVGDLEAMNEMNDELQENARETELELREQLDMAGARVREAQKRVEAAQETVADYQQTIKKYRQLTAHLQDVNRELTNQQEASVERQQQPPPETFDFKIKFAETKAHAKAIEMELRQMEVAQANRHMSLLTAFMPDSFLRPGGDHDCVLVLLLMPRLICKAELIRKQAQEKFELSENCSERPGLRGAAGEQLSFAAGLVYSLSLLQATLHRYEHALSQCSVDVYKKVGSLYPEMSAHERSLDFLIELLHKDQLDETVNVEPLTKAIKYYQHLYSIHLAEQPEDCTMQLADHIKFTQSALDCMSVEVGRLRAFLQGGQEATDIALLLRDLETSCSDIRQFCKKIRRRMPGTDAPGIPAALAFGPQVSDTLLDCRKHLTWVVAVLQEVAAAAAQLIAPLAENEGLLVAALEELAFKASEQIYGTPSSSPYECLRQSCNILISTMNKLATAMQEGEYDAERPPSKPPPVELRAAALRAEITDAEGLGLKLEDRETVIKELKKSLKIKGEELSEANVRLSLLEKKLDSAAKDADERIEKVQTRLEETQALLRKKEKEFEETMDALQADIDQLEAEKAELKQRLNSQSKRTIEGLRGPPPSGIATLVSGIAGGAIPGQAPGSVPGPGLVKDSPLLLQQISAMRLHISQLQHENSILKGAQMKASLASLPPLHVAKLSHEGPGSELPAGALYRKTSQLLETLNQLSTHTHVVDITRTSPAAKSPSAQLMEQVAQLKSLSDTVEKLKDEVLKETVSQRPGATVPTDFATFPSSAFLRAKEEQQDDTVYMGKVTFSCAAGFGQRHRLVLTQEQLHQLHSRLIS

SEQ ID NO: 50139 - DNA, 3420 bp, Artificial Sequence
  derived and/or modified sequence
atgatgaggcaggcacccactgcacgtaagacgaccaccagaaggccaaagccgacacgacccgccagcactggggtcgctggggcgtcttcatcactcggtcccagcggatctgcaagtgcaggagaactttcctcctccgagccttctacaccagcacagactccgctggcagcgccaattattccaactcctgtgctgacgtctcccggcgcagtgcccccgttacctagtcccagtaaagaggaagaggggctgcgagctcaggtcagagacctggaagaaaagctcgaaacgctcaggctgaagcgtgcggaagacaaagctaaactcaaggagctcgaaaagcacaaaatacagctcgaacaggtacaggaatggaagtccaagatgcaggagcagcaggctgacctccagcgaaggctgaaggaagcccgaaaggaagcaaaggaagccctcgaggctaaggaacgctatatggaggaaatggctgatacagcagatgcaatcgagatggccactctggacaaggagatggccgaggaacgtgcggaaagcctacagcaagaggtggaggcacttaaggaacgggtggacgaattgaccacagatttagaaattttaaaagccgagatagaagagaaaggctcagacggtgccgctagtagctatcagcttaagcagctggaggagcagaatgctagactcaaagacgctctggtgagaatgcgggatctcagctcttcagaaaaacaggagcatgtgaaattgcagaaactgatggagaagaagaaccaggagctcgaggtggttcgccagcagagggaacggcttcaggaggaactatcccaggccgagtcaaccatagacgagctgaaagagcaggtcgacgccgcacttggtgctgaggaaatggtggaaatgttaactgatcgcaatctgaatttagaggaaaaagttagagagcttagagagactgtcggggatctcgaagccatgaacgagatgaacgacgaactacaggagaatgcccgagaaactgagctggaactcagagaacagctggatatggccggtgcccgagtcagggaggcacaaaagcgcgtcgaggctgcccaggaaactgtcgccgactatcagcagacaatcaaaaagtacagacaattgactgcacacctgcaggatgttaatcgtgaactaacaaatcaacaggaggcaagtgtcgaaagacagcagcagccacctccagagactttcgatttcaaaattaaatttgccgaaaccaaggctcacgctaaagccatcgaaatggagctgcgtcagatggaggtagctcaggccaatcggcacatgagtctgctcacggcctttatgccagactccttcctccgccctggaggggatcacgattgtgttttggtactcttgctcatgccaagattgatttgtaaggccgagttaataagaaaacaagctcaggagaaatttgaactgtccgaaaactgcagcgagaggcccggcctgcgcggcgccgccggcgaacagctttcgtttgctgcaggccttgtgtacagtctctctctgctgcaggcaacattgcacaggtatgagcacgcactgagtcagtgctcagtcgacgtttacaaaaaagtgggtagcttgtatccggaaatgagcgctcacgaacgcagtcttgacttcctgatagaactgctgcataaagatcagctggacgaaacagttaacgtcgaaccactaactaaggctatcaagtactaccaacatttgtactccatacacctggccgaacagcccgaagactgcacgatgcagcttgccgaccatatcaagttcacgcaatctgccttagactgtatgagcgtggaggttgggaggcttagggccttcctgcaggggggtcaggaagcgacagacattgcactgctcctgcgggatctcgagacttcatgtagcgatatccgccagttttgtaagaaaattagacgtagaatgcccggcaccgatgctcccggcattccagctgcattggctttcggaccgcaggtgtcagatacactgctggactgccgaaagcatctaacttgggtagtggccgtgctgcaggaagtggccgctgccgcggcccaactgatcgcccccttagccgagaacgagggcctgctagtcgccgcccttgaggagctcgcctttaaagcttcagagcaaatatacggcacacccagctcttcaccttacgagtgcttgaggcagtcctgcaatattcttatctcaaccatgaacaaattagccacagctatgcaagaaggagaatatgatgctgaacgccctccaagtaagcctcccccagtcgagctaagggcagcggcactacgtgcagaaataacagacgctgagggtctcgggctaaaattggaagaccgcgaaaccgtcatcaaggaattgaagaagtcattaaagatcaaaggagaagagctctcagaagccaacgtgagactgtctctcctcgaaaaaaaattagactccgccgctaaagacgccgatgagcggatcgagaaagtacaaactaggctggaggaaactcaggccttgcttagaaagaaagagaaggagttcgaagaaactatggatgcccttcaggctgatatagaccagcttgaggccgaaaaagctgagctaaagcaacgcctgaacagccaaagcaagcgaacaattgagggtctgcggggtcccccacctagcggaatcgccacgttggtgagcggaatcgccggtggtgcaatccccgggcaggctccaggctccgtgcccggccccggactggtgaaggactcacccttactgctgcagcagattagtgccatgcgactgcacatttcacagctgcagcacgagaatagcattctgaaaggagctcaaatgaaagcctccttggcttcgctgcccccactacatgttgcgaagctgagccacgaggggcctggaagcgaattgccagccggtgcactttacagaaaaaccagccagctattagagaccttaaaccagctgtccacccacactcatgtggtggatataactcgcacaagtcccgcagctaaatctcctagcgcacagttaatggagcaagtggcacagctaaaaagtctgagcgatacagtggaaaagttgaaagatgaggtactgaaagagacagtttctcagcggcctggcgcaactgtgccaacagattttgccacgttcccgagcagtgccttcctgagggcaaaggaagagcagcaggatgacaccgtatatatggggaaagtgaccttctcatgtgccgcaggattcggccaacgccaccgcttggtgctgactcaagagcagttgcatcagctccattcccggctaatctcatag

SEQ ID NO: 50140 - DNA, 3420 bp, Artificial Sequence
  derived and/or modified sequence
atgatgaggcaggcccccacagccaggaagaccaccacccggcggcccaagcccaccaggcctgccagcactggagtggccggggccagcagcagcctgggccccagcggcagcgccagcgctggggagctgagcagcagcgagcccagcaccccagcccagacccccctggccgcccccatcatccccacccctgtgctgaccagccctggagctgtgccccccctgcccagccccagcaaggaggaggagggcctgcgggcccaggtgcgggacctggaggagaagctggagaccctgcggctgaagagagctgaggacaaggccaagctgaaggagctggagaagcacaagatccagctggagcaggtgcaggagtggaagagcaagatgcaggagcagcaggccgacctgcagaggcggctgaaggaggccaggaaggaggccaaggaggccctggaggccaaggagcgctacatggaggagatggctgacacagcagatgccatcgagatggccaccctggacaaggagatggccgaggagcgggcagagagcctgcagcaggaggtggaggccctgaaggagcgggtggatgagctgaccacagacctggagatcctgaaggccgagattgaggagaagggcagtgatggagctgccagcagctaccagctgaagcagctggaggagcagaatgcccggctgaaggatgccctggtgaggatgagggacctgagcagcagcgagaagcaggagcacgtgaagctgcagaagctgatggagaagaagaaccaggagctggaggtggtgcggcagcagcgggagcggctgcaggaggagctgagccaggccgagagcaccattgatgagctgaaggagcaggtggatgctgccctgggcgctgaggagatggtggagatgctgacagacaggaacctgaacctggaggagaaggtgcgggagctgcgggagaccgtgggggacctggaggccatgaatgagatgaatgatgagctgcaggagaatgcccgggagacagagctggagctgcgggagcagctggacatggccggggcccgggtgcgggaggcccagaagagggtggaggccgcccaggagaccgtggccgactaccagcagaccatcaagaagtaccggcagctgacagcccacctgcaggatgtgaaccgggagctgaccaaccagcaggaggcctctgtggagcggcagcagcagcccccacctgagacctttgacttcaagatcaagtttgctgagaccaaggcccacgccaaggccatcgagatggagctgcggcagatggaggtggcccaggccaacagacacatgagcctgctgacagccttcatgccagacagcttcctgcggcctggaggagaccatgactgtgtgctggtgctgctgctgatgcccaggctcatctgcaaggccgagctgatcaggaagcaggcccaggagaagtttgagctgtctgagaactgcagcgagcggcccggcctgcggggagctgctggggagcagctgagctttgctgctggcctggtgtacagcctgagcctgctgcaggccaccctgcacagatatgagcacgccctgagccagtgcagcgtggatgtgtacaagaaggtgggcagcctgtacccagagatgtctgcccacgagaggagcctggacttcctgattgagctgctgcacaaggaccagctggatgagaccgtgaatgtggagcccctgaccaaggccatcaagtactaccagcacctgtacagcatccacctggccgagcagcctgaggactgcaccatgcagctggccgaccacatcaagttcacccagagcgccctggactgcatgtctgtggaggtgggccgcctgcgggccttcctgcagggcggccaggaggccacagacatcgccctgctgctgcgggacctggagaccagctgcagcgacatccggcagttctgcaagaagatcagaagaaggatgcctggaacagatgcccctggcatcccagctgccctggccttcggcccccaggtgtctgacaccctgctggactgcaggaagcacctgacctgggtggtggccgtgctgcaggaggtggccgctgctgctgcccagctgattgcccccctggctgaaaatgaaggcctgctggtggccgccctggaggagctggccttcaaggccagcgagcagatctacggcacccccagcagcagcccctatgaatgtctgcggcagagctgcaacatcctgatcagcaccatgaacaagctggccacagccatgcaggagggggagtatgatgctgagaggcctcccagcaagcccccacctgtggagctgcgggctgctgccctgcgggcagagatcacagatgctgagggcctgggcctgaagctggaggaccgggagaccgtcatcaaggagctgaagaagagcctgaagatcaagggggaggagctgtctgaggccaacgtgcggctgagcctgctggagaagaagctggacagcgctgccaaggatgctgatgaaagaattgagaaggtgcagacccggctggaggagacccaggccctgctgaggaagaaggagaaggagtttgaggagaccatggatgccctgcaggccgacatcgaccagctggaggccgagaaggccgagctgaagcagaggctgaacagccagagcaagaggaccatcgagggcctgcggggccccccacccagcggcatcgccaccctggtgtctggaattgctgggggcgccatccctggccaggcccctggctctgtgcccggccctggcctggtgaaggacagccccctgctgctgcagcagatcagcgccatgaggctgcacatcagccagctgcagcatgaaaattccatcctgaagggggcccagatgaaggccagcctggccagcctgccccccctgcacgtggccaagctgagccatgagggccctggcagcgagctgcctgctggggccctgtacaggaagaccagccagctgctggagaccctgaaccagctgagcacccacacccacgtggtggacatcaccaggaccagccctgctgccaagagccccagcgcccagctgatggagcaggtggcccagctgaagagcctgagtgacacagtggagaagctgaaggatgaggtgctgaaggagaccgtgtcccagaggcctggggccaccgtgcccacagactttgccaccttccccagcagcgccttcctgcgggccaaggaggagcagcaggatgacacagtgtacatgggcaaggtgaccttcagctgtgccgccggcttcggccagaggcaccggctggtgctgacccaggagcagctgcaccagctgcacagccgcctcatctcctag

SEQ ID NO: 50141 - DNA, 3420 bp, Artificial Sequence
  derived and/or modified sequence
atgatgcggcaggcccccaccgcccggaagaccaccacccggcggcctaagcccaccaggccggcatcaactggcgtcgccggcgcaagtagctctctgggtcccagcggatccgccagtgccggcgaactgtcttcgtcagagccatctaccccggcacagacacccctggccgcccccattattccaacacccgtactgacttcaccaggtgctgtcccgcctcttccttctccatccaaagaggaagagggcttgcgggcgcaggtcagagatttggaggagaaattagagactttacggctcaaacgcgccgaagataaggccaaactgaaggaactcgaaaaacacaagattcagcttgaacaagtacaggagtggaagagtaaaatgcaggagcagcaggctgatctgcagaggcgcctgaaagaggctcgtaaagaagcgaaggaggctctggaggcgaaggaaagatacatggaggagatggccgacactgctgacgcaatagagatggccactttagataaggagatggccgaggagagagcagagagtctgcagcaggaagttgaggcactgaaggaaagggttgacgaactcaccacagacctggagattctcaaggctgaaatcgaggagaaaggcagcgacggcgctgcaagcagctaccagctgaagcaactcgaggagcagaacgcgcgcctgaaagatgccctagtcagaatgagagacctgagctcatccgaaaagcaagagcacgtgaaactgcagaaactgatggagaagaaaaaccaagagctcgaggtggtgcgccagcagagagagagactgcaagaggaactttctcaagccgagtcgacgatcgacgaattgaaggagcaggtcgacgctgctctgggagccgaggagatggttgagatgttaaccgaccggaacctgaatctggaggagaaagttcgcgaacttcgcgaaaccgtcggtgatcttgaggccatgaacgagatgaacgacgagctgcaggagaatgctagggaaaccgagttagaactgcgggaacagctagatatggcgggcgctagagttcgcgaagctcagaaacgagtggaggctgcacaggagacggtggctgactatcagcagactatcaagaaatataggcaacttacggcacatctgcaagatgtaaatagggaactgaccaaccagcaggaggccagtgttgagcgacagcagcagcccccgccggagacatttgactttaagatcaagtttgctgagaccaaggcacatgccaaagccattgaaatggagctccgccagatggaagtggcccaggctaaccggcatatgtccctcttaactgcctttatgcccgacagcttcttacgtcctggtggcgaccatgattgtgtgctggtgttgcttctcatgccccgactgatctgcaaggccgagctgatccgcaagcaggctcaggaaaaatttgagctgtcggagaattgcagcgaaaggcccggcctgaggggcgctgctggggaacaattgtcttttgccgctggcctggtgtactctttgtctctccttcaggcgacattgcacagatacgaacatgccctgagtcaatgcagcgtagacgtctacaaaaaggtcggatctctgtatccggagatgtcagcacatgaaagatccttggattttctaattgaactgctgcataaggatcagctggatgaaaccgtgaacgttgagccattaacaaaggcgattaagtactatcaacacctttactctattcatctggctgagcagccagaggattgtaccatgcagcttgcagatcatatcaagttcacccagagtgctctggactgcatgtcagtagaagtgggacgcctgagggcttttctccaggggggacaggaggccactgatattgctctgctgctgcgtgacttagagacttcctgctccgatatccggcagttttgtaaaaagatccgccggaggatgcccggcaccgacgcccctggcataccggctgcgctcgccttcgggccccaggtctccgacacattgcttgattgtcgaaaacaccttacttgggtggtggctgttttgcaagaggtcgccgctgccgccgctcagctaatcgcccccttagccgagaacgaagggctgttagtagccgccttggaagagttggccttcaaagctagcgagcagatctatggcaccccctcatcttcaccttacgaatgcctcagacaatcatgcaatatcctcatttccaccatgaataaactggctaccgccatgcaggagggcgagtacgatgccgaaaggccacctagcaagcccccacctgtagagctgagagctgccgccctgagagccgagatcacagacgccgaggggctcggcctgaagttggaggacagggagaccgtgatcaaggaactgaagaagagcctgaaaattaaaggtgaggaattgagcgaagctaatgtccgtttgtctctgctcgaaaagaagcttgactccgcggccaaagatgccgacgagcggattgagaaagtacagaccaggctggaggagacacaggcactcctgcgaaagaaggagaaggaattcgaggaaacaatggacgcgttacaagccgatatcgaccagctggaagccgagaaggccgaactgaaacagcggcttaacagtcagtcaaagcgaactattgaagggctacgggggccgccgccttcaggaattgctacacttgtgagtggaattgccgggggggctatccccggtcaagcccccggttcagtccccggacctgggctcgtcaaagatagccccctgctccttcagcagatctccgctatgcgtcttcatatttcacagctccagcatgagaattctattttgaagggggcccagatgaaggcatctctggcgtctcttcccccactacacgtagccaagctgagtcatgagggccccggcagtgagctccccgctggtgctttgtataggaagacttcccagctcctcgagacccttaaccagcttagcacccacacccatgtagtggacattacacggacatcccccgcagccaagtccccatcggctcaattaatggaacaggttgcccagctgaagtccctgtccgataccgtcgagaaactgaaagatgaggtgctcaaggagacggtctcccagcgccctggagcaaccgtgccaacagacttcgcgacgttcccatcctccgccttcctacgcgccaaggaggaacagcaggacgacactgtttacatgggcaaggtcaccttctcttgcgcagctggatttgggcagagacatcggttggtgctcactcaggagcaactgcaccagttgcatagtagacttatttcctag

SEQ ID NO: 50142 - DNA, 3420 bp, Artificial Sequence
  derived and/or modified sequence
atgatgcggcaggcacccaccgcacgcaaaacaaccactaggaggcccaagccaacgagacccgcaagtacaggagtggcaggtgcaagctcttcactggggcctagcgggagtgcatcggcaggagagctgtcctctagtgaaccgtcaaccccggctcagacgcccctcgcagcccctataatccctacccccgtgctgactagcccaggtgcagtgcctccgctcccatctccttcgaaggaagaagagggcctacgagcacaggtaagagatctagaggagaagctggagacactgaggctgaaaagggccgaagacaaagctaagttgaaagaacttgagaagcataaaatccaattagagcaagtccaagaatggaagtcgaagatgcaggaacaacaggccgacctgcaacggaggctcaaggaagctcgtaaggaagccaaagaggcgctggaagcaaaggaaagatacatggaggagatggcagacaccgccgatgcgatcgagatggcaacccttgacaaagaaatggccgaagagcgcgctgagagtctgcagcaggaagtcgaggctctgaaagagcgagtggacgagctcacaaccgatctagagattctgaaggccgaaattgaggagaaagggagcgatggggctgcctcgagctaccaattgaaacaacttgaggaacagaacgcccgtctgaaggacgctctggtgcgcatgcgggacctctcttcctcagagaagcaggaacatgtgaaactgcagaaactaatggagaagaagaaccaggaattggaggtggtgcggcaacaaagagaacggctgcaggaggagttgtctcaggctgaatctacaattgacgagcttaaagagcaagtggatgccgctttaggcgctgaggagatggtggagatgttgacagataggaatctgaacttagaggaaaaggttcgcgagctaagagaaacggtaggagatctggaggcaatgaacgagatgaatgacgagcttcaagaaaatgccagggagactgagctcgagctacgggaacaactggacatggccggagcaagggtaagagaggcgcagaaacgggtagaagcagcacaggagacagtggccgattatcagcaaactattaaaaagtaccggcaactgacggcccaccttcaagacgtcaaccgcgaactcactaatcaacaggaggccagcgtagagcggcagcagcagccacccccagagacgttcgatttcaaaattaagttcgccgagacaaaggcccacgcaaaggccatcgagatggaacttcgccagatggaggtcgcacaagccaacagacacatgagtctgctaaccgctttcatgcccgattctttcctgcgccctgggggagatcacgactgcgtgcttgtgctcctactaatgccacgattaatctgtaaggctgagctgatccgtaagcaggcccaggagaaattcgagttgagcgaaaactgttccgaaagacctggcctgaggggggcagccggagaacagttgtctttcgcggcagggctagtgtattccctgtctctgttacaggccacattgcaccgatacgagcacgctctcagccaatgctcggtagacgtgtacaaaaaagttggctctctatatcctgagatgtccgcccacgagcgctcattggatttcctgattgaattgttgcacaaagaccaacttgacgaaactgttaatgttgagcccctgacaaaagcaattaagtactaccagcatctgtacagtattcatctggctgaacagcctgaggactgtactatgcaactggccgaccacatcaagtttactcaatccgccctcgattgcatgtcagtggaagtggggcgactgcgcgcatttctccagggagggcaggaagccaccgatattgcgctgctgcttcgtgatctagaaacttcttgcagcgacattaggcaattctgcaagaaaatacgcagacggatgccaggcacagacgctcccggaattcctgctgcacttgccttcggcccacaggtgagtgacacccttctggactgtcggaaacacctcacttgggttgtggctgtcttacaggaggtagctgccgctgcagcacaattgatcgctccccttgctgaaaacgaaggactgctggttgccgctttggaagaactggcatttaaggcgagtgaacaaatatatggcacaccaagctcgtcaccgtatgaatgtttgcgtcagtcttgcaacattctcatttctaccatgaacaaactagccaccgccatgcaggaaggtgaatatgatgcagagcggcctcccagtaaacccccacctgtggagctgagggcagctgccttaagggccgagataactgacgccgagggcctgggtttaaagttggaagacagagagactgtaatcaaagagctcaagaaaagtttaaagatcaagggcgaagaactgtctgaggccaacgtgcgcctgagcctgctggagaaaaagttagattctgcggcaaaggatgctgacgagcgaatcgaaaaggttcagacaagacttgaagagacgcaggctcttctcagaaagaaggagaaggaattcgaggagactatggacgcccttcaagccgacatcgaccagttggaagccgaaaaggccgaattgaagcagcggttaaattctcagagtaaaagaacgattgaagggctgagggggcctcctccctccggaatcgccactcttgttagcggtatcgccggtggcgcaatccccggacaggccccaggatccgtgccagggcctggcctggtcaaagattcacccctgctcttgcagcagatcagtgctatgcgtctgcatattagccagctacaacacgagaactcaatcctgaagggggctcagatgaaagcgtctctggcgtcacttcctcctctccacgtggccaagctgtcccatgagggtccaggaagcgagctgccagctggcgcactttatcgaaagacgtcacagttactggagaccctcaaccagctgtcaacccatacccacgtggtggacatcacacggacctctcctgccgcaaaatccccatcagctcagttgatggaacaggtggctcagctaaaatccctgtccgatactgtggagaagctaaaggatgaagtgctgaaagagactgtttcccagagaccaggcgcaaccgtccctaccgacttcgcaacattccccagctctgccttcctaagagccaaagaagaacagcaggatgatacagtgtacatgggaaaggtcacctttagttgcgcggctggattcgggcagaggcacagacttgtactcactcaggagcagctgcaccagctgcatagcaggctgatctcctag

SEQ ID NO: 50143 - DNA, 3420 bp, Artificial Sequence
  derived and/or modified sequence
atgatgagacaggcccccaccgccagaaagaccaccaccagaagacccaagcccaccagacccgccagcaccggcgtggccggcgccagcagcagcctgggccccagcggcagcgccagcgccggcgagctgagcagcagcgagcccagcacccccgcccagacccccctggccgcccccatcatccccacccccgtgctgaccagccccggcgccgtgccccccctgcccagccccagcaaggaggaggagggcctgagagcccaggtgagagacctggaggagaagctggagaccctgagactgaagagagccgaggacaaggccaagctgaaggagctggagaagcacaagatccagctggagcaggtgcaggagtggaagagcaagatgcaggagcagcaggccgacctgcagagaagactgaaggaggccagaaaggaggccaaggaggccctggaggccaaggagagatacatggaggagatggccgacaccgccgacgccatcgagatggccaccctggacaaggagatggccgaggagagagccgagagcctgcagcaggaggtggaggccctgaaggagagagtggacgagctgaccaccgacctggagatcctgaaggccgagatcgaggagaagggcagcgacggcgccgccagcagctaccagctgaagcagctggaggagcagaacgccagactgaaggacgccctggtgagaatgagagacctgagcagcagcgagaagcaggagcacgtgaagctgcagaagctgatggagaagaagaaccaggagctggaggtggtgagacagcagagagagagactgcaggaggagctgagccaggccgagagcaccatcgacgagctgaaggagcaggtggacgccgccctgggcgccgaggagatggtggagatgctgaccgacagaaacctgaacctggaggagaaggtgagagagctgagagagaccgtgggcgacctggaggccatgaacgagatgaacgacgagctgcaggagaacgccagagagaccgagctggagctgagagagcagctggacatggccggcgccagagtgagagaggcccagaagagagtggaggccgcccaggagaccgtggccgactaccagcagaccatcaagaagtacagacagctgaccgcccacctgcaggacgtgaacagagagctgaccaaccagcaggaggccagcgtggagagacagcagcagcccccccccgagaccttcgacttcaagatcaagttcgccgagaccaaggcccacgccaaggccatcgagatggagctgagacagatggaggtggcccaggccaacagacacatgagcctgctgaccgccttcatgcccgacagcttcctgagacccggcggcgaccacgactgcgtgctggtgctgctgctgatgcccagactgatctgcaaggccgagctgatcagaaagcaggcccaggagaagttcgagctgagcgagaactgcagcgagagacccggcctgagaggcgccgccggcgagcagctgagcttcgccgccggcctggtgtacagcctgagcctgctgcaggccaccctgcacagatacgagcacgccctgagccagtgcagcgtggacgtgtacaagaaggtgggcagcctgtaccccgagatgagcgcccacgagagaagcctggacttcctgatcgagctgctgcacaaggaccagctggacgagaccgtgaacgtggagcccctgaccaaggccatcaagtactaccagcacctgtacagcatccacctggccgagcagcccgaggactgcaccatgcagctggccgaccacatcaagttcacccagagcgccctggactgcatgagcgtggaggtgggcagactgagagccttcctgcagggcggccaggaggccaccgacatcgccctgctgctgagagacctggagaccagctgcagcgacatcagacagttctgcaagaagatcagaagaagaatgcccggcaccgacgcccccggcatccccgccgccctggccttcggcccccaggtgagcgacaccctgctggactgcagaaagcacctgacctgggtggtggccgtgctgcaggaggtggccgccgccgccgcccagctgatcgcccccctggccgagaacgagggcctgctggtggccgccctggaggagctggccttcaaggccagcgagcagatctacggcacccccagcagcagcccctacgagtgcctgagacagagctgcaacatcctgatcagcaccatgaacaagctggccaccgccatgcaggagggcgagtacgacgccgagagaccccccagcaagcccccccccgtggagctgagagccgccgccctgagagccgagatcaccgacgccgagggcctgggcctgaagctggaggacagagagaccgtgatcaaggagctgaagaagagcctgaagatcaagggcgaggagctgagcgaggccaacgtgagactgagcctgctggagaagaagctggacagcgccgccaaggacgccgacgagagaatcgagaaggtgcagaccagactggaggagacccaggccctgctgagaaagaaggagaaggagttcgaggagaccatggacgccctgcaggccgacatcgaccagctggaggccgagaaggccgagctgaagcagagactgaacagccagagcaagagaaccatcgagggcctgagaggccccccccccagcggcatcgccaccctggtgagcggcatcgccggcggcgccatccccggccaggcccccggcagcgtgcccggccccggcctggtgaaggacagccccctgctgctgcagcagatcagcgccatgagactgcacatcagccagctgcagcacgagaacagcatcctgaagggcgcccagatgaaggccagcctggccagcctgccccccctgcacgtggccaagctgagccacgagggccccggcagcgagctgcccgccggcgccctgtacagaaagaccagccagctgctggagaccctgaaccagctgagcacccacacccacgtggtggacatcaccagaaccagccccgccgccaagagccccagcgcccagctgatggagcaggtggcccagctgaagagcctgagcgacaccgtggagaagctgaaggacgaggtgctgaaggagaccgtgagccagagacccggcgccaccgtgcccaccgacttcgccaccttccccagcagcgccttcctgagagccaaggaggagcagcaggacgacaccgtgtacatgggcaaggtgaccttcagctgcgccgccggcttcggccagagacacagactggtgctgacccaggagcagctgcaccagctgcacagcagactgatcagctag

SEQ ID NO: 50144 - DNA, 4145 bp, Artificial Sequence
  derived and/or modified sequence
agtggctccacccccatggagcagaggagggtgggtgcatgacgtcaggtggagctggtgctgcggccactgaggctgccatcagcctaagctggtgaactgggccaggcaccgctccggtgcctgccggagcctggcgatccagctgcacgtctgcgggggcctctgtgtcagagcggcggccgtttgcaggctgggaagctgccgcaccgggaggctgagactgcattgttgggatttgatgcactaatctcctgtctccgccgcctttccctctgttcggtctcttgccctccctcccttcgtctgtccttcctccgtgtgtttgtctatcctcctctgtccctcctctttcctctccttgctttctttggttttctgcaatgatgagacaggcaccgacagcccgaaagaccacaactcggcgacccaagcccacgcgcccagccagtactggggtggctggggccagtagctccctgggcccctctggctcagcgtcagcaggtgagctgagcagcagtgagcccagcaccccggctcagactccgctggcagcacccatcatccccacgccggtcctcacctctcctggagcagtccccccgcttccttccccatccaaggaggaggagggactaagggctcaggtgcgggacctggaggagaaactagagaccctgagactgaaacgggcagaagacaaagcaaagctaaaagagctggagaaacacaaaatccagctggagcaggtgcaggaatggaagagcaaaatgcaggagcagcaggccgacctgcagcggcgcctcaaggaggcgagaaaggaagccaaggaggcgctggaggcaaaggaacgctatatggaggagatggctgatactgctgatgccattgagatggccactttggacaaggagatggctgaagagcgggctgagtccctgcagcaggaggtggaggcactgaaggagcgggtggacgagctcactactgacttagagatcctcaaggctgagattgaagagaagggctcagatggcgctgcatccagttatcagctcaagcagcttgaggagcagaatgcccgcctgaaggatgccctggtgaggatgcgggatctttcttcctcagagaagcaggagcatgtgaagctccagaagctcatggaaaagaagaaccaagagctggaagttgtgaggcaacagcgggagcgtctgcaggaggagctaagccaggcagagagcaccattgatgagctcaaggagcaggtggatgctgctctgggtgctgaggagatggtggagatgctgacagatcggaacctgaatctggaagagaaagtgcgcgagttgagggagactgtgggagacttggaagcgatgaatgagatgaacgatgagctgcaggagaatgcacgtgagacagaactggagctgcgggagcagctggacatggcaggcgcgcgggttcgtgaggcccagaagcgtgtggaggcagcccaggagacggttgcagactaccagcagaccatcaagaagtaccgccagctgaccgcccatctacaggatgtgaatcgggaactgacaaaccagcaggaagcatctgtggagaggcaacagcagccacctccagagacctttgacttcaaaatcaagtttgctgagactaaggcccatgccaaggcaattgagatggaattgaggcagatggaggtggcccaggccaatcgacacatgtccctgctgacagccttcatgcctgacagcttccttcggccaggtggggaccatgactgcgttctggtgctgttgctcatgcctcgtctcatttgcaaggcagagctgatccggaagcaggcccaggagaagtttgaactaagtgagaactgttcagagcggcctgggctgcgaggagctgctggggagcaactcagctttgctgctggactggtgtactcgctgagcctgctgcaggccacgctacaccgctatgagcatgccctctctcagtgcagtgtggatgtgtataagaaagtgggcagcctgtaccctgagatgagtgcccatgagcgctccttggatttcctcattgaactgctgcacaaggatcagctggatgagactgtcaatgtggagcctctcaccaaggccatcaagtactatcagcatctgtacagcatccaccttgccgaacagcctgaggactgtactatgcagctggctgaccacattaagttcacgcagagtgctctggactgcatgagtgtggaggtaggacggctgcgtgccttcttgcagggtgggcaggaggctacagatattgccctcctgctccgggatctggaaacttcatgcagtgacatccgccagttctgcaagaagatccgaaggcgaatgccagggacagatgctcctgggatcccagctgcactggcctttggaccacaggtatctgacacgctcctagactgcaggaaacacttgacgtgggtcgtggctgtgctgcaggaggtggcagctgctgctgcccagctcattgccccactggcagagaatgaggggctacttgtggctgctctggaggaactggctttcaaagcaagcgagcagatctatgggaccccctccagcagcccctatgagtgtctgcgccagtcatgcaacatcctcatcagtaccatgaacaagctggccacagccatgcaggagggggagtatgatgcagagcggccccccagcaagcctccaccggttgaactgcgggctgctgcccttcgtgcagagatcacagatgctgaaggcctgggtttgaagctcgaagatcgagagacagttattaaggagttgaagaagtcactcaagattaagggagaggagctaagtgaggccaatgtgcggctgagcctcctggagaagaagttggacagtgctgccaaggatgcagatgagcgcatcgagaaagtccagactcggctggaggagacccaggcactgctgcgaaagaaggagaaagagtttgaggagacaatggatgcactccaggctgacatcgaccagctggaggcagagaaggcagaactaaagcagcgtctgaacagccagtccaaacgcacgattgagggactccggggccctcctccttcaggcattgctactctggtctctggcattgctggtggagccatccctgggcaggctccagggtctgtgccaggcccagggctggtgaaggactcaccactgctgcttcagcagatctctgccatgaggctgcacatctcccagctccagcatgagaacagcatcctcaagggagcccagatgaaggcatccttggcatccctgccccctctgcatgttgcaaagctatcccatgagggccctggcagtgagttaccagctggagcgctgtatcgtaagaccagccagctgctggagacattgaatcaattgagcacacacacgcacgtagtagacatcactcgcaccagccctgctgccaagagcccgtcggcccaacttatggagcaagtggctcagcttaagtccctgagtgacaccgtcgagaagctcaaggatgaggtcctcaaggagacagtatctcagcgccctggagccacagtacccactgactttgccaccttcccttcatcagccttcctcagggccaaggaggagcagcaggatgacacagtctacatgggcaaagtgaccttctcatgtgcggctggttttggacagcgacaccggctggtgctgacccaggagcagctgcaccagcttcacagtcgcctcatctcctaagcactcctttcccctgctgtccccttcgaccctcagccctctggtgccgctctgcccgatgcacagccacctcagccagcccccaggtagaaacgtgggttaagctcttcctgccccgttcagcttcactcccaccctttcagcgtcctgccccttcaccttgacccgggttcccccactcccattccctggcctctgccataatttgttgttcaactgctccctccttcctgaggggcctcagggcttgtggggggtaggctgagaccccaccaccaaaggttaagtgaggtccccttgattgaggacttcaccccttgattaaagcaacttctgcttcag

SEQ ID NO: 50145 - protein, 242 aa, Artificial Sequence
  derived and/or modified sequence
MSDSKCDSQFYSVQVADSTFTVLKRYQQLKPIGSGAQGIVCAAFDTVLGINVAVKKLSRPFQNQTHAKRAYRELVLLKCVNHKNIISLLNVFTPQKTLEEFQDVYLVMELMDANLCQVIHMELDHERMSYLLYQMLCGIKHLHSAGIIHRDLKPSNIVVKSDCTLKILDFGLARTACTNFMMTPYVVTRYYRAPEVILGMGYKENVDIWSVGCIMGELVKGCVIFQGTDRILPRDLGPAMLS

SEQ ID NO: 50146 - DNA, 729 bp, Artificial Sequence
  derived and/or modified sequence
atgtcagatagcaagtgcgactcgcagttttattctgtgcaggtcgccgactcgacttttactgtgcttaagcgctatcaacagctcaagccgattgggtcgggcgcccagggcattgtgtgtgccgccttcgacacggtattaggcatcaatgtggccgtgaaaaagctgagcaggccttttcagaatcagacccacgctaaacgggcctacagagaattggtattactcaagtgcgttaatcacaagaatatcatttccttgctcaacgtgtttactcctcaaaagacactggaggaatttcaggatgtgtatttggtgatggagttgatggacgctaacctgtgccaagtgattcacatggaactggaccatgaaaggatgagttacctgttgtatcagatgttgtgtggtatcaaacaccttcactcagccgggatcatccaccgagacttgaagccatctaatattgtagtgaagagcgattgtaccttgaagatccttgactttggtctagccaggacagcctgcactaatttcatgatgacaccatacgtggtgaccagatattaccgagctcccgaggtgatcctggggatgggatacaaagagaatgtagatatctggtcggtaggctgcattatgggggaactggtcaaaggatgcgtaatttttcaaggtaccgataggattctgccaagggatctgggccccgcgatgctgtcatag

SEQ ID NO: 50147 - DNA, 729 bp, Artificial Sequence
  derived and/or modified sequence
atgtctgacagcaaatgtgacagccagttctacagcgtgcaggtggccgacagcaccttcaccgtgctgaagcgctaccagcagctgaagcccatcggcagcggggcccagggcatcgtgtgtgccgcctttgacacagtgctgggcatcaacgtggccgtgaagaagctgagccggcccttccagaaccagacccacgccaagagggcctaccgggagctggtgctgctgaagtgtgtgaaccacaagaacatcatcagcctgctgaatgtgttcaccccccagaagaccctggaggagttccaggatgtgtacctggtgatggagctgatggatgccaacctgtgccaggtgatccacatggagctggaccacgagaggatgagctacctgctgtaccagatgctgtgtggcatcaagcacctgcacagcgctggcatcatccaccgggacctgaagcccagcaacatcgtggtgaagagtgactgcaccctgaagatcctggactttggcctggccaggacagcctgcaccaacttcatgatgaccccctacgtggtgacccgctactaccgggcccctgaggtgatcctgggcatgggctacaaggaaaatgtggacatctggagcgtgggctgcatcatgggagagctggtgaagggctgcgtcatcttccagggcacagaccgcatcctgccccgggacctgggccctgccatgctgtcctag

SEQ ID NO: 50148 - DNA, 2266 bp, Artificial Sequence
  derived and/or modified sequence
ggagcggagcggggcgggccggcggcggagccggggccgcggagccaggagtgactagcacgcagcgccgccagtccgcccgcccgccctctccccgtggcgcggcggcggggaggcgagggatctgaaacttgcccacccttcgggatattgcaggacgctgcatcatgagcgacagtaaatgtgacagtcagttttatagtgtgcaagtggcagactcaaccttcactgtcctaaaacgttaccagcagctgaaaccaattggctctggggcccaagggattgtttgtgctgcatttgatacagttcttgggataaatgttgcagtcaagaaactaagccgtccttttcagaaccaaactcatgcaaagagagcttatcgtgaacttgtcctcttaaaatgtgtcaatcataaaaatataattagtttgttaaatgtgtttacaccacaaaaaactctagaagaatttcaagatgtgtatttggttatggaattaatggatgctaacttatgtcaggttattcacatggagctggatcatgaaagaatgtcctaccttctttaccagatgctttgtggtattaaacatctgcattcagctggtataattcatagagatttgaagcctagcaacattgttgtgaaatcagactgcaccctgaagatccttgactttggcctggcccggacagcgtgcactaacttcatgatgaccccttacgtggtgacacggtactaccgggcgcccgaagtcatcctgggtatgggctacaaagagaacgttgatatctggtcagtgggttgcatcatgggagagctggtgaaaggttgtgtgatattccaaggcactgaccgtatccttccccgcgaccttggccccgccatgctttcttaatgcctcaggcagcatgaccacctgcttacacgagcgctcacgaggacaaagtcgtaaaatccactccagactgtgttctaaggggggctttactgtatttgttaattagtgtcacaagccaagtggttcaatttcattctttatttttaacttgactacctgtgatgactttgagacttagagttcagttaaaccgattatattagctcttaattttgccaaaaatagctggacacatagaagaaattatttactctttgataagtatattctgatatttaaatgaaaatactgtattatttagtttattccgttaatttaactaggaaagatgctatctaaatttaataggctagtgtgcttgtgtgctttaattaagtactattttgttagttactggtatgcattgaaatattttcccccaaagtaagaactgaagcacattacaaaggacctaagtgaaagagattaaaatgaaaattttgtgaggaacaatatgttaaactttcttgtttgttactgtgctgacattttgtagaattttttttaaaaatctgtctagtgggttattttgtgacacactggggaagtcaaaataaatgtaaaatgaaagagataaactcatactgtagtcagcaagtcatgttagagatacagcagaaaggagaataactactctaattgttacaatagccttctttcctcatttgccattcttccatcctcagtattttttaccctaacatggttcttcacatcttccctttttcatttgtgttttaaccacttagtttttcattagtctttgactttgttttcgttatgaaagtttaaattggtctccatccttgggcagattgatggttgcttttaaggaaatcaagctccatagtcagtgttttgtatgtatcttaggaaaataatttcagattttaataattttatcaaagtggtctccttataaattcttcacagtgcaaacttaaagtgaaaatatttttatttctctcattttatttacctttctttacattttctatatcatagattatataatatgtcaagttattttatttgttctactaaattttctagcagtttccatagcctcatctcagattcacttgttgcaacctataaataaggacgtctttattttgcaagtaaacttaattaaaaagggaaaagttgaaaaattaaaagactaataatttagaaatatctacttaatgttcagtttgtctcaattcttactcattttgtgccattccttgttttattacaaaatgttttcttcaaaaagtacaaaaatgaaaaatgtgagtactttttggtgcattttagtaagtaaaattaaaattcctgctata

SEQ ID NO: 50149 - DNA, 1668 bp, Artificial Sequence
  derived and/or modified sequence
atattgcaggacgctgcatcatgagcgacagtaaatgtgacagtcagttttatagtgtgcaagtggcagactcaaccttcactgtcctaaaacgttaccagcagctgaaaccaattggctctggggcccaagggattgtttgtgctgcatttgatacagttcttgggataaatgttgcagtcaagaaactaagccgtccttttcagaaccaaactcatgcaaagagagcttatcgtgaacttgtcctcttaaaatgtgtcaatcataaaaatataattagtttgttaaatgtgtttacaccacaaaaaactctagaagaatttcaagatgtgtatttggttatggaattaatggatgctaacttatgtcaggttattcacatggagctggatcatgaaagaatgtcctaccttctttaccagatgctttgtggtattaaacatctgcattcagctggtataattcatagagatttgaagcctagcaacattgttgtgaaatcagactgcaccctgaagatccttgactttggcctggcccggacagcgtgcactaacttcatgatgaccccttacgtggtgacacggtactaccgggcgcccgaagtcatcctgggtatgggctacaaagagaacgctataaagtattggactctttggcactaaaaccccagattgctacaaaccgaaggctaaaatagagttgatatctggtcagtgggttgcatcatgggagagctggtgaaaggttgtgtgatattccaaggcactgaccgtatccttccccgcgaccttggccccgccatgctttcttaatgcctcaggcagcatgaccacctgcttacacgagcgctcacgaggacaaagtcgtaaaatccactccagactgtgttctaaggggggctttactgtatttgttaattagtgtcacaagccaagtggttcaatttcattctttatttttaacttgactacctgtgatgactttgagacttagagttcagttaaaccgattatattagctcttaattttgccaaaaatagctggacacatagaagaaattatttactctttgataagtatattctgatatttaaatgaaaatactgtattatttagtttattccgttaatttaactaggaaagatgctatctaaatttaataggctagtgtgcttgtgtgctttaattaagtactattttgttagttactggtatgcattgaaatattttcccccaaagtaagaactgaagcacattacaaaggacctaagtgaaagagattaaaatgaaaattttgtgaggaacaatatgttaaactttcttgtttgttactgtgctgacattttgtagaattttttttaaaaatctgtctagtgggttattttgtgacacactggggaagtcaaaataaatgtaaaatgaaagagataaactcatactgtagtcagcaagtcatgttagagatacagcagaaaggagaataactactctaattgttacaatagccttctttcctcatttgccattcttccatcctcagtattttttaccctaacatggttcttcacatcttccctttttcatttgtgttttaaccacttagtttttcattagtctttgactttgttttcgttatgaaagtttaaattggtctccatccttggg

SEQ ID NO: 50150 - DNA, 729 bp, Artificial Sequence
  derived and/or modified sequence
atgagcgacagcaagtgcgacagccagttctacagcgtgcaggtggcagactccactttcaccgtcctgaaacggtatcagcagctcaagcctatcgggagtggggcacaggggatcgtgtgcgcagcctttgacactgtgcttggcattaacgtggctgttaagaaattgagtagaccattccaaaaccagacacacgctaagcgtgcttatcgtgagctggtactgctcaaatgtgtaaaccacaagaacatcataagcctgttgaacgttttcactccccagaaaactcttgaagaattccaagacgtttatctggtcatggagctcatggacgctaacctatgccaagtgatccatatggaactagaccacgaacgcatgtcttatctgctgtaccaaatgctctgcggaatcaagcacctccatagtgcaggaattatccacagagacttgaagcctagcaacatcgtggttaaaagcgactgcacacttaaaatattggacttcggcctggcgaggaccgcttgtacgaactttatgatgactccttacgtggtaacccggtactatcgcgctcctgaagtcatccttgggatggggtacaaggaaaatgtggatatttggtccgttggctgtattatgggtgagctggttaaagggtgcgtaatctttcaggggacggacaggattcttccgagagatctcggtccagctatgttgtcttag

SEQ ID NO: 50151 - DNA, 729 bp, Artificial Sequence
  derived and/or modified sequence
atgtcggactcaaagtgcgactcacaattttactccgtgcaggtggccgactccactttcactgtgctcaaacggtaccagcagttaaagcctattggatccggtgcccagggcatagtctgcgctgcttttgacacagttctgggcatcaacgttgccgtgaaaaaactctcgcgcccttttcagaaccagacgcacgctaagagagcctatcgcgagctggttctcctgaaatgcgtaaaccacaagaacattatctcattgctcaacgtgtttactcctcagaagaccctggaggaattccaagacgtctacctggtcatggagctgatggacgctaatctctgtcaggtgatccacatggagctcgaccacgagcgcatgagttatctcctctatcagatgctgtgcggaattaaacacctacacagtgcgggaatcatccatagagatctaaagccttccaacatcgtcgtgaagtctgactgtacgcttaaaatactggactttggactcgcaagaactgcatgtacgaactttatgatgacaccttacgtggtgactagatattaccgtgcacccgaagttatattgggcatggggtataaggaaaacgttgacatctggtcagtgggctgcatcatgggtgagctggtgaagggttgtgtcatctttcaaggcaccgaccggatcctgccccgagaccttggacccgcaatgctgagttag

SEQ ID NO: 50152 - DNA, 729 bp, Artificial Sequence
  derived and/or modified sequence
atgagcgacagcaagtgcgacagccagttctacagcgtgcaggtggccgacagcaccttcaccgtgctgaagagataccagcagctgaagcccatcggcagcggcgcccagggcatcgtgtgcgccgccttcgacaccgtgctgggcatcaacgtggccgtgaagaagctgagcagacccttccagaaccagacccacgccaagagagcctacagagagctggtgctgctgaagtgcgtgaaccacaagaacatcatcagcctgctgaacgtgttcaccccccagaagaccctggaggagttccaggacgtgtacctggtgatggagctgatggacgccaacctgtgccaggtgatccacatggagctggaccacgagagaatgagctacctgctgtaccagatgctgtgcggcatcaagcacctgcacagcgccggcatcatccacagagacctgaagcccagcaacatcgtggtgaagagcgactgcaccctgaagatcctggacttcggcctggccagaaccgcctgcaccaacttcatgatgaccccctacgtggtgaccagatactacagagcccccgaggtgatcctgggcatgggctacaaggagaacgtggacatctggagcgtgggctgcatcatgggcgagctggtgaagggctgcgtgatcttccagggcaccgacagaatcctgcccagagacctgggccccgccatgctgagctag

SEQ ID NO: 50153 - protein, 738 aa, Artificial Sequence
  derived and/or modified sequence
MFSKFTSILQHAVEALAPSLPLQEDFVYHWKAITHYYIETSDDKAPVTDTNIPSHLEQMLDILVQEENERESGETGPCMEYLLHHKILETLYTLGKADCPPGMKQQVLVFYTKLLGRIRQPLLPHINVHRPVQKLIRLCGEVLATPTENEEIQFLCIVCAKLKQDPYLVNFFLENKMKSLASKGVPNVISEDTLKGQDSLSTDTGQSRQPEELSGATGMEQTELEDEPPHQMDHLSTSLDNLSVTSLPEASVVCPNQDYNLVNSLLNLTRSPDGRIAVKACEGLMLLVSLPEPAAAKCLTQSTCLCELLTDRLASLYKALPQSVDPLDIETVEAINWGLDSYSHKEDASAFPGKRALISFLSWFDYCDQLIKEAQKTAAVALAKAVHERFFIGVMEPQLMQTSEMGILTSTALLHRIVRQVTSDVLLQEMVFFILGEQREPETLAEISRHPLRHRLIEHCDHISDEISIMTLRMFEHLLQKPNEHILYNLVLRNLEERNYTEYKPLCPEDKDVVENGLIAGAVDLEEDPLFTDISPENTLPNQEWLSSSPPATPDHPKNDGKTEVHKIVNSFLCLVPDDAKSSYHVEGTGYDTYLRDAHRQFRDYCAICLRWEWPGSPKALEKCNLEAAFFEGHFLKVLFDRMGRILDQPYDVNLQVTSVLSRLSLFPHPHIHEYLLDPYVNLAPGCRSLFSVIVRVVGDLMLRIQRIQDFTPKLLLVRKRLLGLEPEGPMQTLPSWW

SEQ ID NO: 50154 - DNA, 306 bp, Artificial Sequence
  derived and/or modified sequence
atgttcagcaagttcaccagcatcctgcagcacgccgtggaggccctggcccccagcctgcccctgcaggaggacttcgtgtaccactggaaggccatcacccactactacatcgagaccagcgacgacaaggcccccgtgaccgacaccaacatccccagccacctggagcagatgctggacatcctggtgcaggaggagaacgagagagagagcggcgagaccggcccctgcatggagtacctgctgcaccacaagatcctggagaccctgtacaccctgggcaaggccgacgtgagcagctag

SEQ ID NO: 50155 - DNA, 2217 bp, Artificial Sequence
  derived and/or modified sequence
atgttcagcaagttcaccagcatcctgcagcacgccgtggaggccctggcccccagcctgcccctgcaggaggacttcgtgtaccactggaaggccatcacccactactacatcgagaccagcgacgacaaggcccccgtgaccgacaccaacatccccagccacctggagcagatgctggacatcctggtgcaggaggagaacgagagagagagcggcgagaccggcccctgcatggagtacctgctgcaccacaagatcctggagaccctgtacaccctgggcaaggccgactgcccccccggcatgaagcagcaggtgctggtgttctacaccaagctgctgggcagaatcagacagcccctgctgccccacatcaacgtgcacagacccgtgcagaagctgatcagactgtgcggcgaggtgctggccacccccaccgagaacgaggagatccagttcctgtgcatcgtgtgcgccaagctgaagcaggacccctacctggtgaacttcttcctggagaacaagatgaagagcctggccagcaagggcgtgcccaacgtgatcagcgaggacaccctgaagggccaggacagcctgagcaccgacaccggccagagcagacagcccgaggagctgagcggcgccaccggcatggagcagaccgagctggaggacgagcccccccaccagatggaccacctgagcaccagcctggacaacctgagcgtgaccagcctgcccgaggccagcgtggtgtgccccaaccaggactacaacctggtgaacagcctgctgaacctgaccagaagccccgacggcagaatcgccgtgaaggcctgcgagggcctgatgctgctggtgagcctgcccgagcccgccgccgccaagtgcctgacccagagcacctgcctgtgcgagctgctgaccgacagactggccagcctgtacaaggccctgccccagagcgtggaccccctggacatcgagaccgtggaggccatcaactggggcctggacagctacagccacaaggaggacgccagcgccttccccggcaagagagccctgatcagcttcctgagctggttcgactactgcgaccagctgatcaaggaggcccagaagaccgccgccgtggccctggccaaggccgtgcacgagagattcttcatcggcgtgatggagccccagctgatgcagaccagcgagatgggcatcctgaccagcaccgccctgctgcacagaatcgtgagacaggtgaccagcgacgtgctgctgcaggagatggtgttcttcatcctgggcgagcagagagagcccgagaccctggccgagatcagcagacaccccctgagacacagactgatcgagcactgcgaccacatcagcgacgagatcagcatcatgaccctgagaatgttcgagcacctgctgcagaagcccaacgagcacatcctgtacaacctggtgctgagaaacctggaggagagaaactacaccgagtacaagcccctgtgccccgaggacaaggacgtggtggagaacggcctgatcgccggcgccgtggacctggaggaggaccccctgttcaccgacatcagccccgagaacaccctgcccaaccaggagtggctgagcagcagcccccccgccacccccgaccaccccaagaacgacggcaagaccgaggtgcacaagatcgtgaacagcttcctgtgcctggtgcccgacgacgccaagagcagctaccacgtggagggcaccggctacgacacctacctgagagacgcccacagacagttcagagactactgcgccatctgcctgagatgggagtggcccggcagccccaaggccctggagaagtgcaacctggaggccgccttcttcgagggccacttcctgaaggtgctgttcgacagaatgggcagaatcctggaccagccctacgacgtgaacctgcaggtgaccagcgtgctgagcagactgagcctgttcccccacccccacatccacgagtacctgctggacccctacgtgaacctggcccccggctgcagaagcctgttcagcgtgatcgtgagagtggtgggcgacctgatgctgagaatccagagaatccaggacttcacccccaagctgctgctggtgagaaagagactgctgggcctggagcccgagggccccatgcagaccctgcccagctggtggtag

SEQ ID NO: 50156 - DNA, 306 bp, Artificial Sequence
  derived and/or modified sequence
atgttttccaagttcacttctattctgcagcacgccgtggaggctctcgcgccatcgctgcctttgcaggaggatttcgtctaccactggaaggctattacgcattattacattgaaaccagtgacgataaggccccagtgacagacacaaacattccttctcacctcgagcagatgttagatattctggtccaggaggaaaacgagcgcgagagtggcgagaccgggccgtgcatggagtatctgcttcaccataagattctggaaactctctataccttaggaaaggctgatgtaagtagctag

SEQ ID NO: 50157 - DNA, 2217 bp, Artificial Sequence
  derived and/or modified sequence
atgttctcgaaatttacatcaatcctccaacacgccgttgaagccttggctcctagtctccccttacaggaggactttgtgtatcattggaaggccattacccactactacatcgaaacgagcgacgacaaggctccagtgaccgacaccaatattccttcccaccttgaacaaatgctggacatcctggtccaggaggagaatgaacgagagtctggggagaccgggccttgtatggaatatcttctccatcacaaaatactggaaacattgtataccctcgggaaagccgactgtcctcccggaatgaaacaacaggtgctcgtgttttataccaagctcttaggccgcatacgacagccattgctgccacatattaacgtgcaccggcccgtgcaaaagttgattagactgtgcggtgaagtgctcgcgactcctaccgagaacgaagaaatccagtttctgtgtatcgtctgtgctaagttgaagcaggatccttacctcgtgaatttctttctggagaataagatgaaatcactcgctagtaagggtgtgcctaacgtaatctccgaggatacactaaaggggcaggactccctgtccacggacaccgggcagtccagacaacccgaagagttgtccggcgccacggggatggagcagaccgaactcgaggatgagccgccgcaccagatggaccatctgtccacaagcctcgataacctgagcgtgacgtcgctgccggaggccagcgtggtatgtcccaatcaagactacaaccttgtgaattctctattaaaccttaccaggtcaccagatgggcgaattgctgttaaggcctgtgaaggtctcatgctgcttgtatcactaccagagcccgcagctgccaaatgtctaactcagagcacttgtctttgtgaacttctgactgatcgcctggctagcctgtacaaggctctgcctcaatccgtggatcctctcgacatcgagacggttgaagccattaactggggcctggattcatatagccataaggaagatgctagcgcatttcccggcaagagggctctgataagtttcctgagttggtttgattactgcgaccagctgatcaaggaggcccagaaaaccgccgccgtggccctcgctaaagcagttcatgagaggtttttcatcggagtgatggaaccgcagctgatgcaaaccagtgagatggggatactgaccagtactgccctgctgcacagaatagttcgacaagtcaccagcgatgtcttactccaggaaatggtctttttcatcctcggggaacaacgagaacccgagacactcgctgagatctctcgccaccccctgcgacatcgcttgatagaacactgtgaccatattagcgatgagatcagcatcatgacactcaggatgtttgagcaccttctgcaaaaacctaacgaacacattctctacaacttggtgctgcgaaatttggaggaacgcaactacaccgaatacaagcccctctgtcccgaagataaggatgtggtggaaaacggcctaatcgctggagcagtcgacctggaggaggatccccttttcaccgacattagcccggaaaacactctccccaatcaggaatggttaagctcttccccgcctgctacccccgaccatccaaagaacgacgggaagactgaggttcataagatcgtcaactcattcctttgccttgttcccgatgacgctaaaagcagttatcacgtggagggcacaggatacgacacctacctacgagatgcacaccgtcaattccgggactactgcgctatatgtctcaggtgggaatggcctggaagcccaaaagcacttgagaagtgcaacctagaagcagcattctttgagggccatttcctgaaggtgctgttcgatcggatgggacggattcttgatcaaccctatgacgtcaacctgcaagtcacgtctgtgctctctaggctgtcactgtttcctcacccacatatacatgagtatttgctcgacccttatgtcaatctggctccaggctgccggtctttgttcagcgtcatcgtccgcgtagtcggtgacctgatgctgaggatccaaagaatacaggatttcacccccaagttacttttggtaagaaagaggttgctcggcttggaaccagagggaccaatgcaaacgctgcccagctggtggtag

SEQ ID NO: 50158 - DNA, 666 bp, Artificial Sequence
  derived and/or modified sequence
gaaggaacccgagccgggctgccaccgtgtcccaaccggtgccgccgccggagcttctccgggccccgagtcctcgccgaacgccctcctcgccgcccgccgcgtcccggcgccctccggagccgccgagccgcccgcgcacacctgaagcggccgggccaggccctgcctcgatcctcagctcgtcctccccgccccgcaccggccttcactctggagcggccccggcagccgcagcaggggcggcggcggcggatcgaggagctctccaggtcgtcccgggagaggctgctgcagtcccgggacaggatgttctccaagttcacctccatcctgcagcacgccgtggaggcgcttgcaccttctcttcctttacaagaagattttgtttatcactggaaggcaattacccattactacatagagacttcagatgataaagccccagtgaccgatacaaatattccatcgcatctggaacagatgttagatatactggttcaagaagaaaatgaacgggaatctggagagacagggccatgtatggaatatttgcttcatcacaagatcttggaaacattatataccttggggaaagctgatgtaagttcctgatccacaccatgttcttgggcattagtacatgcattaatgtcttacgaataa

SEQ ID NO: 50159 - DNA, 2870 bp, Artificial Sequence
  derived and/or modified sequence
gcaggccgcggcgggcagagcggggggaaggaacccgagccgggctgccaccgtgtcccaaccggtgccgccgccggagcttctccgggccccgagtcctcgccgaacgccctcctcgccgcccgccgcgtcccggcgccctccggagccgccgagccgcccgcgcacacctgaagcggccgggccaggccctgcctcgatcctcagctcgtcctccccgccccgcaccggccttcactctggagcggccccggcagccgcagcaggggcggcggcggcggatcgaggagctctccaggtcgtcccgggagaggctgctgcagtcccgggacaggatgttctccaagttcacctccatcctgcagcacgccgtggaggcgcttgcaccttctcttcctttacaagaagattttgtttatcactggaaggcaattacccattactacatagagacttcagatgataaagccccagtgaccgatacaaatattccatcgcatctggaacagatgttagatatactggttcaagaagaaaatgaacgggaatctggagagacagggccatgtatggaatatttgcttcatcacaagatcttggaaacattatataccttggggaaagctgattgtcctccgggaatgaaacagcaggttttggttttctatacgaaacttctgggaagaatccggcagccactacttccacacattaacgtgcacaggccagtgcagaaattaattagactctgtggtgaagtcctagcaacaccaacagaaaatgaagagattcagtttctttgcattgtgtgtgcgaagctgaaacaggacccctacctggttaactttttcctagagaataagatgaaatcattggcttccaaaggagtaccaaatgtaatttcagaagatacattaaaaggtcaggattccttgtcaacagatacaggacagtcccgtcaaccagaggaactatctggtgctactggaatggagcaaacagaattggaagatgagcctcctcatcagatggatcacctgtccacaagcttggataacctcagtgtcacctcactgccagaggcctcggttgtttgtccaaatcaggattacaatttagtgaattctttgttaaatcttactagaagtcctgatggcagaatagctgtgaaggcatgtgaaggcttgatgctgttagtaagtttgccagagcctgcggctgcaaagtgccttacacagagcacttgcttgtgtgaactactgacagacagacttgcctccctgtacaaggccctacctcagtcagtggatccgttagatattgaaaccgtggaagcaattaactggggcttggactcatatagtcataaagaagatgcttcagcatttccaggaaaacgagccttaatttcatttctttcctggtttgattattgtgatcagctcattaaggaagcccaaaagactgctgctgttgctcttgccaaagctgttcatgaaagatttttcattggtgttatggaacctcaattaatgcaaacttctgagatgggtattctcacatccactgctctgcttcatcgcatcgttcggcaagtgacctctgatgttttgcttcaagaaatggtgttttttatccttggagaacagagggaaccagaaactctggcagaaatcagcagacatcctttaaggcataggttaattgaacattgtgatcacatatctgatgagataagcataatgacattacgaatgtttgaacatcttttacaaaaacccaatgagcacattctttacaacttggtcttgagaaatcttgaagaaagaaattatacagaatataaacctttgtgcccagaagataaagatgtggtagaaaatggattgatagcaggagcagtagatctggaagaagatccattatttactgacatttcaccagaaaacactttgccaaaccaagagtggcttagttcttcacctcctgctactccagaccaccccaaaaatgatggaaaaactgaagttcataaaattgtaaatagttttctctgtctggtaccggatgacgcaaaatcctcctaccatgttgagggcacaggatatgacacttacctccgagacgctcataggcagttccgagactactgtgctatctgcttaagatgggagtggcctgggtctccaaaagcattggaaaagtgcaatttagaagctgctttctttgaaggtcattttttgaaagtgctgttcgacagaatgggaagaattcttgatcagccatatgatgtaaacttacaagtaacctcagtgttatctagactttctctcttccctcatccacacatccacgagtaccttttggatccttacgtgaacctcgctcctggctgtagatctctcttctctgtaattgtcagggttgttggagaccttatgcttcgaatccagcgtattcaagactttactcccaagcttctgttagtcagaaagcggttacttggtttggaacctgaaggccctatgcagacgttgccttcatggtggtaagagggattccagagtctcttatgtcctcaaagcttcaagctcagccaaaagaatctcgatggtttccacaaaaaatcttgggccttggatcaactgcccacccttgaaccaatcctggtggccccaggctgattggcagacctgaatcacctatcccatgcccagaactttggcttgaccaggctcatccaaaacaagggaatccagagtgtttccccaaagaaaatcagggggctattactgggaaaaagaattccaccacaagtataaaaaatactgttatcaataaaacatcacctgatactttggttcattaaa

SEQ ID NO: 50160 - DNA, 306 bp, Artificial Sequence
  derived and/or modified sequence
atgttcagcaagttcaccagcatcctgcagcacgctgtggaggccctggcccccagcctgcccctgcaggaggactttgtgtaccactggaaggccatcacccactactacatcgagaccagtgatgacaaggcccctgtgacagacaccaacatccccagccacctggagcagatgctggacatcctggtgcaggaggagaatgaaagagagagcggggagaccggcccctgcatggagtacctgctgcaccacaagatcctggagaccctgtacaccctgggcaaggcagatgtgagcagctag

SEQ ID NO: 50161 - DNA, 2217 bp, Artificial Sequence
  derived and/or modified sequence
atgttcagcaagttcaccagcatcctgcagcacgctgtggaggccctggcccccagcctgcccctgcaggaggactttgtgtaccactggaaggccatcacccactactacatcgagaccagtgatgacaaggcccctgtgacagacaccaacatccccagccacctggagcagatgctggacatcctggtgcaggaggagaatgaaagagagagcggggagaccggcccctgcatggagtacctgctgcaccacaagatcctggagaccctgtacaccctgggcaaggctgactgccccccaggcatgaagcagcaggtgctggtgttctacaccaagctgctgggccgcatccggcagcccctgctgccccacatcaacgtgcacaggcctgtgcagaagctgatccggctgtgtggggaggtgctggccacccccacagaaaatgaggagatccagttcctgtgcatcgtgtgtgccaagctgaagcaggacccctacctggtgaacttcttcctggagaacaagatgaagagcctggccagcaaaggagtgcccaacgtcatcagcgaggacaccctgaagggccaggacagcctgagcacagacaccggccagagccggcagcctgaggagctgagcggggccaccggcatggagcagacagagctggaggatgagcccccccaccagatggaccacctgagcaccagcctggacaacctgtctgtgaccagcctgcctgaggcctctgtggtgtgccccaaccaggactacaacctggtgaacagcctgctgaacctgaccaggagcccagatggaagaattgctgtgaaggcctgtgagggcctgatgctgctggtgtccctgcctgagcctgctgctgccaagtgcctgacccagagcacctgcctgtgtgagctgctgacagaccggctggccagcctgtacaaggccctgccccagagcgtggaccccctggacattgaaacagtggaggccatcaactggggcctggacagctacagccacaaggaggatgccagcgccttccctgggaagagggccctgatctccttcctgtcctggtttgactactgtgaccagctgatcaaggaggcccagaagacagctgctgtggccctggccaaggctgtgcatgagcgcttcttcatcggcgtgatggagccccagctgatgcagaccagcgagatgggcatcctgaccagcacagccctgctgcacagaattgtgcggcaggtgaccagtgatgtgctgctgcaggagatggtgttcttcatcctgggggagcagcgggagcctgagaccctggccgagatcagccgccaccccctgcggcaccggctgattgagcactgtgaccacatcagtgatgagatcagcatcatgaccctgaggatgtttgagcacctgctgcagaagcccaatgagcacatcctgtacaacctggtgctgaggaacctggaggagaggaactacacagagtacaagcccctgtgcccagaggacaaggatgtggtggagaatggcctgattgctggagctgtggacctggaggaggaccccctcttcacagacatcagccctgagaacaccctgcccaaccaggagtggctgagcagcagccccccagccaccccagaccaccccaagaatgatggcaagacagaggtgcacaagatcgtgaacagcttcctgtgcctggtgcctgatgatgccaagagcagctaccacgtggagggcaccggctatgacacctacctgagagatgcccaccggcagttccgggactactgtgccatctgcctgcgctgggagtggccaggcagccccaaggccctggagaagtgcaacctggaggccgccttctttgagggccacttcctgaaggtgctgtttgacaggatgggccgcatcctggaccagccctatgatgtgaacctgcaggtgacctctgtgctgagccggctgagcctcttcccccacccccacatccacgagtacctgctggacccctacgtgaacctggcccctggctgccgcagcctcttcagcgtcatcgtgcgggtggtgggggacctgatgctgcgcatccagaggatccaggacttcacccccaagctgctgctggtgaggaagaggctgctgggcctggagcctgagggccccatgcagaccctgcccagctggtggtag

SEQ ID NO: 50162 - DNA, 306 bp, Artificial Sequence
  derived and/or modified sequence
atgttcagcaagttcaccagcatcctgcagcacgccgtggaggcccttgctcctagtcttcccctgcaagaggactttgtttaccactggaaggctatcacacactattatatagaaaccagtgacgacaaggcccctgtaacagataccaacatcccaagtcatctggagcagatgctggacattctcgtgcaggaagagaacgagagggagagcggagagacagggccatgtatggagtatctgctgcatcacaaaattcttgaaaccctgtatactcttggcaaagccgacgtctcttcttag

SEQ ID NO: 50163 - DNA, 2217 bp, Artificial Sequence
  derived and/or modified sequence
atgttcagcaagttcaccagcatcctgcagcacgccgtggaggccctagcccccagtctccccctgcaggaagattttgtgtaccattggaaggccattacacattattacatcgagaccagcgatgataaggctcctgttactgacacaaatatcccttcacaccttgagcagatgctcgatatcctggtgcaagaggagaacgaaagggagagcggggaaactgggccctgcatggagtatttgttacaccacaaaatcttggagaccctgtacacactggggaaggcagattgtcctcccggaatgaaacagcaggttcttgtgttctacacaaaactactcgggcgcatccgccaaccattgctaccccatataaacgttcaccgcccagtgcagaaactgatccgtctttgcggtgaggtgctcgcaacgccgacagagaacgaagaaatccagttcctttgcatcgtgtgtgccaagctcaaacaggacccttatctggtcaacttctttctggagaataaaatgaagagtctggcaagcaagggggtgcctaatgtgatctccgaggatacactgaagggacaggatagcctcagtacagacacagggcagtctaggcagccagaagaactcagcggcgctacgggaatggagcagactgagttggaggatgaacccccacatcagatggaccacctgtcaacttccttggacaacctgagcgtcactagcctgcccgaggcgtccgtggtctgccctaatcaagactacaatctcgtcaacagcctgctaaatctcactcgaagccctgacggcaggatcgccgtgaaagcatgcgagggcttgatgttgttagtgagcctccccgagccggctgctgctaaatgtctaacccagtctacatgtctgtgtgagttgctcacagatcgcctcgctagtctttacaaggctctccctcagagtgtcgaccccctggacatcgaaacagtggaagctatcaactgggggttggactcttactcacacaaagaggatgcctccgccttccccgggaagagagccctgatcagctttcttagctggtttgactattgcgatcagctgataaaggaggctcaaaagacagccgctgtggccctggctaaggcagtccatgagaggttctttattggagtcatggagccacagctgatgcagacatccgagatgggaattctgactagtacagcactgctacaccgaatagtgaggcaagtgacaagtgatgttttgctgcaggagatggtgttctttatcctcggcgaacagagggaacctgagactttagccgaaatttctcgccatccactaagacaccggcttattgagcactgcgatcacattagcgatgagatatccattatgacactgcgcatgtttgagcatctactccagaaacctaacgagcatatcctctataacctggttctaagaaatctcgaagagcgaaattacacagaatacaaacccttgtgtcccgaggataaggacgtggtggaaaacgggcttattgcaggcgctgtggatttggaggaggatcctctgttcacagacatttcccccgagaatacactgccgaaccaggagtggctctcctccagtccgcctgctactcccgatcacccaaagaatgatggtaagactgaggtgcacaagatcgtaaactcattcttgtgtctcgtgcccgatgacgccaaatctagttatcacgtggaaggcacaggatacgatacctacctccgcgacgcccataggcagtttagagactattgtgcaatttgtcttcggtgggagtggccgggatcccccaaggccctcgagaagtgtaatctggaggcagcattcttcgaggggcacttcctcaaagtactgttcgacaggatgggcagaatcctagaccagccctatgacgtcaacttgcaggttaccagtgtactgagcagacttagtctgtttccacatcctcacatccacgaatacctcttagacccatatgtgaatctagccccaggatgtcgaagtctattttccgtcatagtgcgggtggtcggcgaccttatgttgaggattcagcgaatacaggacttcactcccaagcttttactcgtgagaaaaagactcttaggcctggaaccagaaggaccgatgcagacgctgcctagctggtggtag

SEQ ID NO: 50164 - DNA, 306 bp, Artificial Sequence
  derived and/or modified sequence
atgttttctaaattcacatccatcctgcaacatgccgtcgaagctctggccccatccttgccactgcaggaagactttgtttaccactggaaggcaatcactcactactacattgagacatcagacgataaggcccctgtgacagatacaaacatcccatcacatctggaacagatgctggacattctggtgcaggaagaaaacgagcgagagtcgggggagactggaccgtgcatggagtacctgctgcaccacaaaatcctggaaacgttatacaccttagggaaggcggatgtaagcagctag

SEQ ID NO: 50165 - DNA, 2217 bp, Artificial Sequence
  derived and/or modified sequence
atgtttagcaagtttacttccatcttacagcacgccgtcgaagcgctggctccctctttgccgttacaagaggactttgtgtaccactggaaggcaattacacactactatatcgaaacatccgatgacaaggcacctgttactgataccaacattcccagtcacttagaacaaatgctggatatcctggtgcaggaggaaaacgagagggagtccggcgagacagggccatgtatggaatatctgttgcatcacaagattctcgagaccttatacacgcttggtaaagctgactgccctcccggaatgaagcagcaggtgctagtgttttacactaagttgctcggacggattcggcagccactgctgcctcacatcaacgtacacagacctgtccaaaagctgattcgcttatgcggcgaggttctggcaacgcctactgagaacgaagagattcagtttctttgtatcgtgtgcgccaagttgaaacaagatccatatctggttaacttcttcctggagaataagatgaaaagcttagcctctaaaggcgttcccaacgtcatcagtgaggataccctcaaggggcaggactccctgagtaccgacaccggccagagccgccagccagaggaactgtccggcgctacagggatggaacagaccgagttagaggacgagcctccgcatcaaatggatcacctgtccactagcctggacaacctgagtgtgacttctctgcccgaggcgagcgtggtctgtcccaaccaggactataatcttgtcaattctctactgaatctcacccgcagtcccgatggtagaatcgccgttaaagcctgcgaagggctgatgctgttggtgtctctccccgaacctgctgccgctaagtgtctgacacaatccacatgcttatgcgaattgctgactgacagacttgctagcttatataaggccctgccacaatcagtcgatcccctggatattgagactgtggaggccatcaactggggcctcgacagctactcgcacaaagaagatgcatctgcctttcccggtaaaagagccctgatttcattcctgagttggtttgattattgtgatcagcttatcaaagaggcgcagaaaaccgcagcagttgccctcgcgaaagccgtgcacgaaagattctttataggagtgatggagccacaattgatgcaaacatccgaaatgggtatccttacaagcactgccctgctccaccggattgtgagacaggtcacatctgatgtcctgctgcaggaaatggtcttcttcattcttggcgagcagagagagccagagacactggccgagatttctcgacatccattgagacaccgcctcattgagcattgcgatcatatcagtgatgaaatctcaataatgaccttgcggatgttcgagcatttactgcaaaagcccaacgaacatatcctgtataacttagtgctacgaaacttggaagagcggaactacaccgaatacaaacctctgtgccccgaagataaggatgtggtggagaacggccttatcgcaggcgcagtcgacctagaagaggatcccctgttcacagacatcagtccagaaaatactctcccaaaccaagaatggctgtcctcttcaccacctgcgacacctgatcaccccaagaatgacgggaaaacagaagtgcacaagatcgtaaactcgttcctttgtcttgtgcccgacgacgccaagtctagctatcacgtggaaggcaccggatacgatacctacctccgggatgcacacaggcagtttagggattactgcgcaatctgcctgcggtgggaatggcccggttctcccaaggctcttgagaaatgcaacctcgaagccgcttttttcgaggggcactttctgaaggtcttgtttgaccggatggggaggattctagaccagccgtatgacgtgaatctgcaggtcaccagtgtgcttagtcgcctaagtctgttcccccacccccatattcatgagtacttactagacccatacgtaaatttagcaccaggatgcaggtctctgttctcagtgatcgtccgagtggtaggcgatctgatgctaaggattcagcgtatccaggactttacgccaaaactgctgctagtgcgaaaacgcctgctgggactcgagccagaagggccaatgcaaacccttccaagttggtggtag

SEQ ID NO: 50166 - protein, 410 aa, Artificial Sequence
  derived and/or modified sequence
MPGVCDRAPDFLSPSEDQVLRPALGSSVALNCTAWVVSGPHCSLPSVQWLKDGLPLGIGGHYSLHEYSWVKANLSEVLVSSVLGVNVTSTEVYGAFTCSIQNISFSSFTLQRAGPTSHVAAVLASLLVLLALLLAALLYVKCRLNVLLWYQDAYGEVEINDGKLYDAYVSYSDCPEDRKFVNFILKPQLERRRGYKLFLDDRDLLPRAEPSADLLVNLSRCRRLIVVLSDAFLSRAWCSHSFREGLCRLLELTRRPIFITFEGQRRDPAHPALRLLRQHRHLVTLLLWRPGSVTPSSDFWKEVQLALPRKVQYRPVEGDPQTQLQDDKDPMLILRGRVPEGRALDSEVDPDPEGDLGVRGPVFGEPSAPPHTSGVSLGESRSSEVDVSDLGSRNYSARTDFYCLVSKDDM

SEQ ID NO: 50167 - DNA, 1233 bp, Artificial Sequence
  derived and/or modified sequence
atgccaggcgtgtgtgatagggcccctgactttttgagcccctctgaggatcaagtcctacgccccgctttggggtcaagcgtcgccctcaactgtactgcctgggtcgtgtccggcccacactgctcgctgccaagcgtgcaatggctaaaagatggccttccactcggtatcggagggcattattctcttcacgaatattcctgggttaaagcaaacctgtccgaggtgctggttagcagcgttctcggagttaatgtcacttctaccgaggtgtacggtgcttttacctgttctattcagaatatctccttcagttcatttaccttgcaacgagctggcccgacctcgcatgtggcggccgtactggcttccctgttagttcttcttgcactgctcctggccgccctgctatatgttaagtgccgactcaacgtgcttctgtggtatcaggacgcatatggagaggtggagataaatgacggtaaactctacgatgcctacgtcagttactcagattgccccgaagaccggaaattcgtcaactttattctgaaacctcagcttgagcggaggcggggctacaagctttttctggacgacagggatctgctccccagagccgaacccagtgccgacctgctcgtcaacttaagtcgttgcaggcgcctgatcgtggtgctctcagatgcatttctatcccgagcgtggtgtagccactcattcagggaagggttgtgccgacttctcgagctcacaaggcgccccatttttatcacctttgagggtcagaggcgcgacccagctcaccctgctcttcgcctgttgagacagcacaggcatctggtgacgttgctcctctggagacccgggtccgttacgccaagtagcgacttttggaaggaagttcaactggccctccctcgcaaagtccagtatcgccctgtcgaaggcgacccccaaacgcagctgcaggatgataaagatccgatgcttattctgaggggccgtgtccctgagggtagggctctggattccgaggtagaccccgatcccgagggggacctcggagtgcgaggcccagtctttggggaaccaagcgctcctccccacacgtctggcgtctcactgggcgagtcaaggagctcagaagttgacgtgagtgacttgggatcccgcaattactccgcacgtaccgacttttactgcctagtgtctaaggacgacatgtag

SEQ ID NO: 50168 - DNA, 1233 bp, Artificial Sequence
  derived and/or modified sequence
atgcccggtgtttgcgacagggcacctgacttcctgagcccttctgaagatcaggtgctgcgacccgctctgggatcttccgtagcgcttaattgcaccgcctgggtcgttagcgggccccactgttccttaccatccgtccagtggttgaaagatgggttaccgctgggaattggtggacattactcattgcacgagtattcgtgggttaaggccaacttatctgaggtcctggtctccagcgtcctcggtgtaaacgtgacaagtactgaagtctatggcgcgtttacatgttccatacagaatatatccttcagttccttcacgctgcaaagagctgggcccacgagtcacgtggctgcagttctggcctctctgctggttctcctggcactcctcctggccgctctgctgtacgtgaagtgccggctcaacgtgctgctgtggtaccaagatgcctacggcgaagttgaaatcaatgacggcaagctatatgacgcctatgtatcgtacagcgattgccctgaagatagaaagttcgtaaatttcatccttaagcctcagctggagcggagaagagggtataaactgttcttagatgatcgcgatcttctgccccgtgcagaaccatctgctgatttgctggttaacctctcacgatgccggcgccttatcgttgtactgtccgatgcctttctaagtcgcgcctggtgtagtcacagcttccgcgaaggattatgtcgcctgctcgaactcacaaggcggcccattttcattacctttgaggggcagaggcgagatcccgctcacccagccctacggctcctgcggcagcacaggcatcttgtgacgttgcttctctggcgccctggatctgtgaccccatcctctgatttttggaaggaagtgcagctcgctcttccccgcaaggttcaatacagacccgtggagggggatcctcagacccaactacaggatgacaaggacccgatgctaattctgcgtggcagagtgcctgaaggccgcgctctggattccgaagtcgaccccgatcccgaaggtgaccttggcgtgagaggcccggtttttggggagcccagtgcacccccacatacgagtggtgtgagcctcggagaatcaagatcttctgaagtggatgtttcagatttggggtcacggaactacagtgcacgtactgacttctactgtctggtaagcaaggatgacatgtag

SEQ ID NO: 50169 - DNA, 1233 bp, Artificial Sequence
  derived and/or modified sequence
atgcccggcgtgtgcgatcgtgctcccgattttctgtctccgtcagaagatcaggtactcaggcccgctttgggatcatcagtagcactgaactgcacagcctgggtggttagcggcccccactgtagcttacctagtgtacagtggctgaaggacggcctgccgctagggataggcggccattattcactgcacgagtattcatgggtaaaagccaatttaagcgaggtattagttagctcagtactaggcgtaaacgtaacatctactgaggtgtatggagctttcacatgctccatccagaacatatccttctcttcttttactctgcagagagcgggccctactagtcacgtggccgctgtgctggccagtctgcttgtattgctcgcactactgctggccgctctgctgtacgtgaagtgcaggcttaacgtactgctgtggtaccaggacgcgtatggggaagtcgaaatcaatgacggcaagctatacgatgcatacgtcagctattcagattgtccggaggataggaagttcgtgaacttcatcctgaaaccccagcttgaaaggcgacgcggttacaagctgttccttgatgatcgggacctgctcccacgggcagagcccagcgcggacctgctcgtgaaccttagtcggtgccggaggctgatcgtggtgctgtcagacgcattcctcagtcgggcttggtgctcacattcattcagggagggactctgtcgtttactggaattgaccaggaggccaatttttatcaccttcgagggccagcggcgagaccccgcacaccccgcactgcgacttctgcggcagcatcgccacctggtcacgctgcttctgtggcggcctggaagcgtaacacccagtagtgatttttggaaagaagtacagctcgcactgccacgcaaggtgcagtacaggcccgtcgagggcgacccacagacacaactccaggacgacaaagaccctatgctgattttaagaggaagagtccccgaaggacgcgcgttggactcagaagttgacccagaccccgaaggagacctgggagtccgcgggcccgtgtttggagagccctctgctcccccacatacttccggcgtgtcattaggggagtctaggagcagcgaggtggatgtttccgaccttggatcccggaattattccgcacgaaccgatttctactgcctcgtgtctaaggatgacatgtag

SEQ ID NO: 50170 - DNA, 1233 bp, Artificial Sequence
  derived and/or modified sequence
atgcctggggtgtgtgaccgggccccagacttcctgagccccagcgaggaccaggtgctgcggcctgccctgggcagctctgtggccctgaactgcacagcctgggtggtgtctggcccccactgcagcctgcccagcgtgcagtggctgaaggatggcctgcccctgggcatcggcggccactacagcctgcacgagtacagctgggtgaaggccaacctgtctgaggtgctggtgtcctctgtgctgggcgtgaatgtgaccagcacagaggtgtatggagccttcacctgcagcatccagaacatctccttcagcagcttcaccctgcagagagctggccccaccagccacgtggccgctgtgctggccagcctgctggtgctgctggccctgctgctggccgccctgctgtatgtgaagtgccgcctgaatgtgctgctgtggtaccaggatgcctacggggaggtggagatcaatgatggcaagctgtatgatgcctacgtgtcctacagcgactgcccagaggacaggaagtttgtgaacttcatcctgaagccccagctggagcggcggcggggctacaagctgttcctggatgaccgggacctgctgcccagggctgagcccagcgctgacctgctggtgaacctgagccgctgccggcggctgattgtggtgctgagtgatgccttcctgagccgggcctggtgcagccacagcttccgggagggcctgtgccgcctgctggagctgacccggcggcccatcttcatcacctttgagggccagaggcgggaccctgcccacccagccctgcggctgctgcggcagcaccgccacctggtgaccctgctgctgtggaggcctggctctgtgacccccagcagtgacttctggaaggaggtgcagctggccctgcccaggaaggtgcagtacagacctgtggagggggacccccagacccagctgcaggatgacaaggaccccatgctgatcctgcggggccgggtgcctgagggccgggccctggacagcgaggtggaccctgaccctgagggggacctgggcgtgcggggccctgtgtttggagagcccagcgccccaccccacaccagcggcgtgtccctgggggagagccgcagcagcgaggtggatgtgtctgacctgggcagcaggaactacagcgccaggacagacttctactgcctggtgtccaaggatgacatgtag

SEQ ID NO: 50171 - DNA, 1233 bp, Artificial Sequence
  derived and/or modified sequence
atgcccggcgtgtgcgaccgggcccccgacttcctgagccccagcgaggaccaggttctacgcccagccctgggatcctctgtggccctgaattgcacagcctgggtcgtctctggcccacactgttcactgccttcagtccaatggttgaaggacggcttgccactcggtatcgggggccattacagcctacacgaatactcatgggtgaaagctaacctgagtgaggttctcgtctctagcgtgcttggggtgaatgtaacaagcacagaagtctatggagccttcacctgcagtattcagaacatcagtttttctagcttcactctgcagcgagctggcccgacatcccacgtcgccgccgttctggccagtttactcgtgctcctcgctctgttattagctgcattactgtatgtcaaatgtcgactaaatgttttgctctggtaccaagacgcatacggcgaggttgaaatcaacgatggcaagctgtatgacgcgtatgtttcctactcagactgcccagaagatcgtaagttcgtgaacttcatcctcaagccacagttggaacgtcggcgggggtataagctctttcttgatgacagggacctgctcccccgggcagagccgtccgccgaccttctggttaatctatctcgctgcaggaggctgatcgttgtgttgagtgatgcattcctctcacgggcctggtgctctcactccttcagagaagggctttgcaggctccttgagctgacgcgccgtccaatctttattactttcgaagggcaaaggagggatcccgcccatcccgctttaagacttttgaggcagcaccggcatctcgttacattgcttctgtggcgtccagggtcggtgaccccgagctccgacttttggaaggaagtgcaactcgccctgcccagaaaagtgcaatacaggcctgtggagggcgacccccagactcagctgcaggatgataaggatcccatgctcattctgcgcggcagggtcccagaggggagggctttagactcagaggttgacccggatcccgagggtgacctcggagtgaggggccctgtattcggcgaaccctcagccccacctcatacctctggagtctctcttggcgagtcacggtcttccgaggtagacgtcagtgatctgggtagccgcaattactccgcacggaccgatttttactgcctggtttccaaagacgatatgtag

SEQ ID NO: 50172 - DNA, 1233 bp, Artificial Sequence
  derived and/or modified sequence
atgcccggcgtgtgcgaccgggcccccgacttcctgagccccagcgaagatcaggtcctacggccagctcttggttcgagcgtcgctcttaattgtaccgcctgggtggtgtccgggccacattgttcactgcctagcgtgcagtggctgaaggacggcctaccattgggaatcggaggacactatagcctacacgagtattcttgggtgaaagccaatttgtcggaagtcctcgtctcttccgtgctgggagtaaacgtgaccagtacagaagtgtacggcgccttcacgtgttctattcaaaacatcagcttttccagttttaccctccaacgggccggccccacctcccacgtggccgcggtgctcgcgtctctgctggtgctcctggccctcctcttggccgcgctgctctatgttaagtgccgcctaaatgtccttctttggtatcaggatgcttacggggaagtcgagatcaacgatggaaaactctacgatgcctatgtgtcttactcagattgccccgaagaccgtaagttcgtgaattttattctgaaaccacagctggaacggcggagagggtacaaactgtttctggacgaccgggatctgctgccccgggctgagcccagcgccgatttgctcgtcaatttatcacgctgccgaagactcatcgtggtgctttcggacgcgttcctatctcgtgcttggtgctcacactctttccgcgaaggactctgtcggctcctagaactcacacggcgaccgatttttataacgtttgaaggacaacgcagagaccctgcccacccagctctaagactgttacgacagcacaggcacctcgtcacgctgcttctttggcgtcctgggtcagtgaccccaagctctgatttctggaaagaagtgcagctagccttgccacgcaaggtccagtatcgacccgtagagggagacccccagacccagctgcaagacgacaaagatccgatgctcattctgagaggacgcgtgccggaaggaagagctctcgacagcgaagtagacccagacccagaaggtgacttgggtgtgcgaggtcctgttttcggagagccctcagctcctccccacacatctggtgtgagtttgggggaatcccgctcctccgaggttgacgtcagtgatcttgggtcccggaattatagcgcccgaacggacttttactgcctggtctcgaaggatgacatgtag

SEQ ID NO: 50173 - DNA, 1233 bp, Artificial Sequence
  derived and/or modified sequence
atgcccggcgtgtgcgaccgggcccccgacttcctgagccccagcgaagaccaggttttacggccggcgctaggcagcagtgtggccttgaattgtacggcatgggttgtgtccggcccacattgcagtctccctagcgtgcaatggttaaaggatgggctccccctcgggattggcgggcattactcactgcatgagtactcatgggtgaaggcaaacctctcagaggtgctggtgagtagtgtcctgggagttaacgtcacatcgaccgaggtttatggcgcattcacatgttccattcagaatatatctttcagttccttcacactgcagagggccggccccacatctcatgtggccgcagtgcttgcaagtctcctggtactgctcgcactgctgctggcggccctcctctacgtcaaatgtcggctgaatgtactgctgtggtatcaggatgcatatggagaggtggagattaacgatgggaaactatacgacgcatacgtgagctattcagattgcccggaagaccgaaaatttgtaaactttatcttgaagccacaattagaacgcagaagaggatataagttgtttctcgatgaccgggacctccttcctcgggctgaaccatcggcggacctcctagtgaacctttctagatgccgaaggcttattgtggtattgagtgacgcattcctgtcacgagcatggtgctcccacagctttcgcgagggcctgtgtcggctcctcgagctgacaagacgaccaatatttatcaccttcgagggccaaagaagggatcccgcacaccccgctctgaggcttctgaggcaacaccggcacctggtgaccctccttctatggcgccccggaagcgtgacaccttcttctgatttctggaaggaggtccagctggccctgccacgcaaagtgcagtacagacctgttgagggagacccacagacgcagttgcaggatgacaaagaccccatgctaatcttaagagggcgcgtgccggaaggtcgggcactggacagcgaggtggaccctgatcctgaaggagacttgggagtgcgagggccagtgtttggcgaacctagcgctcccccccatacaagcggcgtttccttgggtgagtctaggagttccgaggtagatgtttccgaccttggatccaggaattattctgctaggaccgatttttactgtctggtgtccaaggatgacatgtag

SEQ ID NO: 50174 - DNA, 1233 bp, Artificial Sequence
  derived and/or modified sequence
atgcccggtgtgtgtgaccgggctcctgatttcctgagcccatctgaggaccaggtgctccgacccgcattggggagtagcgtggccctcaattgtactgcatgggtagtctctggtccccattgtagtctcccttccgtgcagtggctgaaagacggtctccccttaggcataggaggccactactcccttcacgaatacagttgggtgaaggccaacctcagcgaagtgctggtctcttccgttctgggggtgaacgtcacttcaactgaggtgtacggcgcattcacatgctctattcagaatatatctttttcttcttttacccttcaacgagccggacccaccagtcacgtggccgcagtgctcgcctcactcttggtactgctggcactcctgctcgcagccctgctgtacgtaaaatgtcggctgaatgtgctactgtggtaccaggacgcctatggtgaagtggagattaacgatgggaagctttatgatgcttacgtgtcctattctgactgccccgaggatcggaagtttgtcaatttcatcctgaagccacagcttgaaaggcgaagagggtataagctatttctggacgatcgcgacctgctccctcgagccgaaccctctgccgacctgttggtgaacctttcccgctgcaggcggcttatcgtggttctttctgatgctttcctgtcccgtgcatggtgctcccattccttccgtgagggtttatgtagactgctggaactgactcgcagacccatcttcattacatttgaagggcaacgtcgggatccagctcatccagcactgcgtctgctgcgacagcatcgtcacctggtgactttgctcctgtggcggcctgggtcagtgacaccctcttcagacttttggaaggaagtacagcttgccctgcctcggaaggtgcagtacagacctgtcgaaggtgatccccagacccaactgcaggacgacaaggaccccatgctgattctgcggggaagagtacccgagggccgtgcactggactcagaggtcgatccagatccagaaggggatctcggtgtgaggggtccggtgtttggcgaaccgagcgcgcctcctcacacctctggagtttcactgggcgaatctagatcctctgaagttgatgtgtccgacttgggcagccgcaactattctgcgagaaccgacttttattgcttggtgtctaaagacgacatgtag

SEQ ID NO: 50175 - DNA, 1233 bp, Artificial Sequence
  derived and/or modified sequence
atgccaggcgtctgcgatcgtgcccctgattttctgtcgccgtctgaggatcaggtcctcagacccgcacttggcagcagtgtggcccttaactgcaccgcttgggtggtgtccggccctcactgttcactccctagtgtgcagtggctcaaggacgggctgcccttgggaatcggtggtcactattctctgcatgagtacagctgggtgaaggccaatctgtccgaggtgctcgtgagtagtgttctgggcgtgaacgtgacttcaaccgaggtgtacggcgctttcacctgcagcatccagaacatttctttctcaagctttacactgcagagggcaggtcctactagccatgtggccgctgtgttggctagcttgctggttctactcgcactgctgctcgccgctctgttgtacgtgaagtgtcggctgaacgtgttgctctggtatcaggatgcatatggtgaagtcgaaataaatgacggcaaattatacgacgcatatgtctcttactctgattgtcccgaggatcgcaagttcgtgaactttatcctcaagccacaactggagcggagacgaggttataagctttttctggatgacagagacttactccctagggcagaaccctctgcagaccttctcgtgaacctgagtaggtgtcggagattaatcgtcgtgttgtccgatgcattcctgagccgggcttggtgtagtcatagttttcgtgaaggcctgtgtaggctgctcgagctgaccagacgccctattttcatcacatttgagggtcagcggagggaccccgctcacccagcactacgtctgctgaggcagcataggcaccttgtgactctgttgctctggagaccaggaagcgtcaccccctcctccgatttttggaaagaagtgcagctggccctcccaaggaaggtgcagtatcgccctgttgagggggacccgcagactcaactgcaggatgacaaggaccctatgttgatattgcgcggtagagtccccgaaggcagggccctagactccgaagtggaccctgacccagagggcgacctgggtgtgagagggccagtctttggagaaccttcagctcctcctcatacatcaggtgtgtccttaggtgagagcagaagcagtgaggtagatgtgtccgacctcggaagtaggaactatagtgccaggacagatttttattgtttggtgtctaaagatgacatgtag

SEQ ID NO: 50176 - DNA, 1233 bp, Artificial Sequence
  derived and/or modified sequence
atgcctggcgtgtgcgacagggcaccagacttcctgtctccttccgaggatcaagttctgagacctgccttagggtcatctgtggctctgaactgtactgcctgggttgtgagcgggccacattgttccttgccctcagtacagtggttgaaagatggattgcccttgggaattggcggacactattcactccacgagtattcctgggttaaggccaacctcagcgaggtgcttgttagtagtgtacttggtgtgaacgtgactagtacggaagtgtatggagcattcacgtgtagtatccagaatatttctttcagctcatttaccctgcagcgcgctggacctacatctcacgtggccgcagttctggcctctctgctcgttctactggcgctgctactcgccgctctgctgtacgtgaagtgtaggcttaatgtcctactgtggtaccaagatgcctatggcgaggtcgagatcaatgatggcaagctgtacgatgcctacgtgagctatagtgactgtccagaagaccggaagtttgtcaattttatccttaagcctcagttggagcggaggcggggttataaacttttcctggacgatcgcgatctcctaccgagagccgagccatcggccgatctgttggtaaatttatccagatgcaggcgactgatcgtcgtcctgtccgacgcctttctttccagagcctggtgtagtcactcatttagggaaggtctctgcagactgctggagcttacgcgacgaccgatattcattacctttgagggccagcgccgtgaccccgcacatcctgctctgcgcctcctgcgccagcatagacacttagtcacgcttctgttatggaggcctggttctgtgaccccatccagcgacttttggaaagaggtgcagctggctcttcctcgcaaggtacagtaccgccctgtggagggcgatccccagacccagctccaggatgacaaagaccccatgctgatcctgagaggacgcgtacccgaaggcagagcgctggacagtgaggtggaccccgatcctgagggtgatcttggagtcaggggcccagtgttcggggaacccagcgccccaccgcacaccagcggagtttcccttggtgagtccaggtccagcgaggtagatgtgagcgacctcgggagcagaaattactctgctcgaacagacttctattgtctagtgtccaaagacgacatgtag

SEQ ID NO: 50177 - DNA, 1639 bp, Artificial Sequence
  derived and/or modified sequence
gttgccgctgcgcacctggctcaggtgagctgccccgcccccgcccggcgcgagccccaggtcctggcagcagcctctgacctgtccaggtgccctgtccagctgactgcaaggacagagaggagtcctgcccagctcttggatcagtctgctggccgaggagcccggtggagccaggggtgaccctggagcccagcctgccccgaggaggccccggctcagagccatgccaggtgtctgtgatagggcccctgacttcctctccccgtctgaagaccaggtgctgaggcctgccttgggcagctcagtggctctgaactgcacggcttgggtagtctctgggccccactgctccctgccttcagtccagtggctgaaagacgggcttccattgggaattgggggccactacagcctccacgagtactcctgggtcaaggccaacctgtcagaggtgcttgtgtccagtgtcctgggggtcaacgtgaccagcactgaagtctatggggccttcacctgctccatccagaacatcagcttctcctccttcactcttcagagagctggccctacaagccacgtggctgcggtgctggcctccctcctggtcctgctggccctgctgctggccgccctgctctatgtcaagtgccgtctcaacgtgctgctctggtaccaggacgcgtatggggaggtggagataaacgacgggaagctctacgacgcctacgtctcctacagcgactgccccgaggaccgcaagttcgtgaacttcatcctaaagccgcagctggagcggcgtcggggctacaagctcttcctggacgaccgcgacctcctgccgcgcgctgagccctccgccgacctcttggtgaacctgagccgctgccgacgcctcatcgtggtgctttcggacgccttcctgagccgggcctggtgcagccacagcttccgggagggcctgtgccggctgctggagctcacccgcagacccatcttcatcaccttcgagggccagaggcgcgaccccgcgcacccggcgctccgcctgctgcgccagcaccgccacctggtgaccttgctgctctggaggcccggctccgtgactccttcctccgatttttggaaagaagtgcagctggcgctgccgcggaaggtgcagtacaggcctgtggaaggagacccccagacgcagctgcaggacgacaaggaccccatgctgattcttcgaggccgagtccctgagggccgggccctggactcagaggtggacccggaccctgagggcgacctgggtgtccgggggcctgtctttggagagccatcagctccaccgcacaccagtggggtctcgctgggagagagccggagcagcgaagtggacgtctcggatctcggctcgcgaaactacagtgcccgcacagacttctactgcctggtgtccaaggatgatatgtagctcccaccccagagtgcaggatcatagggacagcgggggccagggcagcggcgtcgctcctctgctcaacaggaccacaacccctgccagcagccctgggaccctgccagcagccctgggaaaaggctgtggcctcagggcgcctcccagtgccagaaaataaagtccttttggattctg

SEQ ID NO: 50178 - DNA, 1598 bp, Artificial Sequence
  derived and/or modified sequence
ggtgagtggcggtcgccatcagacccgcgaagcctctgacctgtccaggtgccctgtccagctgactgcaaggacagagaggagtcctgcccagctcttggatcagtctgctggccgaggagcccggtggagccaggggtgaccctggagcccagcctgccccgaggaggccccggctcagagccatgccaggtgtctgtgatagggcccctgacttcctctccccgtctgaagaccaggtgctgaggcctgccttgggcagctcagtggctctgaactgcacggcttgggtagtctctgggccccactgctccctgccttcagtccagtggctgaaagacgggcttccattgggaattgggggccactacagcctccacgagtactcctgggtcaaggccaacctgtcagaggtgcttgtgtccagtgtcctgggggtcaacgtgaccagcactgaagtctatggggccttcacctgctccatccagaacatcagcttctcctccttcactcttcagagagctggccctacaagccacgtggctgcggtgctggcctccctcctggtcctgctggccctgctgctggccgccctgctctatgtcaagtgccgtctcaacgtgctgctctggtaccaggacgcgtatggggaggtggagataaacgacgggaagctctacgacgcctacgtctcctacagcgactgccccgaggaccgcaagttcgtgaacttcatcctaaagccgcagctggagcggcgtcggggctacaagctcttcctggacgaccgcgacctcctgccgcgcgctgagccctccgccgacctcttggtgaacctgagccgctgccgacgcctcatcgtggtgctttcggacgccttcctgagccgggcctggtgcagccacagcttccgggagggcctgtgccggctgctggagctcacccgcagacccatcttcatcaccttcgagggccagaggcgcgaccccgcgcacccggcgctccgcctgctgcgccagcaccgccacctggtgaccttgctgctctggaggcccggctccgtgactccttcctccgatttttggaaagaagtgcagctggcgctgccgcggaaggtgcagtacaggcctgtggaaggagacccccagacgcagctgcaggacgacaaggaccccatgctgattcttcgaggccgagtccctgagggccgggccctggactcagaggtggacccggaccctgagggcgacctgggtgtccgggggcctgtctttggagagccatcagctccaccgcacaccagtggggtctcgctgggagagagccggagcagcgaagtggacgtctcggatctcggctcgcgaaactacagtgcccgcacagacttctactgcctggtgtccaaggatgatatgtagctcccaccccagagtgcaggatcatagggacagcgggggccagggcagcggcgtcgctcctctgctcaacaggaccacaacccctgccagcagccctgggaccctgccagcagccctgggaaaaggctgtggcctcagggcgcctcccagtgccagaaaataaagtccttttggattctg

SEQ ID NO: 50179 - DNA, 1720 bp, Artificial Sequence
  derived and/or modified sequence
aagacacaagccaggtccccaccgcgcttggcgatgcatccatagcagccttggtgctgtggacactccctggggcccagcgaaggggagagtttgctcccaaaggcgcaccaatgaccaacatttgccccccggaggaaagaactggaaccagcctctgacctgtccaggtgccctgtccagctgactgcaaggacagagaggagtcctgcccagctcttggatcagtctgctggccgaggagcccggtggagccaggggtgaccctggagcccagcctgccccgaggaggccccggctcagagccatgccaggtgtctgtgatagggcccctgacttcctctccccgtctgaagaccaggtgctgaggcctgccttgggcagctcagtggctctgaactgcacggcttgggtagtctctgggccccactgctccctgccttcagtccagtggctgaaagacgggcttccattgggaattgggggccactacagcctccacgagtactcctgggtcaaggccaacctgtcagaggtgcttgtgtccagtgtcctgggggtcaacgtgaccagcactgaagtctatggggccttcacctgctccatccagaacatcagcttctcctccttcactcttcagagagctggccctacaagccacgtggctgcggtgctggcctccctcctggtcctgctggccctgctgctggccgccctgctctatgtcaagtgccgtctcaacgtgctgctctggtaccaggacgcgtatggggaggtggagataaacgacgggaagctctacgacgcctacgtctcctacagcgactgccccgaggaccgcaagttcgtgaacttcatcctaaagccgcagctggagcggcgtcggggctacaagctcttcctggacgaccgcgacctcctgccgcgcgctgagccctccgccgacctcttggtgaacctgagccgctgccgacgcctcatcgtggtgctttcggacgccttcctgagccgggcctggtgcagccacagcttccgggagggcctgtgccggctgctggagctcacccgcagacccatcttcatcaccttcgagggccagaggcgcgaccccgcgcacccggcgctccgcctgctgcgccagcaccgccacctggtgaccttgctgctctggaggcccggctccgtgactccttcctccgatttttggaaagaagtgcagctggcgctgccgcggaaggtgcagtacaggcctgtggaaggagacccccagacgcagctgcaggacgacaaggaccccatgctgattcttcgaggccgagtccctgagggccgggccctggactcagaggtggacccggaccctgagggcgacctgggtgtccgggggcctgtctttggagagccatcagctccaccgcacaccagtggggtctcgctgggagagagccggagcagcgaagtggacgtctcggatctcggctcgcgaaactacagtgcccgcacagacttctactgcctggtgtccaaggatgatatgtagctcccaccccagagtgcaggatcatagggacagcgggggccagggcagcggcgtcgctcctctgctcaacaggaccacaacccctgccagcagccctgggaccctgccagcagccctgggaaaaggctgtggcctcagggcgcctcccagtgccagaaaataaagtccttttggattctg

SEQ ID NO: 50180 - DNA, 1233 bp, Artificial Sequence
  derived and/or modified sequence
atgcccggcgtgtgcgacagagcccccgacttcctgagccccagcgaggaccaggtgctgagacccgccctgggcagcagcgtggccctgaactgcaccgcctgggtggtgagcggcccccactgcagcctgcccagcgtgcagtggctgaaggacggcctgcccctgggcatcggcggccactacagcctgcacgagtacagctgggtgaaggccaacctgagcgaggtgctggtgagcagcgtgctgggcgtgaacgtgaccagcaccgaggtgtacggcgccttcacctgcagcatccagaacatcagcttcagcagcttcaccctgcagagagccggccccaccagccacgtggccgccgtgctggccagcctgctggtgctgctggccctgctgctggccgccctgctgtacgtgaagtgcagactgaacgtgctgctgtggtaccaggacgcctacggcgaggtggagatcaacgacggcaagctgtacgacgcctacgtgagctacagcgactgccccgaggacagaaagttcgtgaacttcatcctgaagccccagctggagagaagaagaggctacaagctgttcctggacgacagagacctgctgcccagagccgagcccagcgccgacctgctggtgaacctgagcagatgcagaagactgatcgtggtgctgagcgacgccttcctgagcagagcctggtgcagccacagcttcagagagggcctgtgcagactgctggagctgaccagaagacccatcttcatcaccttcgagggccagagaagagaccccgcccaccccgccctgagactgctgagacagcacagacacctggtgaccctgctgctgtggagacccggcagcgtgacccccagcagcgacttctggaaggaggtgcagctggccctgcccagaaaggtgcagtacagacccgtggagggcgacccccagacccagctgcaggacgacaaggaccccatgctgatcctgagaggcagagtgcccgagggcagagccctggacagcgaggtggaccccgaccccgagggcgacctgggcgtgagaggccccgtgttcggcgagcccagcgcccccccccacaccagcggcgtgagcctgggcgagagcagaagcagcgaggtggacgtgagcgacctgggcagcagaaactacagcgccagaaccgacttctactgcctggtgagcaaggacgacatgtag

SEQ ID NO: 50181 - protein, 576 aa, Artificial Sequence
  derived and/or modified sequence
MAVLFFHTMRYKSQDPRNPHNDRFVLSKGHAAPILYAVWAEAGFLAEAELLNLRKISSDLDGHPVPKQAFTDVATGSLGQGLGAACGMAYTGKYFDKASYRVYCLLGDGELSEGSVWEAMAFASIYKLDNLVAILDINRLGQSDPAPLQHQMDIYQKRCEAFGWHAIIVDGHSVEELCKAFGQAKHQPTAIIAKTFKGRGITGVEDKESWHGKPLPKNMAEQIIQEIYSQIQSKKKILATPPQEDAPSVDIANIRMPSLPSYKVGDKIATRKAYGQALAKLGHASDRIIALDGDTKNSTFSEIFKKEHPDRFIECYIAEQNMVSIAVGCATRNRTVPFCSTFAAFFTRAFDQIRMAAISESNINLCGSHCGVSIGEDGPSQMALEDLAMFRSVPTSTVFYPSDGVATEKAVELAANTKGICFIRTSRPENAIIYNNNEDFQVGQAKVVLKSKDDQVTVIGAGVTLHEALAAAELLKKEKINIRVLDPFTIKPLDRKLILDSARATKGRILTVEDHYYEGGIGEAVSSAVVGEPGITVTHLAVNRVPRSGKPAELLKMFGIDRDAIAQAVRGLITKA

SEQ ID NO: 50182 - protein, 623 aa, Artificial Sequence
  derived and/or modified sequence
MESYHKPDQQKLQALKDTANRLRISSIQATTAAGSGHPTSCCSAAEIMAVLFFHTMRYKSQDPRNPHNDRFVLSKGHAAPILYAVWAEAGFLAEAELLNLRKISSDLDGHPVPKQAFTDVATGSLGQGLGAACGMAYTGKYFDKASYRVYCLLGDGELSEGSVWEAMAFASIYKLDNLVAILDINRLGQSDPAPLQHQMDIYQKRCEAFGWHAIIVDGHSVEELCKAFGQAKHQPTAIIAKTFKGRGITGVEDKESWHGKPLPKNMAEQIIQEIYSQIQSKKKILATPPQEDAPSVDIANIRMPSLPSYKVGDKIATRKAYGQALAKLGHASDRIIALDGDTKNSTFSEIFKKEHPDRFIECYIAEQNMVSIAVGCATRNRTVPFCSTFAAFFTRAFDQIRMAAISESNINLCGSHCGVSIGEDGPSQMALEDLAMFRSVPTSTVFYPSDGVATEKAVELAANTKGICFIRTSRPENAIIYNNNEDFQVGQAKVVLKSKDDQVTVIGAGVTLHEALAAAELLKKEKINIRVLDPFTIKPLDRKLILDSARATKGRILTVEDHYYEGGIGEAVSSAVVGEPGITVTHLAVNRVPRSGKPAELLKMFGIDRDAIAQAVRGLITKA

SEQ ID NO: 50183 - DNA, 1731 bp, Artificial Sequence
  derived and/or modified sequence
atggccgtgctgttcttccacaccatgagatacaagagccaggaccccagaaacccccacaacgacagattcgtgctgagcaagggccacgccgcccccatcctgtacgccgtgtgggccgaggccggcttcctggccgaggccgagctgctgaacctgagaaagatcagcagcgacctggacggccaccccgtgcccaagcaggccttcaccgacgtggccaccggcagcctgggccagggcctgggcgccgcctgcggcatggcctacaccggcaagtacttcgacaaggccagctacagagtgtactgcctgctgggcgacggcgagctgagcgagggcagcgtgtgggaggccatggccttcgccagcatctacaagctggacaacctggtggccatcctggacatcaacagactgggccagagcgaccccgcccccctgcagcaccagatggacatctaccagaagagatgcgaggccttcggctggcacgccatcatcgtggacggccacagcgtggaggagctgtgcaaggccttcggccaggccaagcaccagcccaccgccatcatcgccaagaccttcaagggcagaggcatcaccggcgtggaggacaaggagagctggcacggcaagcccctgcccaagaacatggccgagcagatcatccaggagatctacagccagatccagagcaagaagaagatcctggccacccccccccaggaggacgcccccagcgtggacatcgccaacatcagaatgcccagcctgcccagctacaaggtgggcgacaagatcgccaccagaaaggcctacggccaggccctggccaagctgggccacgccagcgacagaatcatcgccctggacggcgacaccaagaacagcaccttcagcgagatcttcaagaaggagcaccccgacagattcatcgagtgctacatcgccgagcagaacatggtgagcatcgccgtgggctgcgccaccagaaacagaaccgtgcccttctgcagcaccttcgccgccttcttcaccagagccttcgaccagatcagaatggccgccatcagcgagagcaacatcaacctgtgcggcagccactgcggcgtgagcatcggcgaggacggccccagccagatggccctggaggacctggccatgttcagaagcgtgcccaccagcaccgtgttctaccccagcgacggcgtggccaccgagaaggccgtggagctggccgccaacaccaagggcatctgcttcatcagaaccagcagacccgagaacgccatcatctacaacaacaacgaggacttccaggtgggccaggccaaggtggtgctgaagagcaaggacgaccaggtgaccgtgatcggcgccggcgtgaccctgcacgaggccctggccgccgccgagctgctgaagaaggagaagatcaacatcagagtgctggaccccttcaccatcaagcccctggacagaaagctgatcctggacagcgccagagccaccaagggcagaatcctgaccgtggaggaccactactacgagggcggcatcggcgaggccgtgagcagcgccgtggtgggcgagcccggcatcaccgtgacccacctggccgtgaacagagtgcccagaagcggcaagcccgccgagctgctgaagatgttcggcatcgacagagacgccatcgcccaggccgtgagaggcctgatcaccaaggcctag

SEQ ID NO: 50184 - DNA, 1872 bp, Artificial Sequence
  derived and/or modified sequence
atggagagctaccacaagcccgaccagcagaagctgcaggccctgaaggacaccgccaacagactgagaatcagcagcatccaggccaccaccgccgccggcagcggccaccccaccagctgctgcagcgccgccgagatcatggccgtgctgttcttccacaccatgagatacaagagccaggaccccagaaacccccacaacgacagattcgtgctgagcaagggccacgccgcccccatcctgtacgccgtgtgggccgaggccggcttcctggccgaggccgagctgctgaacctgagaaagatcagcagcgacctggacggccaccccgtgcccaagcaggccttcaccgacgtggccaccggcagcctgggccagggcctgggcgccgcctgcggcatggcctacaccggcaagtacttcgacaaggccagctacagagtgtactgcctgctgggcgacggcgagctgagcgagggcagcgtgtgggaggccatggccttcgccagcatctacaagctggacaacctggtggccatcctggacatcaacagactgggccagagcgaccccgcccccctgcagcaccagatggacatctaccagaagagatgcgaggccttcggctggcacgccatcatcgtggacggccacagcgtggaggagctgtgcaaggccttcggccaggccaagcaccagcccaccgccatcatcgccaagaccttcaagggcagaggcatcaccggcgtggaggacaaggagagctggcacggcaagcccctgcccaagaacatggccgagcagatcatccaggagatctacagccagatccagagcaagaagaagatcctggccacccccccccaggaggacgcccccagcgtggacatcgccaacatcagaatgcccagcctgcccagctacaaggtgggcgacaagatcgccaccagaaaggcctacggccaggccctggccaagctgggccacgccagcgacagaatcatcgccctggacggcgacaccaagaacagcaccttcagcgagatcttcaagaaggagcaccccgacagattcatcgagtgctacatcgccgagcagaacatggtgagcatcgccgtgggctgcgccaccagaaacagaaccgtgcccttctgcagcaccttcgccgccttcttcaccagagccttcgaccagatcagaatggccgccatcagcgagagcaacatcaacctgtgcggcagccactgcggcgtgagcatcggcgaggacggccccagccagatggccctggaggacctggccatgttcagaagcgtgcccaccagcaccgtgttctaccccagcgacggcgtggccaccgagaaggccgtggagctggccgccaacaccaagggcatctgcttcatcagaaccagcagacccgagaacgccatcatctacaacaacaacgaggacttccaggtgggccaggccaaggtggtgctgaagagcaaggacgaccaggtgaccgtgatcggcgccggcgtgaccctgcacgaggccctggccgccgccgagctgctgaagaaggagaagatcaacatcagagtgctggaccccttcaccatcaagcccctggacagaaagctgatcctggacagcgccagagccaccaagggcagaatcctgaccgtggaggaccactactacgagggcggcatcggcgaggccgtgagcagcgccgtggtgggcgagcccggcatcaccgtgacccacctggccgtgaacagagtgcccagaagcggcaagcccgccgagctgctgaagatgttcggcatcgacagagacgccatcgcccaggccgtgagaggcctgatcaccaaggcctag

SEQ ID NO: 50185 - DNA, 1731 bp, Artificial Sequence
  derived and/or modified sequence
atggccgtgcttttctttcacaccatgcgctacaagagccaagatccgcggaaccctcataacgacagattcgtcctgagtaaagggcacgctgcccctattttgtacgctgtctgggcagaggctggatttttggccgaggctgagctccttaacctcaggaagattagctctgacttagatggacatcctgtacctaaacaggcattcactgacgtagcgacggggtccctaggccagggcctgggtgcggcatgcggaatggcttacacaggcaaatatttcgacaaagcatcatacagggtgtactgtctgcttggcgacggagagttgtcggaagggagcgtctgggaagccatggccttcgcatccatctacaaacttgacaatctcgtcgccatcctggatatcaatcgactcgggcagtctgacccagcacctctccagcaccagatggacatttaccagaaaagatgtgaagctttcggctggcacgccatcattgtcgatggacacagcgttgaggagctctgtaaagccttcggccaggctaaacaccagcccaccgccattattgctaaaactttcaagggccggggaatcactggggtcgaagataaggaatcctggcatggaaagcctctcccgaaaaatatggccgaacagattattcaggaaatctacagtcagatccaatcaaagaagaagatcctcgcaacgccccctcaggaggatgctccatcagtggatatcgcgaacattcgcatgccctccctgccgagctataaggtgggcgataagattgcaacaaggaaggcatatggccaggcattggccaaactgggccatgcctctgaccggattattgccctggacggtgacacgaagaattcaacatttagcgaaatatttaagaaagagcaccccgaccgattcatcgaatgctacatcgcagagcagaacatggtgtctattgcagtaggttgcgccacacgaaaccgaacggtgccgttttgctccaccttcgcagcctttttcaccagagctttcgaccaaatcaggatggccgccatcagtgaatccaatattaatttatgtgggagccactgcggcgtctctatcggagaagatggcccctcacaaatggccttagaagatcttgccatgttcaggagcgttcccacctctaccgttttttaccctagcgatggcgtggccacggaaaaagcggttgaactcgctgctaacaccaagggcatctgttttatccggacaagtagacctgagaatgctatcatttacaacaataatgaggacttccaggtagggcaggccaaagtagtcctgaaaagtaaagatgatcaagttaccgtcatcggcgctggggtgacacttcacgaagcactcgcagccgcagagttgctcaagaaagagaaaatcaatataagagttctggatccattcactatcaagcccctggacagaaagctcattctggactccgctcgggccacgaaagggcggatattgactgtggaagaccactattacgagggcgggatcggtgaggcagtaagctctgccgtggtcggggagcctggcataactgttacacacctggccgtgaacagggtcccccgctccgggaaaccggctgagctgctaaagatgtttggaatcgatcgtgatgcaatcgcccaggccgtgcgtggactcataacaaaggcctag

SEQ ID NO: 50186 - DNA, 1872 bp, Artificial Sequence
  derived and/or modified sequence
atggagagctaccataaacccgatcagcagaagctccaggccctcaaagacaccgcgaaccgactccgcatttcatcaattcaagctaccaccgccgcagggtcaggacacccgacctcctgctgttcagccgccgaaattatggccgtgctcttctttcataccatgcgatacaagagtcaggacccaagaaaccctcacaacgaccggtttgtactgagtaagggacatgccgcccccattttgtacgccgtctgggccgaagccggctttctggcagaagcagaactccttaacctgcgcaagatttccagcgacctagacggtcatcctgtgcccaagcaggcatttacagacgtggccaccggcagcctgggacagggactgggggccgcgtgtgggatggcctatacaggcaagtacttcgacaaagcgagctaccgcgtctattgcctcctgggcgatggagagctctctgagggctcggtttgggaggccatggccttcgcttccatttacaaactagataatcttgtcgcgattctcgatatcaacaggctgggccagtccgaccccgcccctcttcagcaccaaatggacatctatcaaaaaagatgcgaagctttcggttggcatgccatcattgtggacggacatagcgtggaagaattatgtaaggctttcggacaagccaagcaccagcccaccgcgattatagccaaaacattcaaaggaagaggaattacaggagtcgaagacaaggagagctggcacggaaaaccactccccaaaaacatggcggaacagatcatccaagagatctatagccagattcagtctaagaaaaagattctggcaactccacctcaggaagatgcccccagcgtagatattgcaaacatcaggatgcccagcctcccctcttacaaggtaggagacaaaattgctacaagaaaggcatatggacaggcccttgctaagctgggccatgctagtgatcggattattgccttggacggcgacaccaagaactctaccttttccgaaattttcaagaaagaacaccctgaccggtttatcgagtgctatatcgctgagcagaacatggtgtctatcgcggtgggatgcgcaacgcgaaaccggaccgtacctttctgttctacttttgctgcttttttcacccgagccttcgatcagattcgcatggccgctatttctgaaagtaatattaacctctgcggcagccactgtggggtgagcattggagaagatggccccagccagatggctctggaggaccttgccatgtttaggagtgttccaactagcaccgtgttctacccgtccgacggcgtagctacggaaaaggccgtggagcttgccgcaaatacgaagggcatttgcttcattcgtacatctcggcctgagaatgcgatcatttacaacaataatgaggattttcaagttggccaggccaaagttgtgctcaagagtaaagacgaccaggtgacagttattggggcaggggtgactctccacgaggctttagcagccgcagagctcctgaagaaggaaaagatcaatatacgtgtgctcgatccatttaccatcaagcccctcgaccgaaagctgattctggatagcgcacgcgccaccaaaggcaggattctgacggttgaggatcactactatgagggaggaattggtgaagccgtttctagcgccgtggttggggaacctggcataaccgttacacacttggcagtcaatagagtgccgagatctggtaaacccgccgaattgctgaagatgtttggcattgaccgcgacgctatcgcgcaggcagtgcgcggactcattaccaaagcatag

SEQ ID NO: 50187 - DNA, 1872 bp, Artificial Sequence
  derived and/or modified sequence
atggaaagttaccataaaccagaccaacaaaagcttcaagccctgaaggacaccgccaaccggttgcggatatcatcaatccaggctacaacagctgccggcagcggtcatcctacaagctgttgttcggcggcagaaatcatggcagttctattttttcacacaatgaggtacaagtcacaggaccctcgtaatcctcacaatgacagattcgtgctgagcaagggccacgccgcgcccattctgtacgcagtatgggccgaagcaggcttcttggccgaagccgagctacttaacctacgaaagatttcctccgatctcgatgggcaccccgttcccaaacaggcatttacagacgtggccacagggagcctcgggcaagggctcggggccgcctgcgggatggcttacaccggaaagtacttcgacaaggccagctatagagtttactgcctgttgggagacggcgaactgagtgaggggtccgtgtgggaggccatggcctttgcctccatttacaagctagataatctggtagctatcttagacatcaatcgcttgggacagtccgacccagcacccttgcagcaccagatggacatctatcagaagcgctgcgaggccttcgggtggcatgccattatcgttgacggccacagcgtcgaagagctctgcaaagcctttgggcaggcaaagcaccagcccactgccattatcgcaaagacttttaaaggacgtgggattacgggtgtggaggacaaggagtcttggcacggaaagccactgccaaaaaacatggcagagcagattatccaggagatttactctcagatacagtcaaagaaaaagatcctcgcgactccaccacaggaagatgcaccaagcgtggatatcgctaacatcagaatgcccagcctgcctagctacaaagtgggtgacaagatcgccacccggaaggcttacgggcaggctctggccaagctaggacacgcctcagaccggataatcgcccttgacggcgatactaaaaattctaccttctcggaaatcttcaaaaaggaacatcccgacagattcatcgagtgctatattgccgaacagaacatggtgtcaattgccgtgggctgtgcaacacggaaccgtacagtgccattttgcagcacttttgccgcctttttcaccagggccttcgaccagatccgaatggcagccatctcagagtctaacattaatttgtgcggcagccactgtggagtttcaattggcgaagacgggcccagccagatggcgctggaagatctggcaatgttcaggtccgtccccacctcaacggtcttttacccctcagacggcgttgctaccgaaaaggccgtggaactggccgccaatacaaaaggtatctgttttatccgtacctcacgccccgagaacgcaatcatctataataacaacgaagatttccaggttgggcaagccaaggtggtattaaaatcaaaggacgaccaggttactgtgattggggctggcgtgacattgcacgaagcgttggccgccgccgaactgttgaagaaggagaaaatcaacattcgggtgcttgatccattcactataaagccactggataggaaactgattcttgacagtgcacgcgccaccaaaggaagaatcctcaccgttgaggaccactactacgaaggcgggatcggggaggcggtatctagcgccgtagtaggtgagccaggaatcacagtgactcaccttgcggtcaacagagtgccccggagcggaaagcctgccgagctgttgaaaatgtttggcattgaccgggatgccatcgcacaggccgttcgcggactgattaccaaggcatag

SEQ ID NO: 50188 - DNA, 1731 bp, Artificial Sequence
  derived and/or modified sequence
atggctgtgctcttcttccacaccatgagatacaagagccaggaccccaggaacccccacaatgacagatttgtgctgagcaagggccatgctgcccccatcctgtatgctgtgtgggccgaggccggcttcctggccgaggccgagctgctgaacctgaggaagatcagcagtgacctggatggccaccctgtgcccaagcaggccttcacagatgtggccaccggcagcctgggccagggcctgggcgccgcctgtggcatggcctacacaggcaagtactttgacaaggccagctacagagtgtactgcctgctgggagatggagagctgtctgagggctctgtgtgggaggccatggcctttgccagcatctacaagctggacaacctggtggccatcctggacatcaaccggctgggccagagcgaccctgcccccctgcagcaccagatggacatctaccagaagagatgtgaggccttcggctggcacgccatcatcgtggatggccacagcgtggaggagctgtgcaaggccttcggccaggccaagcaccagcccacagccatcatcgccaagaccttcaagggccggggcatcaccggggtggaggacaaggagagctggcacggcaagcccctgcccaagaacatggccgagcagatcatccaggagatctacagccagatccagagcaagaagaagatcctggccaccccaccccaggaggatgcccccagcgtggacatcgccaacatccgcatgcccagcctgcccagctacaaggtgggggacaagatcgccaccaggaaggcctacggccaggccctggccaagctgggccacgccagtgaccgcatcatcgccctggatggagacaccaagaacagcaccttcagcgagatcttcaagaaggagcacccagaccgcttcatcgagtgctacatcgccgagcagaacatggtgtccattgctgtgggctgtgccaccaggaacagaacagtgcccttctgcagcacctttgctgccttcttcacccgggcctttgaccagatccgcatggccgccatcagcgagagcaacatcaacctgtgtggcagccactgcggcgtgtccatcggggaggatggccccagccagatggccctggaggacctggccatgttccgctctgtgcccaccagcacagtgttctaccccagtgatggagtggccacagagaaggctgtggagctggccgccaacaccaagggcatctgcttcatccgcaccagcaggccagaaaatgccatcatctacaacaacaatgaagacttccaggtgggccaggccaaggtggtgctgaagagcaaggatgaccaggtgacagtgattggagctggggtgaccctgcacgaggccctggccgctgctgagctgctgaagaaggagaagatcaacatccgggtgctggaccccttcaccatcaagcccctggacaggaagctgatcctggacagcgcccgggccaccaagggccgcatcctgactgtggaggaccactactatgaaggaggcattggagaggccgtgtcctctgctgtggtgggggagcccggcatcaccgtgacccacctggccgtgaacagagtgcccaggtctgggaagccagctgagctgctgaagatgtttggcatcgacagagatgccatcgcccaggccgtgcggggcctcatcaccaaggcctag

SEQ ID NO: 50189 - DNA, 1872 bp, Artificial Sequence
  derived and/or modified sequence
atggagagctaccacaagccagaccagcagaagctgcaggccctgaaggacacagccaaccggctgcgcatcagcagcatccaggccaccacagctgctggcagcggccaccccaccagctgctgcagcgctgctgagatcatggctgtgctcttcttccacaccatgagatacaagagccaggaccccaggaacccccacaatgacagatttgtgctgagcaaaggacatgctgcccccatcctgtatgctgtgtgggccgaggccggcttcctggccgaggccgagctgctgaacctgaggaagatcagcagtgacctggatggccaccctgtgcccaagcaggccttcacagatgtggccaccggcagcctgggccagggcctgggcgccgcctgtggcatggcctacaccgggaagtactttgacaaggccagctacagagtgtactgcctgctgggagatggagagctgtctgagggctctgtgtgggaggccatggcctttgccagcatctacaagctggacaacctggtggccatcctggacatcaaccggctgggccagagcgaccctgcccccctgcagcaccagatggacatctaccagaagagatgtgaggccttcggctggcacgccatcatcgtggatggccacagcgtggaggagctgtgcaaggccttcggccaggccaagcaccagcccacagccatcatcgccaagaccttcaagggccggggcatcactggagtggaggacaaggagagctggcacggcaagcccctgcccaagaacatggccgagcagatcatccaggagatctacagccagatccagagcaagaagaagatcctggccaccccaccccaggaggatgcccccagcgtggacatcgccaacatccgcatgcccagcctgcccagctacaaggtgggggacaagatcgccaccaggaaggcctacggccaggccctggccaagctgggccacgccagtgaccgcatcatcgccctggatggagacaccaagaacagcaccttcagcgagatcttcaagaaggagcacccagaccgcttcatcgagtgctacatcgccgagcagaacatggtgtccattgctgtgggctgtgccaccaggaacagaacagtgcccttctgcagcacctttgctgccttcttcacccgggcctttgaccagatccgcatggccgccatcagcgagagcaacatcaacctgtgtggcagccactgcggcgtgtccattggagaagatggccccagccagatggccctggaggacctggccatgttccgctctgtgcccaccagcaccgtcttctaccccagtgatggagtggccacagagaaggctgtggagctggccgccaacaccaagggcatctgcttcatccgcaccagcaggccagaaaatgccatcatctacaacaacaatgaagacttccaggtgggccaggccaaggtggtgctgaagagcaaggatgaccaggtgaccgtcatcggggccggcgtgaccctgcacgaggccctggccgctgctgagctgctgaagaaggagaagatcaacatccgggtgctggaccccttcaccatcaagcccctggacaggaagctgatcctggacagcgcccgggccaccaagggccgcatcctgactgtggaggaccactactatgagggcggcatcggggaggccgtgagcagcgctgtggtgggggagcccggcatcaccgtgacccacctggccgtgaacagagtgcccaggtctgggaagccagctgagctgctgaagatgtttggaattgacagagatgccatcgcccaggccgtgcggggcctcatcaccaaggcctag

SEQ ID NO: 50190 - DNA, 1731 bp, Artificial Sequence
  derived and/or modified sequence
atggccgtgctgttcttccacaccatgcggtacaagagccaggaccctcggaacccccataacgatcggtttgtcttgtccaaaggccatgcagctccgatattatacgccgtgtgggcagaggcaggatttctagccgaggcagaacttcttaacctgaggaagatctccagcgacctggacggccatcccgtcccaaaacaggcttttaccgacgttgccacaggaagcttagggcagggactgggtgcagcctgcggaatggcctacaccggaaaatactttgataaagcgtcctatagagtgtactgtctactgggagacggcgagttgtctgaaggatcagtgtgggaggcaatggcttttgcttcgatctataagctggataacctcgtggccattctggacatcaatagacttggacagtcggaccccgccccactgcaacaccaaatggacatttatcagaaaagatgtgaggcgtttggatggcatgcaatcatcgtagatgggcattccgtcgaggagttgtgcaaggcctttgggcaggcaaaacaccagcccacagcaatcatagcaaagaccttcaagggcagagggatcacgggtgtagaggataaggagtcttggcacggcaaacctctgcctaagaatatggccgaacagattattcaggaaatatatagccagatccagtcaaaaaagaagatcctggccacccctccccaggaagacgcaccctctgtagatattgccaacatccgaatgccctctttaccctcatacaaggtgggcgataaaattgcaacacgaaaagcatatggccaagcactggcaaagctcggccacgcttctgaccgaataattgcactcgatggtgatacaaaaaactccacgttcagcgaaatattcaaaaaggagcaccctgaccgcttcatcgagtgttacatagcggagcagaacatggtttccattgccgtgggctgtgctacacgcaaccggacagtacccttctgcagcacttttgccgcattctttacccgggcgtttgatcagatcaggatggcagcaatctccgaaagtaatattaacttgtgtggaagtcattgtggagtcagtattggagaggatggtccgtctcagatggctctggaggacctggcaatgtttaggagcgtgcctacctccacagtcttctacccctctgatggcgtcgccactgaaaaagcagtcgaattagccgccaataccaagggtatatgtttcattcgtacctctagaccagagaacgccatcatctataataacaatgaggactttcaggtgggtcaggcaaaggttgtcttgaagtctaaggatgaccaggtgactgtgatcggcgctggcgtgacgttgcatgaagccctggctgctgccgagctactgaaaaaggagaagatcaacatccgcgttcttgaccctttcacaattaagcctttggaccggaaactgatactggattcggcacgggcaaccaagggaaggattttgacggttgaggaccattattacgagggaggcattggggaggccgtgtcctcagccgtggtaggagagcccggaattacagtcacccatttggcagtgaatcgggttccgagatctggaaagcccgccgagctgctgaagatgttcggcatagacagagatgcaatcgctcaagctgtgagaggcttaattacaaaagcatag

SEQ ID NO: 50191 - DNA, 1872 bp, Artificial Sequence
  derived and/or modified sequence
atggagagctaccacaagcccgaccagcagaagctgcaggccctgaaagacaccgctaatcggctgcgaattagctcgatacaggcaaccaccgccgccggatctggccaccctacaagctgctgcagcgctgcagagattatggcagtgctgttcttccacactatgagatataaatcacaggatcctaggaacccgcacaatgatcgatttgtgctgagcaagggtcacgccgcacccatcctgtatgccgtgtgggccgaggctggattcctggcagaagcggagctcctgaatctgcgcaagatctcaagtgacctggatggccaccctgtgccgaagcaggctttcaccgacgttgcaaccggctcactgggccaggggttgggagcagcatgtggaatggcctatacaggtaagtattttgacaaagcatcctaccgcgtgtattgcttgctcggggacggcgagctttctgaggggagtgtttgggaggccatggcattcgcctcaatctataaattggacaacctggtggctatactggatatcaaccggctgggccagagcgaccccgctcctctccagcatcagatggacatttaccagaaacgctgcgaggcttttgggtggcacgctataatcgttgacggacactctgtggaggagttatgcaaagcattcggacaggccaagcaccagcctacagccatcatcgcaaaaacattcaaaggtaggggaatcacaggcgtagaggacaaagagtcgtggcacggaaagcccctcccaaagaacatggccgaacagattatccaggaaatctactcccagatccagtctaaaaagaagatcctggcaacccccccacaggaggacgctccatcagtggacattgctaacattcggatgccgtcactgccatcatataaggtgggagacaagatcgcaaccagaaaggcctatgggcaggcactggcaaaattaggccatgcttcagaccggattatcgcccttgatggagatacaaagaatagcacattctcagaaatatttaaaaaagaacacccagataggttcatcgagtgttacatagccgagcagaacatggttagtatcgctgtcgggtgcgcaactcggaacagaacagtgcctttctgcagcacctttgcggcattctttacccgcgccttcgaccaaattcggatggctgcgatctccgaatccaatatcaatctgtgcggttctcattgcggagtgtccatcggcgaagacggcccaagccagatggccctcgaggatctggcgatgttcagaagtgttcctacctccaccgtgttttacccctcagatggggtggctaccgagaaagcagtggagctggccgctaatacaaaggggatctgttttatacggactagccggcctgaaaacgctattatttataataataatgaagattttcaggtcggacaggccaaggtcgtactcaagtctaaggatgaccaggtgacggtaatcggagccggtgtgaccttacacgaagcattagccgcagcagagctgctcaaaaaggaaaaaataaacattcgagtgttagaccccttcaccattaaaccactggatcgaaaactcattctggacagcgcacgggccacgaagggcaggatattaacggtggaagaccattattatgagggcggcatcggggaggctgtctcatctgccgtggtcggggaacctgggataacagtgacacacttggcagtcaaccgcgttccccggtccggtaagcctgcggaactcctgaaaatgttcggcatcgatcgggatgcgatcgcacaggcagtcagggggctgattacaaaagcgtag

SEQ ID NO: 50192 - DNA, 1872 bp, Artificial Sequence
  derived and/or modified sequence
atggagagctaccacaagcccgaccagcagaagctgcaggccctgaaggacaccgccaatcggctaaggatcagttctatacaggcgacaaccgccgctgggagtggccaccccacgagttgttgttccgccgccgagattatggccgtactgttcttccacaccatgcgttataagtctcaggatcctcggaatcctcacaatgataggttcgtcctgtctaaaggtcacgccgctcctatcctatacgctgtgtgggctgaagccgggttcctggccgaggcggaactgctgaatctacgcaagatctccagtgaccttgacggtcacccggtgcctaaacaggcctttacagatgtggccaccggtagtctcggtcaaggtctaggggcagcttgcggtatggcgtacacgggcaaatacttcgacaaggcttcttacagagtgtattgcctgctgggcgacggtgagctgagcgaggggagcgtgtgggaggccatggctttcgcatctatatataagctggacaatctggtagctatcttagatattaatcggctggggcaatcagatccagctcccctgcagcaccaaatggatatctatcagaaaagatgcgaagccttcgggtggcatgccatcatcgtcgacggccattcggtggaggagctttgcaaagcatttgggcaggcaaagcaccagccgactgctataattgcaaagacctttaagggacgcgggataacgggtgtggaggacaaggaaagttggcatggaaaacccctcccaaaaaacatggcagagcaaatcatacaagaaatctacagccagatccaatctaaaaaaaagatcttagccactcctccgcaggaggacgccccctctgttgatatagccaatattagaatgccctctctccccagttataaggtgggggacaagattgccaccagaaaggcatacggccaggcccttgccaagcttggccacgcctctgaccgaattattgccctcgatggcgacaccaagaatagtactttcagtgagatcttcaaaaaagaacaccccgaccgttttatagagtgttatatcgctgagcagaatatggtgtctattgccgtgggctgtgcaacgcgcaaccgcactgtacccttctgctcaaccttcgcggccttcttcaccagggccttcgatcagatacggatggctgctattagcgagtctaatatcaacctgtgcggtagccactgcggcgtttcaatcggcgaggacgggccatcacaaatggccctggaggatcttgctatgtttcgatctgtccctacgtcaactgtcttttatccttcagatggggtggccaccgagaaagcagtggagctcgctgctaatactaaaggcatatgtttcattagaacatctagaccggaaaacgcaatcatctataataacaatgaagatttccaggtagggcaagcaaaggtggttctgaaaagtaaagacgaccaggtcaccgttataggcgccggcgtcacgctccacgaggcactcgccgccgctgagctccttaagaaagaaaaaatcaatattcgggtcctggatccatttactattaagccgctggaccgaaagctgatacttgactcagcccgtgctacaaaaggccgcatcctgacagtggaggaccactactatgaaggggggatcggcgaggctgtgagtagcgctgtggtgggcgaacctgggatcacagtgacacatctggccgtcaacagggttccccgctcaggcaaaccggcagagctcttgaagatgtttggcatcgatagggacgcaatcgcccaagctgtgcggggtttgatcacgaaggcctag

SEQ ID NO: 50193 - DNA, 1731 bp, Artificial Sequence
  derived and/or modified sequence
atggccgtgctttttttccatactatgcgatacaagtctcaggatcccaggaatccacacaatgatagattcgtactgagcaagggccacgctgctcctattctgtatgctgtttgggccgaagccggttttctggcagaagcagaacttctgaacctaaggaagatctctagcgatctggatggacatccggtcccaaagcaggcgtttactgatgtggctacagggtcactggggcaagggttaggcgctgcctgtggcatggcatatacaggaaaatacttcgataaggcctcctatcgggtgtactgtcttctgggagacggagagcttagcgagggcagcgtgtgggaggctatggcctttgcctcaatatataaactagacaacctagttgccatcctggatatcaataggctgggacaaagtgatcccgctccacttcagcaccagatggatatctaccaaaagcgctgcgaggcctttgggtggcatgccattatagtggacgggcattccgtggaagaattgtgcaaggcctttggccaggcgaagcaccagccaacggccataatcgcaaagacttttaagggtcggggtattaccggggttgaggacaaggagtcttggcatggaaaacctctccccaaaaacatggccgaacagataatccaagaaatctacagtcagattcaatctaagaagaaaatcctggccacgccaccccaggaggacgcccctagtgtggatatcgccaatattagaatgcccagtctacctagttacaaggttggtgacaaaatcgctacccgcaaagcctatggccaggctctcgccaagttaggacacgctagcgaccggataatcgcactggacggggacacaaagaattcaacctttagcgagatatttaagaaggagcatccggaccgattcatcgagtgttatattgccgagcagaacatggtctctatagcagtggggtgcgccactaggaaccggactgtgcccttttgcagtactttcgctgcgttcttcacacgggcattcgaccagatcaggatggctgccatctcagagtcaaacatcaacctttgtggtagccactgtggggtcagcatcggtgaggatggcccttctcaaatggctctggaagatctggcaatgttcaggagcgtacccacaagtacagtcttctatccctcagatggtgtagctaccgaaaaagctgtggagcttgcggcaaatactaaggggatctgtttcatcagaacatcccgtccagaaaacgccataatctacaataacaatgaagacttccaggtgggccaggcaaaagtggtcctgaaaagtaaggacgaccaagtcactgtgattggagccggagtaaccttgcatgaagcactggccgctgccgagttattaaaaaaagaaaagattaatatcagggttctggacccattcacgattaaacctctagatcgcaaactaattctggactcggctagggcgaccaagggcagaattctgacggtcgaagaccactattatgaaggcggtattggagaggctgtttctagcgccgttgttggcgaaccaggtatcactgttacacatctggctgtgaatcgggtcccaagatctggaaagcctgctgaacttctcaaaatgtttggtattgatcgggatgcaattgcacaggcagtgcgcggactgattaccaaagcctag

SEQ ID NO: 50194 - DNA, 1872 bp, Artificial Sequence
  derived and/or modified sequence
atggagtcatatcataaacccgaccagcagaagctccaagcactcaaggatacagccaatagactgcgtattagcagcatccaggctaccaccgcggctggcagcggtcatccgacatcatgctgttctgctgccgagatcatggccgtactattttttcatactatgcgttacaaatctcaggatcctagaaatccccacaacgatagatttgtgctgagtaaggggcacgctgcccctatcttgtacgctgtctgggccgaggcagggttcctcgctgaggcagagctactgaacctcaggaaaatctcttctgatctggacggccaccccgtccccaagcaggcctttacggacgtggcaaccgggagcctaggccaaggactgggggctgcatgtggcatggcctacaccggcaagtattttgacaaggctagctacagggtgtactgcctgttgggtgacggtgagctgtcagagggaagcgtgtgggaggccatggcttttgcgagtatttataagctggataacctggtcgccatccttgacatcaatagactggggcaaagcgaccctgctccgctccaacaccagatggacatctatcaaaagagatgtgaggccttcgggtggcatgctattatcgtggatggacattccgtggaagaactatgcaaggcttttggtcaggcgaaacaccaaccgacggctatcattgcaaaaaccttcaagggtagagggataacaggcgtggaggacaaagaatcatggcacggcaaacccttgcctaagaatatggccgaacagattattcaggagatttacagccagatacagtccaaaaaaaagatcttggccacccccccacaggaggatgccccatcggtggatatagcaaacatcaggatgccctccctcccgtcatataaggtgggcgacaaaattgccacccgtaaggcatatggtcaggctctggccaagttaggccatgcctcagataggatcatcgccctagatggagacaccaagaattcaacgttcagtgaaatttttaaaaaagaacatccagacaggttcattgaatgttatattgcagaacagaacatggtgtctatcgccgttgggtgcgccaccaggaaccggacagtccctttctgtagcacatttgcggctttcttcacacgagcattcgaccagatcaggatggccgctatttcagagtctaatataaacttgtgtgggagtcactgtggagtgtcaattggggaagatggcccttctcaaatggccctcgaagacctcgctatgtttcgctccgtccctacatccactgtgttttatcccagtgacggcgtggccactgaaaaggccgtggaactcgcagctaacacgaagggcatctgcttcattaggactagcagacctgagaatgccattatatataataataacgaggatttccaagtgggccaggccaaggttgtccttaagtctaaggacgaccaggtcaccgtgatcggagcaggagtgactctgcatgaggcccttgctgccgcagaattgctcaaaaaagaaaagattaatattcgcgttcttgatccctttaccatcaaacctctggatcgcaagttgatcctggacagtgccagggccaccaaggggcgtatcttgaccgtcgaggaccactactacgaaggcggtatcggggaagctgtaagctctgccgtggtgggagaaccaggaatcactgtcacccatttggccgtgaatcgagtgcctcgaagtggaaagccagccgagctccttaagatgtttggtatagacagggatgcaatcgcacaggctgtccgcggtctgattacaaaagcatag

SEQ ID NO: 50195 - DNA, 1872 bp, Artificial Sequence
  derived and/or modified sequence
atggaaagctaccataaacccgatcaacagaagttgcaggcactgaaggacacagccaatcgattacgcatttcgtcaattcaagccaccacggctgcaggaagcggacaccctacatcgtgctgtagcgctgccgagatcatggcggtgctctttttccacacaatgaggtacaagtctcaggaccccaggaatccccacaacgaccgcttcgtgctctcaaagggccacgccgctcccattctttacgctgtgtgggctgaggcaggtttcctggcagaggcagagctgcttaacctccggaagattagcagcgacctcgacggacacccagttccaaaacaggcttttactgacgtggccactggcagtctgggtcagggccttggggcagcctgcggcatggcttataccggcaagtacttcgataaggcatcgtatcgggtctactgtttactgggggacggcgagctcagtgagggctccgtgtgggaagcaatggcttttgcctcaatctacaagttggacaacctggttgcaattcttgatatcaatagactgggccagagcgacccagcccctctccagcatcagatggacatctatcaaaagcggtgtgaggccttcggctggcatgccatcatcgtagatggtcacagcgtggaagaactttgcaaagcgttcggccaagctaagcatcaacctaccgccatcatcgccaagacgttcaaaggccgtggaatcaccggcgtcgaggacaaggaaagttggcacgggaaacctctgccaaaaaacatggccgaacagatcatccaggaaatctactcccagatccagtcaaaaaagaaaattctcgcgaccccccctcaggaagatgccccaagcgtagatatagccaacatacgcatgcccagtctgccatcttataaggtcggcgacaagatcgcaacaagaaaggcttatgggcaagcactggcaaagcttgggcacgcctccgaccggataattgctttagatggagacacgaaaaattctactttctccgagattttcaaaaaggagcaccctgatcgttttattgagtgttacatagcggagcagaatatggtcagtatcgcagtcgggtgtgccacccgaaatcggacagtacctttttgctccaccttcgccgctttcttcacccgagctttcgatcaaattcgaatggccgctattagcgagtccaatattaacctgtgtggcagccactgcggtgttagcatcggagaggatggcccttcccagatggcactagaggatcttgctatgttccgatcagtgcccacctcaaccgttttttacccgagcgacggggttgctaccgaaaaggcagtcgaactcgccgctaacactaagggtatttgttttattcggacttcccgacccgaaaatgcgataatatacaataacaatgaagactttcaggttggacaggcaaaggtcgtgcttaagtcaaaggatgaccaggtgaccgtcatcggcgcaggcgtgaccctgcatgaggccctcgcagcggctgagttactaaaaaaggagaaaattaacatccgcgtccttgaccctttcaccattaaacctctcgacagaaagctgattcttgattctgcacgtgctaccaagggccgaatccttacggtggaggaccattattatgagggcggtataggtgaagctgtttcctccgccgttgtgggagagcctgggatcacagtgacccacctggctgtgaacagagtgcccagaagcggcaaacctgccgagctgttaaaaatgttcggcatagatcgggatgcgatcgctcaagctgtaaggggcctgattactaaagcatag

SEQ ID NO: 50196 - DNA, 2008 bp, Artificial Sequence
  derived and/or modified sequence
ctcggcagccgcctgtcgccgcgggagcagccgctatctctgtgtgtccgcgtgtgcgcccggtccccgcctgccgcaccatggagagacacggccaaccgcctacgtatcagctccatccaggccaccactgcggcgggctctggccaccccacgtcatgctgcagcgccgcagagatcatggctgtcctctttttccacaccatgcgctacaagtcccaggacccccggaatccgcacaatgaccgctttgtgctctccaagggccatgcagctcccatcctctacgcggtctgggctgaagctggtttcctggccgaggcggagctgctgaacctgaggaagatcagctccgacttggacgggcacccggtcccgaaacaagctttcaccgacgtggccactggctccctgggccagggcctcggggccgcttgtgggatggcctacaccggcaaatacttcgacaaggccagctaccgagtctattgcttgctgggagacggggagctgtcagagggctctgtatgggaggccatggccttcgccagcatctataagctggacaaccttgtggccattctagacatcaatcgcctgggccagagtgacccggccccactgcagcaccagatggacatctaccagaagcggtgcgaggccttcggttggcatgccatcatcgtggatggacacagcgtggaggagctgtgcaaggcctttggccaggccaagcaccagccaacagccatcattgccaagaccttcaagggccgagggatcacgggggtagaagataaggagtcttggcatgggaagcccctccccaaaaacatggctgagcagatcatccaggagatctacagccagatccagagcaaaaagaagatcctggcaacccctccacaggaggacgcaccctcagtggacattgccaacatccgcatgcccagcctgcccagctacaaagttggggacaagatagccacccgcaaggcctacgggcaggcactggccaagctgggccatgccagtgaccgcatcatcgccctggatggggacaccaaaaattccaccttctcggagatcttcaaaaaggagcacccggaccgcttcatcgagtgctacattgctgagcagaacatggtgagcatcgcggtgggctgtgccacccgcaacaggacggtgcccttctgcagcacttttgcagccttcttcacgcgggcctttgaccagattcgcatggccgccatctccgagagcaacatcaacctctgcggctcccactgcggcgtttccatcggggaagacgggccctcccagatggccctagaagatctggctatgtttcggtcagtccccacatcaactgtcttttacccaagtgatggcgttgctacagagaaggcagtggaactagccgccaatacaaagggtatctgcttcatccggaccagccgcccagaaaatgccatcatctataacaacaatgaggacttccaggtcggacaagccaaggtggtcctgaagagcaaggatgaccaggtgaccgttatcggggctggggtgaccctgcacgaggccttggccgctgccgaactgctgaagaaagaaaagatcaacatccgcgtgctggaccccttcaccatcaagcccctggacagaaaactcattctcgacagcgctcgtgccaccaagggcaggatcctcaccgtggaggaccattattatgaaggtggcattggtgaggctgtgtccagtgcagtagtgggcgagcctggcatcactgtcacccacctggcagttaaccgggtaccaagaagtgggaagccggctgagctgctgaagatgtttggtatcgacagggatgccattgcacaagctgtgaggggcctcatcaccaaggcctagggcgggtatgaagtgtggggcgggggtctatacattcctgagattctgggaaaggtgctcaaagatgtactgagaggaggggtaaatatatgttttg

SEQ ID NO: 50197 - DNA, 1931 bp, Artificial Sequence
  derived and/or modified sequence
cgcctgtcgccgcgggagcagccgctatctctgtgtgtccgcgtgtgcgcccggtccccgcctgccgcaccatggagagctaccacaagcctgaccagcagaagctgcaggccttgaaggacacggccaaccgcctacgtatcagctccatccaggccaccactgcggcgggctctggccaccccacgtcatgctgcagcgccgcagagatcatggctgtcctctttttccacaccatgcgctacaagtcccaggacccccggaatccgcacaatgaccgctttgtgctctccaagggccatgcagctcccatcctctacgcggtctgggctgaagctggtttcctggccgaggcggagctgctgaacctgaggaagatcagctccgacttgtgggatggcctacaccggcaaatacttcgacaaggccagctaccgagtctattgcttgctgggaggccatggccttcgccagcatctataagctggacaaccttgtggccattctagacatcaatcgcctgggccagagtgacccggccccactgcagcaccagatggacatctaccagaagcggtgcgaggccttcggttggcatgccatcatcgtggatggacacagcgtggaggagctgtgcaaggcctttggccaggccaagcaccagccaacagccatcattgccaagaccttcaagggccgagggatcacgggggtagaagataaggagtcttggcatgggaagcccctccccaaaaacatggctgagcagatcatccaggagatctacagccagatccagagcaaaaagaagatcctggcaacccctccacaggaggacgcaccctcagtggacattgccaacatccgcatgcccagcctgcccagctacaaagttggggacaagatagccacccgcaaggcctacgggcaggcactggccaagctgggccatgccagtgaccgcatcatcgccctggatggggacaccaaaaattccaccttctcggagatcttcaaaaaggagcacccggaccgcttcatcgagtgctacattgctgagcagaacatggtgagcatcgcggtgggctgtgccacccgcaacaggacggtgcccttctgcagcacttttgcagccttcttcacgcgggcctttgaccagattcgcatggccgccatctccgagagcaacatcaacctctgcggctcccactgcggcgtttccatcggggaagacgggccctcccagatggccctagaagatctggctatgtttcggtcagtccccacatcaactgtcttttacccaagtgatggcgttgctacagagaaggcagtggaactagccgccaatacaaagggtatctgcttcatccggaccagccgcccagaaaatgccatcatctataacaacaatgaggacttccaggtcggacaagccaaggtggtcctgaagagcaaggatgaccaggtgaccgttatcggggctggggtgaccctgcacgaggccttggccgctgccgaactgctgaagaaagaaaagatcaacatccgcgtgctggaccccttcaccatcaagcccctggacagaaaactcattctcgacagcgctcgtgccaccaagggcaggatcctcaccgtggaggaccattattatgaaggtggcattggtgaggctgtgtccagtgcagtagtgggcgagcctggcatcactgtcacccacctggcagttaaccgggtaccaagaagtgggaagccggctgagctgctgaagatgtttggtatcgacagggatgccattgcacaagctgtgaggggcctcatcaccaaggcctagggcgggtatgaagtgtggggcgggggtctatacattcctgagattctgggaaaggtgctcaaagatgtactgagaggaggggtaaatatatgttttg

SEQ ID NO: 50198 - DNA, 2831 bp, Artificial Sequence
  derived and/or modified sequence
gggagcagccgctatctctgtgtgtccgcgtgtgcgcccggtccccgcctgccgcaccatggagagctaccacaagcctgaccagcagaagctgcaggccttgaaggacacggccaaccgcctacgtatcagctccatccaggccaccactgcggcgggctctggccaccccacgtcatgctgcagcgccgcagagatcatggctgtcctctttttccacaccatgcgctacaagtcccaggacccccggaatccgcacaatgaccgctttgtgctctccaagggccatgcagctcccatcctctacgcggtctgggctgaagctggtttcctggccgaggcggagctgctgaacctgaggaagatcagctccgacttggacgggcacccggtcccgaaacaagctttcaccgacgtggccactggctccctgggccagggcctcggggccgcttgtgggatggcctacaccggcaaatacttcgacaaggccagctaccgagtctattgcttgctgggagacggggagctgtcagagggctctgtatgggaggccatggccttcgccagcatctataagctggacaaccttgtggccattctagacatcaatcgcctgggccagagtgacccggccccactgcagcaccagatggacatctaccagaagcggtgcgaggccttcggttggcatgccatcatcgtggatggacacagcgtggaggagctgtgcaaggcctttggccaggccaagcaccagccaacagccatcattgccaagaccttcaagggccgagggatcacgggggtagaagataaggagtcttggcatgggaagcccctccccaaaaacatggctgagcagatcatccaggagatctacagccagatccagagcaaaaagaagatcctggcaacccctccacaggaggacgcaccctcagtggacattgccaacatccgcatgcccagcctgcccagctacaaagttggggacaagatagccacccgcaaggcctacgggcaggcactggccaagctgggccatgccagtgaccgcatcatcgccctggatggggacaccaaaaattccaccttctcggagatcttcaaaaaggagcacccggaccgcttcatcgagtgctacattgctgagcagaacatggtgagcatcgcggtgggctgtgccacccgcaacaggacggtgcccttctgcagcacttttgcagccttcttcacgcgggcctttgaccagattcgcatggccgccatctccgagagcaacatcaacctctgcggctcccactgcggcgtttccatcggggaagacgggccctcccagatggccctagaagatctggctatgtttcggtcagtccccacatcaactgtcttttacccaagtgatggcgttgctacagagaaggcagtggaactagccgccaatacaaagggtatctgcttcatccggaccagccgcccagaaaatgccatcatctataacaacaatgaggacttccaggtcggacaagccaaggtggtcctgaagagcaaggatgaccaggtgaccgttatcggggctggggtgaccctgcacgaggccttggccgctgccgaactgctgaagaaagaaaagatcaacatccgcgtgctggaccccttcaccatcaagcccctggacagaaaactcattctcgacagcgctcgtgccaccaagggcaggatcctcaccgtggaggaccattattatgaaggtggcattggtgaggctgtgtccagtgcagtagtgggcgagcctggcatcactgtcacccacctggcagttaaccgggtaccaagaagtgggaagccggctgagctgctgaagatgtttggtatcgacagggatgccattgcacaagctgtgaggggcctcatcaccaaggcctagggcggccagtgcaggttctggggaagaagcgtggagggtgcgctagggaggctggtgtccttggtcctgggccaggacctgggtgtcccaagtccccttggaatcacctgcaactgccctcaacctccagaactatcgctgcctcccattcatcaccaggtgacatttgactgcaacctgccttctagctgagaggctgagacctacatccctcattgtgacctcagtccacctggccctgagcgggctggggaactgcctcagtctggaagctgaccaggcactctcagggccgccccacctcccccaagtccccacagccttgcagtcaggtctcctgggatagggaggttcacttgcttgttgtccctcgtccttgtcatatccttttaactaggcatctcagagaagcagagacagggcagccttcgtcctgggggaaaagggaccctcaggatggcatgagaggtcctcaatcccaagtgtggaactgtccccctcaacttgttaaaatgcagatttctgggtcttgccaatggggcctgggactccatgtgacaactggcccaggagcttctgatgtcacacagaattctgcagtcccaagctccagccccgacctgctctgctgttcctaggtgactgccctcacactgctgaccacagtggatttctccccctgctgctcgggctcagctggggtcagccctgcttataaggtcaactgtgcaaaaccttatactggccaagaacaaactagtgctgggggaggagggctgggtgccccggccactggtggagtccccaggaaatcctcagagctgttgcgaggatgagacacatttgtggacacgtccacctgtcctcctgaccgtctggagagaataaacctgtcaaagcc

SEQ ID NO: 50199 - DNA, 3010 bp, Artificial Sequence
  derived and/or modified sequence
gcgcccggcctcggcagccgcctgtcgccgcgggagcagccgctatctctgtgtgtccgcgtgtgcgcccggtccccgcctgccgcaccatggagagctaccacaagcctgaccagcagaagctgcaggccttgaaggacacggccaaccgcctacgtatcagctccatccaggccaccactgcggcgggctctggccaccccacgtcatgctgcagcgccgcagagatcatggctgtcctctttttccacaccatgcgctacaagtcccaggacccccggaatccgcacaatgaccgctttgtgctctccaagggccatgcagctcccatcctctacgcggtctgggctgaagctggtttcctggccgaggcggagctgctgaacctgaggaagatcagctccgacttggacgggcacccggtcccgaaacaagctttcaccgacgtggccactggctccctgggccagggcctcggggccgcttgtgggatggcctacaccggcaaatacttcgacaaggccagctaccgagtctattgcttgctgggagacggggagctgtcagagggctctgtatgggaggccatggccttcgccagcatctataagctggacaaccttgtggccattctagacatcaatcgcctgggccagagtgacccggccccactgcagcaccagatggacatctaccagaagcggtgcgaggccttcggttggcatgccatcatcgtggatggacacagcgtggaggagctgtgcaaggcctttggccaggccaagcaccagccaacagccatcattgccaagaccttcaagggccgagggatcacgggggtagaagataaggagtcttggcatgggaagcccctccccaaaaacatggctgagcagatcatccaggagatctacagccagatccagagcaaaaagaagatcctggcaacccctccacaggaggacgcaccctcagtggacattgccaacatccgcatgcccagcctgcccagctacaaagttggggacaagatagccacccgcaaggcctacgggcaggcactggccaagctgggccatgccagtgaccgcatcatcgccctggatggggacaccaaaaattccaccttctcggagatcttcaaaaaggagcacccggaccgcttcatcgagtgctacattgctgagcagaacatggtgagcatcgcggtgggctgtgccacccgcaacaggacggtgcccttctgcagcacttttgcagccttcttcacgcgggcctttgaccagattcgcatggccgccatctccgagagcaacatcaacctctgcggctcccactgcggcgtttccatcggggaagacgggccctcccagatggccctagaagatctggctatgtttcggtcagtccccacatcaactgtcttttacccaagtgatggcgttgctacagagaaggcagtggaactagccgccaatacaaagggtatctgcttcatccggaccagccgcccagaaaatgccatcatctataacaacaatgaggacttccaggtcggacaagccaaggtggtcctgaagagcaaggatgaccaggtgaccgttatcggggctggggtgaccctgcacgaggccttggccgctgccgaactgctgaagaaagaaaagatcaacatccgcgtgctggaccccttcaccatcaagcccctggacagaaaactcattctcgacagcgctcgtgccaccaagggcaggatcctcaccgtggaggaccattattatgaaggtggcattggtgaggctgtgtccagtgcagtagtgggcgagcctggcatcactgtcacccacctggcagttaaccgggtaccaagaagtgggaagccggctgagctgctgaagatgtttggtatcgacagggatgccattgcacaagctgtgaggggcctcatcaccaaggcctagggcgggtatgaagtgtggggcgggggtctatacattcctgagattctgggaaaggtgctcaaagatgtactgagaggaggggtaaatatatgttttgagaaaaatgaattggccctgaaatgttttcttttttgatgtgtttgcagccagtgcaggttctggggaagaagcgtggagggtgcgctagggaggctggtgtccttggtcctgggccaggacctgggtgtcccaagtccccttggaatcacctgcaactgccctcaacctccagaactatcgctgcctcccattcatcaccaggtgacatttgactgcaacctgccttctagctgagaggctgagacctacatccctcattgtgacctcagtccacctggccctgagcgggctggggaactgcctcagtctggaagctgaccaggcactctcagggccgccccacctcccccaagtccccacagccttgcagtcaggtctcctgggatagggaggttcacttgcttgttgtccctcgtccttgtcatatccttttaactaggcatctcagagaagcagagacagggcagccttcgtcctgggggaaaagggaccctcaggatggcatgagaggtcctcaatcccaagtgtggaactgtccccctcaacttgttaaaatgcagatttctgggtcttgccaatggggcctgggactccatgtgacaactggcccaggagcttctgatgtcacacagaattctgcagtcccaagctccagccccgacctgctctgctgttcctaggtgactgccctcacactgctgaccacagtggatttctccccctgctgctcgggctcagctggggtcagccctgcttataaggtcaactgtgcaaaaccttatactggccaagaacaaactagtgctgggggaggagggctgggtgccccggccactggtggagtccccaggaaatcctcagagctgttgcgaggatgagacacatttgtggacacgtccacctgtcctcctgaccgtctggagagaataaacctgtcaaagccaaggtca

SEQ ID NO: 50200 - protein, 581 aa, Artificial Sequence
  derived and/or modified sequence
MPLKHYLLLLVGCQAWGAGLAYHGCPSECTCSRASQVECTGARIVAVPTPLPWNAMSLQILNTHITELNESPFLNISALIALRIEKNELSRITPGAFRNLGSLRYLSLANNKLQVLPIGLFQGLDSLESLLLSSNQLLQIQPAHFSQCSNLKELQLHGNHLEYIPDGAFDHLVGLTKLNLGKNSLTHISPRVFQHLGNLQVLRLYENRLTDIPMGTFDGLVNLQELALQQNQIGLLSPGLFHNNHNLQRLYLSNNHISQLPPSVFMQLPQLNRLTLFGNSLKELSPGIFGPMPNLRELWLYDNHISSLPDNVFSNLRQLQVLILSRNQISFISPGAFNGLTELRELSLHTNALQDLDGNVFRMLANLQNISLQNNRLRQLPGNIFANVNGLMAIQLQNNQLENLPLGIFDHLGKLCELRLYDNPWRCDSDILPLRNWLLLNQPRLGTDTVPVCFSPANVRGQSLIIINVNVAVPSVHVPEVPSYPETPWYPDTPSYPDTTSVSSTTELTSPVEDYTDLTTIQVTDDRSVWGMTQAQSGLAIAAIVIGIVALACSLAACVGCCCCKKRSQAVLMQMKAPNEC

SEQ ID NO: 50201 - protein, 587 aa, Artificial Sequence
  derived and/or modified sequence
MPLDKAMPLKHYLLLLVGCQAWGAGLAYHGCPSECTCSRASQVECTGARIVAVPTPLPWNAMSLQILNTHITELNESPFLNISALIALRIEKNELSRITPGAFRNLGSLRYLSLANNKLQVLPIGLFQGLDSLESLLLSSNQLLQIQPAHFSQCSNLKELQLHGNHLEYIPDGAFDHLVGLTKLNLGKNSLTHISPRVFQHLGNLQVLRLYENRLTDIPMGTFDGLVNLQELALQQNQIGLLSPGLFHNNHNLQRLYLSNNHISQLPPSVFMQLPQLNRLTLFGNSLKELSPGIFGPMPNLRELWLYDNHISSLPDNVFSNLRQLQVLILSRNQISFISPGAFNGLTELRELSLHTNALQDLDGNVFRMLANLQNISLQNNRLRQLPGNIFANVNGLMAIQLQNNQLENLPLGIFDHLGKLCELRLYDNPWRCDSDILPLRNWLLLNQPRLGTDTVPVCFSPANVRGQSLIIINVNVAVPSVHVPEVPSYPETPWYPDTPSYPDTTSVSSTTELTSPVEDYTDLTTIQVTDDRSVWGMTQAQSGLAIAAIVIGIVALACSLAACVGCCCCKKRSQAVLMQMKAPNEC

SEQ ID NO: 50202 - DNA, 1746 bp, Artificial Sequence
  derived and/or modified sequence
atgcccctgaagcactacctgctgctgctggtgggctgccaggcctggggcgccggcctggcctaccacggctgccccagcgagtgcacctgcagcagagccagccaggtggagtgcaccggcgccagaatcgtggccgtgcccacccccctgccctggaacgccatgagcctgcagatcctgaacacccacatcaccgagctgaacgagagccccttcctgaacatcagcgccctgatcgccctgagaatcgagaagaacgagctgagcagaatcacccccggcgccttcagaaacctgggcagcctgagatacctgagcctggccaacaacaagctgcaggtgctgcccatcggcctgttccagggcctggacagcctggagagcctgctgctgagcagcaaccagctgctgcagatccagcccgcccacttcagccagtgcagcaacctgaaggagctgcagctgcacggcaaccacctggagtacatccccgacggcgccttcgaccacctggtgggcctgaccaagctgaacctgggcaagaacagcctgacccacatcagccccagagtgttccagcacctgggcaacctgcaggtgctgagactgtacgagaacagactgaccgacatccccatgggcaccttcgacggcctggtgaacctgcaggagctggccctgcagcagaaccagatcggcctgctgagccccggcctgttccacaacaaccacaacctgcagagactgtacctgagcaacaaccacatcagccagctgccccccagcgtgttcatgcagctgccccagctgaacagactgaccctgttcggcaacagcctgaaggagctgagccccggcatcttcggccccatgcccaacctgagagagctgtggctgtacgacaaccacatcagcagcctgcccgacaacgtgttcagcaacctgagacagctgcaggtgctgatcctgagcagaaaccagatcagcttcatcagccccggcgccttcaacggcctgaccgagctgagagagctgagcctgcacaccaacgccctgcaggacctggacggcaacgtgttcagaatgctggccaacctgcagaacatcagcctgcagaacaacagactgagacagctgcccggcaacatcttcgccaacgtgaacggcctgatggccatccagctgcagaacaaccagctggagaacctgcccctgggcatcttcgaccacctgggcaagctgtgcgagctgagactgtacgacaacccctggagatgcgacagcgacatcctgcccctgagaaactggctgctgctgaaccagcccagactgggcaccgacaccgtgcccgtgtgcttcagccccgccaacgtgagaggccagagcctgatcatcatcaacgtgaacgtggccgtgcccagcgtgcacgtgcccgaggtgcccagctaccccgagaccccctggtaccccgacacccccagctaccccgacaccaccagcgtgagcagcaccaccgagctgaccagccccgtggaggactacaccgacctgaccaccatccaggtgaccgacgacagaagcgtgtggggcatgacccaggcccagagcggcctggccatcgccgccatcgtgatcggcatcgtggccctggcctgcagcctggccgcctgcgtgggctgctgctgctgcaagaagagaagccaggccgtgctgatgcagatgaaggcccccaacgagtgctag

SEQ ID NO: 50203 - DNA, 1764 bp, Artificial Sequence
  derived and/or modified sequence
atgcccctggacaaggccatgcccctgaagcactacctgctgctgctggtgggctgccaggcctggggcgccggcctggcctaccacggctgccccagcgagtgcacctgcagcagagccagccaggtggagtgcaccggcgccagaatcgtggccgtgcccacccccctgccctggaacgccatgagcctgcagatcctgaacacccacatcaccgagctgaacgagagccccttcctgaacatcagcgccctgatcgccctgagaatcgagaagaacgagctgagcagaatcacccccggcgccttcagaaacctgggcagcctgagatacctgagcctggccaacaacaagctgcaggtgctgcccatcggcctgttccagggcctggacagcctggagagcctgctgctgagcagcaaccagctgctgcagatccagcccgcccacttcagccagtgcagcaacctgaaggagctgcagctgcacggcaaccacctggagtacatccccgacggcgccttcgaccacctggtgggcctgaccaagctgaacctgggcaagaacagcctgacccacatcagccccagagtgttccagcacctgggcaacctgcaggtgctgagactgtacgagaacagactgaccgacatccccatgggcaccttcgacggcctggtgaacctgcaggagctggccctgcagcagaaccagatcggcctgctgagccccggcctgttccacaacaaccacaacctgcagagactgtacctgagcaacaaccacatcagccagctgccccccagcgtgttcatgcagctgccccagctgaacagactgaccctgttcggcaacagcctgaaggagctgagccccggcatcttcggccccatgcccaacctgagagagctgtggctgtacgacaaccacatcagcagcctgcccgacaacgtgttcagcaacctgagacagctgcaggtgctgatcctgagcagaaaccagatcagcttcatcagccccggcgccttcaacggcctgaccgagctgagagagctgagcctgcacaccaacgccctgcaggacctggacggcaacgtgttcagaatgctggccaacctgcagaacatcagcctgcagaacaacagactgagacagctgcccggcaacatcttcgccaacgtgaacggcctgatggccatccagctgcagaacaaccagctggagaacctgcccctgggcatcttcgaccacctgggcaagctgtgcgagctgagactgtacgacaacccctggagatgcgacagcgacatcctgcccctgagaaactggctgctgctgaaccagcccagactgggcaccgacaccgtgcccgtgtgcttcagccccgccaacgtgagaggccagagcctgatcatcatcaacgtgaacgtggccgtgcccagcgtgcacgtgcccgaggtgcccagctaccccgagaccccctggtaccccgacacccccagctaccccgacaccaccagcgtgagcagcaccaccgagctgaccagccccgtggaggactacaccgacctgaccaccatccaggtgaccgacgacagaagcgtgtggggcatgacccaggcccagagcggcctggccatcgccgccatcgtgatcggcatcgtggccctggcctgcagcctggccgcctgcgtgggctgctgctgctgcaagaagagaagccaggccgtgctgatgcagatgaaggcccccaacgagtgctag

SEQ ID NO: 50204 - DNA, 1746 bp, Artificial Sequence
  derived and/or modified sequence
atgccactgaaacactatctcttacttctggtcggttgtcaggcctggggcgctggccttgcttaccacggctgtcccagtgagtgcacctgcagtagggcttctcaggtggagtgtaccggtgctcgtatcgtcgcagtcccaactcccttgccttggaatgcaatgagtctgcagattctgaacactcatataacagagctgaacgagagtcctttcttaaatatctctgctttgattgccctgcgcattgagaagaacgaactgagtcggattacaccaggagcttttcggaatcttggatctcttcggtacctgtccctcgccaacaataagttgcaggtgctcccaataggcctcttccaggggctggacagcctggaaagcctgctattgtcctcgaaccagcttctgcaaatacagcccgctcatttttcccagtgtagcaacctgaaggagctccagctccacggcaaccacctggaatacatccccgacggtgcgtttgaccatttggtcggacttactaagctgaacctagggaagaatagcctgacacacatatctccacgcgtgtttcagcacctgggcaacttgcaggtgttgcgactctacgaaaatcggctaacagatattccgatgggaacctttgacggactcgtgaatctgcaggagctcgccctgcagcaaaatcagattggtctgctgtcacctggtctttttcataacaatcacaacctccagaggttgtacctttctaataaccacatcagtcagctgccaccatccgtttttatgcagctgccccagctgaatcgcctaacactgtttggaaactcactcaaagagctttctccaggcatttttgggccgatgcctaacctccgcgaactttggttatatgacaatcacatcagtagtctgccagacaatgtgttctctaacctgcgccaattgcaggtgctcatcctctcaagaaatcagatcagtttcatctccccaggtgcgtttaacggactaacggagctgcgcgaactctccctgcacacaaatgctctccaggatctggacggtaatgtgttccggatgcttgcaaacctccagaatatcagcctgcagaacaataggctgcgtcagttgcctggaaacattttcgcaaatgtcaatggacttatggccattcaacttcagaacaatcagctcgaaaacctgccgctgggcatttttgaccacctgggaaaactttgcgaactgcgcttgtatgacaatccctggcgatgtgattcggacattctgcccctccggaactggctcctactgaaccagccaaggctgggaactgacacagttcccgtgtgcttctccccagcgaatgttaggggccagtccctgatcattattaacgttaatgtggcggtcccctcggtccatgtgccagaggtgccatcttaccctgaaacaccttggtatcctgacacgccatcatatccagacaccacctccgtttcctcaactactgaactcacatcgccagtggaagactacacggacctgaccaccatccaggttaccgacgatcgctctgtgtgggggatgactcaagcccaaagcggactggcgatcgccgcaatcgtgatcggtatcgtggcccttgcgtgtagcttagcagcctgcgtgggatgctgttgttgcaagaagcgcagccaggcagtccttatgcagatgaaggctccgaatgagtgttag

SEQ ID NO: 50205 - DNA, 1764 bp, Artificial Sequence
  derived and/or modified sequence
atgccacttgacaaggcaatgcccctgaagcactaccttctgctgctggtcggctgccaggcgtggggtgcagggctggcctatcacggctgccccagcgaatgtacatgtagtagagcgtcacaggtggaatgtaccggcgcccgcattgttgctgtacccaccccactcccctggaatgcaatgagcctgcaaatcctcaacacccacattactgaactcaacgagagtccgtttcttaacatttcagccttaatcgccttgagaatcgaaaaaaatgaactgtctcgcattacccccggtgcatttcgcaacctcgggtctctcagatatctgagtctcgccaataataagttgcaggtgctccccattggcctcttccagggcttagacagccttgaatctttgttgctctccagtaatcaattgcttcagatccagccggcacactttagccaatgttccaacctgaaggaactccagctgcatggcaatcacctcgaatacatacctgacggtgcttttgatcatctggtcggactgacaaaattgaacctgggaaagaattccctcactcatatcagtcctagagtgtttcagcacctcgggaacctccaggttctgcggctgtatgaaaacagactcactgacattccaatgggcaccttcgatggactcgtgaatctgcaggaactcgccctgcaacagaaccagatcggactgctgtctcctggcctattccataacaaccacaacctgcagcggctgtatctcagcaacaatcatatttcacagctgcctcccagcgtattcatgcaactgccacaactgaaccgattaaccttgtttggcaacagtctgaaggaactgtcgcctggcatctttggtcctatgccaaacctgagggaactatggctgtatgacaatcacatttctagtctaccagataacgtgttttcaaacctccgacagctgcaggtgctcattcttagcaggaatcagatcagtttcattagtcccggagcctttaatggcttgaccgagttaagagaactcagcctgcacaccaacgcactgcaggacctggacggcaatgtgtttcggatgctggccaatttgcagaatatatcactgcagaataaccgcctcaggcagctccctggtaacatattcgccaacgttaacggcctaatggccatccagctccagaataatcagctggaaaatctgccactggggatatttgatcatctcggcaagctctgtgaactgcgactttatgacaatccttggcggtgcgattctgacatccttccgcttcggaattggctgcttctcaatcagccaagacttggcacggatacagtgccagtttgttttagccccgctaacgtgcgggggcagtctcttataatcatcaatgtgaacgtggctgtgcccagcgtgcatgtccctgaggtcccatcctaccctgaaacaccctggtatcccgatactccttcgtacccagacaccaccagtgtgtctagtacgactgaattgacttcacctgtcgaagattacacagatctgacaaccatccaggtgaccgatgacagatctgtgtggggtatgacccaggcacaaagcggcttagccatcgctgcgatcgtcatcgggatcgtagctctagcctgcagccttgccgcatgtgttgggtgctgttgctgcaaaaaacgtagccaggctgttcttatgcagatgaaggctcctaacgagtgctag

SEQ ID NO: 50206 - DNA, 1764 bp, Artificial Sequence
  derived and/or modified sequence
atgccccttgataaggccatgccccttaagcattacttactgctgcttgtgggatgtcaggcctggggagccggtttagcgtatcacggctgcccgtcagagtgcacgtgctcgagggcgtcccaggtggaatgcaccggcgcccgcatcgtggccgtgcctaccccgctgccatggaatgcgatgtcactgcagatcctgaacacccacattactgagctgaatgaatcaccctttctgaatatcagcgctctgattgctctccggattgaaaagaacgaactctcacgtatcacccctggcgcttttcgcaacctcggttccctccggtacctgagtctggctaacaacaaacttcaggtgttacccattggcctgttccagggacttgatagcctggaatccctgctgctttcctcaaaccagctgttgcagatccagccagcccacttcagccagtgtagtaatcttaaggaactgcagctacacggaaaccatcttgaatatatccctgatggggcatttgaccacctggtcggactgacaaaactgaatctgggcaaaaacagtctcacccacatttcccctagagtctttcaacatttagggaacttacaggtgttaagactctacgagaacaggctcaccgatatccccatgggtaccttcgacggccttgtcaacctgcaggagctggcacttcagcagaaccagatcggacttctctcccctggtctgttccacaacaatcacaatttacagcgtctttatctgtccaataatcacatttctcagctgccaccatccgtcttcatgcagctgccccagttgaataggttgaccctctttggcaattccctcaaggagctgtctcccggtatattcggccctatgccaaatttacgagagctgtggctttatgataatcacattagtagcctcccagacaatgttttcagcaatctgagacagctccaggtgctcatcctctccagaaatcagatctcttttatcagtcctggtgccttcaacggcctcacggaacttcgggagttgtctcttcacaccaacgctctccaggatcttgatggaaatgtttttagaatgctagccaaccttcagaatatcagtctgcagaataaccgcctgcggcaactgcccggcaatatctttgccaacgtcaacggtcttatggcaatccagctccagaataatcagctggagaatctgccattaggcatttttgatcacctcggaaaactgtgcgaattaaggctgtacgacaacccttggagatgtgattccgacatcctgcctctgcggaactggcttcttctgaatcagccacgactgggaacagatactgtgcctgtgtgtttcagtcccgcgaacgtccgcggccagagtttgatcattataaacgttaacgtggcagtcccaagcgtgcatgtgcccgaggttccaagctaccctgaaacaccttggtaccccgataccccctcctaccccgacacaacctccgtttcgagcacgacagagctgactagccctgtggaagactacaccgacttgacgaccattcaggtgaccgatgaccggagtgtttgggggatgacacaggcccaatcgggcttggccatagcagccatcgtcataggcatcgtggcgctggcctgttcgctggccgcctgcgtaggctgttgttgttgcaaaaaaagatctcaggccgtgctgatgcagatgaaagctcccaacgaatgttag

SEQ ID NO: 50207 - DNA, 5883 bp, Artificial Sequence
  derived and/or modified sequence
acactcatgctgcagccttgagccgtccctcgtcctcctctcaggctccctcttgtccacggcgggcgggcgccgagctgctggctatgccactgaagcattatctccttttgctggtgggctgccaagcctggggtgcagggttggcctaccatggctgccctagcgagtgtacctgctccagggcctcccaggtggagtgcaccggggcacgcattgtggcagtgcccacccctctgccctggaacgccatgagcctgcagatcctcaacacgcacatcactgaactcaatgagtccccgttcctcaatatctcagccctcatcgccctgaggattgagaagaatgagctgtcgcgcatcacgcctggggccttccgaaacctgggctcgctgcgctatctcagcctcgccaacaacaagctgcaggttctgcccatcggcctcttccagggcctggacagcctcgagtctctccttctgtccagtaaccagctgttgcagatccagccggcccacttctcccagtgcagcaacctcaaggagctgcagttgcacggcaaccacctggaatacatccctgacggagccttcgaccacctggtaggactcacgaagctcaatctgggcaagaatagcctcacccacatctcacccagggtcttccagcacctgggcaacctccaggtcctccggctgtatgagaacaggctcacggatatccccatgggcacttttgatgggcttgttaacctgcaggaactggctctgcagcagaaccagattggactgctctcccctggtctcttccacaacaaccacaacctccagagactctacctgtccaacaaccacatctcccagctgccacccagcgtcttcatgcagctgccccagctcaaccgtcttactctctttgggaattccctgaaggagctctctccggggatcttcgggcccatgcccaacctgcgggagctttggctctatgacaaccacatctcttctctacccgacaatgtcttcagcaacctccgccagttgcaggtcctgattcttagccgcaatcagatcagcttcatctccccgggtgccttcaacgggctaacggagcttcgggagctgtccctccacaccaacgcactgcaggacctggacgggaacgtcttccgcatgttggccaacctgcagaacatctccctgcagaacaaccgcctcagacagctcccagggaatatcttcgccaacgtcaatggcctcatggccatccagctgcagaacaaccagctggagaacttgcccctcggcatcttcgatcacctggggaaactgtgtgagctgcggctgtatgacaatccctggaggtgtgactcagacatccttccgctccgcaactggctcctgctcaaccagcctaggttagggacggacactgtacctgtgtgtttcagcccagccaatgtccgaggccagtccctcattatcatcaatgtcaacgttgctgttccaagcgtccatgtccccgaggtgcctagttacccagaaacaccatggtacccagacacacccagttaccctgacaccacatccgtctcttctaccactgagctaaccagccctgtggaagactacactgatctgactaccattcaggtcactgatgaccgcagcgtttggggcatgacccaggcccagagcgggctggccattgccgccattgtaattggcattgtcgccctggcctgctccctggctgcctgcgtcggctgttgctgctgcaagaagaggagccaagctgtcctgatgcagatgaaggcacccaatgagtgttaaagaggcaggctggagcagggctggggaatgatgggactggaggacctgggaatttcatctttctgcctccacccctgggtccatggagctttcccgtgattgctctttctggccccagagaaaggtgagcctacctcttcctgacttgcctgattctcccgtagagaagcaggtcgtgccggaccttcctacaatcaggaagatagatccaactggccatggcaaaagccctggggatttccgattcatacccctgggcttccttcgagagggctcttcctccaaatcctccccacctgtcctccaagaacagccttccctgcgcccaggccccctccgggcctctgtagactcagttagtccacagcctgctcacttcgtgggaatagttctccgctgagatagcccctctcgcctaagtattatgtaagttgatttcccttcttttgtttctcttgtttgtgctacggcttgacccagcatgtcccctcaaatgaaagttctccccttgattttctgctcctgaaggcagggtgagttctctcctcaaagaagacttcaaaccatttaactggtttcttaagagccgtcaatcagcctggttttggggatgctatgaaagagagaaggaaaatcatgccgctcagttcctggagacagaagagccgtcatcagtgtctcacttgtgatttttatctggaaaaggaagaaacaccccagcacagcaagctcagccttttagagaaggatatttccaaactgcaaactttgctttgaaaagtttagccctttaaggaatgaaatcatgtagaattttggacttctaaaaacattaaaatcagcttattaatacgggatagagaaagaaatctggtgcctgggggtccctgtgttcacccctagagtttgttttaaaatttttaattgaagcatgtgaagtgtacgtgcagaaaagtgggaacatgatagtgtatggcttggtggattttcacaaactgaacatacctgtgtaatcagcatctagacccagacccagagcatcacaaatatcccccatcctgggcttttcccagaggagatgggggcttctgaagatggacttacctgggacctgccccccatgagccaggacggtccccccacagtcagcctgtgcaaaggccccgtggccaggggtggaggagaatatgtgggtgtggacaggatgggagactgtggcctgaacaggagattttattatatctggagaccctgagagaccctgagacctggggcaccatggctggccaggtcagaagcatcctgactgcagaggtccgtgcagccacaccctcttccctgccagcaagctgtctgcggctcatcggaggcccctccgcctggagccttctatggacgtgatatgcctgtatctgtttttaattttcattcttcacttaggggaagtgaaatcgctcagagatgagatcctttaattgaaaacgaagtgtaacggaatctagtgtctttctaatgtggtaaaattctccatcaacatcacagtcagctggcagctgaacttcagaatctcacttacagcaggcgacacgggggtacaccgatgggtcacactgggtctgggggctccctggagctcctcctgcgtgtggtctggttaggagttgagttgtttgctccagggttattctcctcctcgagtcacagtcacacgaatacctgccttctctggctttcctgctatacacatattcacatggcgctcaagaagttaggctcatggcaacgtgtgtctttctctggacaactggcccagtttacagtgaaatggagaatttcaggtctccacgtctgcccaggaaagaacttcagctgactccacggggatctggaaatccacgaccaatcccgatcggctcttattagctccccgctccacaagacacctgtgctttggaaatccaccaccaatcccgatcggctcttattagctccccgctccacaagacacctgtgatctggaaatctaccaccaatcccgatcggctcttattagctccccgctccacaagacacctgtgacatcctccagggccacaggagcacgtgctgaccagttttcccttccagttcctgcacaaaaagtgtccagagggctgtttgcaaacactagtgcactttgtagcttttcaccctctgtcccagggaatctaggagagatgaggcccgtcagagtcaagagatgtcatccccccagggtctccaaggcatttccacactattggtggcacctggaggacatgcaccaaggcttgccagagccaacaggaagtgagcccagagcatggcacatgagcatcacccgctgatggtggcctgctgtgcctggtgccaacaggggcatcccggcccgtacccctccagacaggaagcatgggtttgcccacagacctgtcgggtgctcctgtgagtggcctccagatgtctttgtgcataggcacaagtgggccagggctggagggaggtgggaaacctcatcatccggtgggccctgccaatcttaacccagaacccttaggtattcctggcagtagccatgacattggagcaccttcctctccagccagaggctgacctgagggccactgtcctcagatgacaccacccaggagcaccctaggtgaggggtgagggcccccttatgtgaacctcttgcctcttcctttctcccatcagagtggttggatggagccattggcctccttttcttcagcgggcccttcaacctctctgcaccatgttgtctggctgaggagctactagaaaagctgagtggagtctcctttccaacaggatgatgcatttgctcaattctcagggctggaatgagccggctggtcccccagaaagctggagtggggtacagagttcagttttcctctctgtttacagctccttgacagtcccacgcccatctggagtgggagctgggagtcagtgttggagaagaaacaacaaaagccaattagaaccactatttttaaaaagtgcttactgtgcacagatactcttcaagcactggacgtggattctctctctagccctcagcacccctgcggtaggagtgccgcctctacccacttgtgatggggtacagaggcacttgctcttctgcatggtgttcaataggctgggagttttatttatctcttcaaactttgtacaagagctcatggcttgtcttgggctttcgtcattaaaccaaaggaaatggaagccattcccctgttgctctccttagtcttggtcatcagaacctcacttggtaccatatagatcaaaagctttgtaaccacaggaaaaaataaactcttccatcccttaaagaatagaatagtttgtccctctcatgggaattgggctgtatgtatattgttcttcctccttagaatttagagatacaagagttctacttagaacttttcatggacacaatttccacaacctttcagatgctgatgtagagctattgggaaagaacttccaaactcaggaagtttgcagagagcagacagctagagataactcgggacccagagttggtcgacagatgttagatgtatcctagcttttagctataaaccactcaaagattcagcccccagatcccacagtcagaactgaatctgcgttgttgggaagccagcagtggccttgggaaggaagccatggctgtggttcagagagggtgggctggcaagccacttccggggaaaactccttccgccccaggtttcttcttctcttaaggagagattgttctcaccaacccgctgccttcatgctgccttcaaagctagatcatgtttgccttgcttagagaattactgcaaatcagccccagtgcttggcgatgcatttacagatttctaggccctcagggttttgtagagtgtgagccctggtgggcagggttggggggtctgtcttctgctggatgctgcttgtaatccatttggtgtacagaatcaacaataaataatatacatgtata

SEQ ID NO: 50208 - DNA, 3248 bp, Artificial Sequence
  derived and/or modified sequence
cagccttgagccgtccctcgtcctcctctcaggctccctcttgtccacggcgggcgggcgccgagctgctgatgtgtccctagcataacctggccccattcctttgcatctagatgcctttggacaaggctatgccactgaagcattatctccttttgctggtgggctgccaagcctggggtgcagggttggcctaccatggctgccctagcgagtgtacctgctccagggcctcccaggtggagtgcaccggggcacgcattgtggcagtgcccacccctctgccctggaacgccatgagcctgcagatcctcaacacgcacatcactgaactcaatgagtccccgttcctcaatatctcagccctcatcgccctgaggattgagaagaatgagctgtcgcgcatcacgcctggggccttccgaaacctgggctcgctgcgctatctcagcctcgccaacaacaagctgcaggttctgcccatcggcctcttccagggcctggacagcctcgagtctctccttctgtccagtaaccagctgttgcagatccagccggcccacttctcccagtgcagcaacctcaaggagctgcagttgcacggcaaccacctggaatacatccctgacggagccttcgaccacctggtaggactcacgaagctcaatctgggcaagaatagcctcacccacatctcacccagggtcttccagcacctgggcaacctccaggtcctccggctgtatgagaacaggctcacggatatccccatgggcacttttgatgggcttgttaacctgcaggaactggctctgcagcagaaccagattggactgctctcccctggtctcttccacaacaaccacaacctccagagactctacctgtccaacaaccacatctcccagctgccacccagcgtcttcatgcagctgccccagctcaaccgtcttactctctttgggaattccctgaaggagctctctccggggatcttcgggcccatgcccaacctgcgggagctttggctctatgacaaccacatctcttctctacccgacaatgtcttcagcaacctccgccagttgcaggtcctgattcttagccgcaatcagatcagcttcatctccccgggtgccttcaacgggctaacggagcttcgggagctgtccctccacaccaacgcactgcaggacctggacgggaacgtcttccgcatgttggccaacctgcagaacatctccctgcagaacaaccgcctcagacagctcccagggaatatcttcgccaacgtcaatggcctcatggccatccagctgcagaacaaccagctggagaacttgcccctcggcatcttcgatcacctggggaaactgtgtgagctgcggctgtatgacaatccctggaggtgtgactcagacatccttccgctccgcaactggctcctgctcaaccagcctaggttagggacggacactgtacctgtgtgtttcagcccagccaatgtccgaggccagtccctcattatcatcaatgtcaacgttgctgttccaagcgtccatgtccccgaggtgcctagttacccagaaacaccatggtacccagacacacccagttaccctgacaccacatccgtctcttctaccactgagctaaccagccctgtggaagactacactgatctgactaccattcaggtcactgatgaccgcagcgtttggggcatgacccaggcccagagcgggctggccattgccgccattgtaattggcattgtcgccctggcctgctccctggctgcctgcgtcggctgttgctgctgcaagaagaggagccaagctgtcctgatgcagatgaaggcacccaatgagtgttaaagaggcaggctggagcagggctggggaatgatgggactggaggacctgggaatttcatctttctgcctccacccctgggtccatggagctttcccgtgattgctctttctggccccagagaaaggtgagcctacctcttcctgacttgcctgattctcccgtagagaagcaggtcgtgccggaccttcctacaatcaggaagatagatccaactggccatggcaaaagccctggggatttccgattcatacccctgggcttccttcgagagggctcttcctccaaatcctccccacctgtcctccaagaacagccttccctgcgcccaggccccctccgggcctctgtagactcagttagtccacagcctgctcacttcgtgggaatagttctccgctgagatagcccctctcgcctaagtattatgtaagttgatttcccttcttttgtttctcttgtttgtgctacggcttgacccagcatgtcccctcaaatgaaagttctccccttgattttctgctcctgaaggcagggtgagttctctcctcaaagaagacttcaaaccatttaactggtttcttaagagccgtcaatcagcctggttttggggatgctatgaaagagagaaggaaaatcatgccgctcagttcctggagacagaagagccgtcatcagtgtctcacttgtgatttttatctggaaaaggaagaaacaccccagcacagcaagctcagccttttagagaaggatatttccaaactgcaaactttgctttgaaaagtttagccctttaaggaatgaaatcatgtagaattttggacttctaaaaacattaaaatcagcttattaatacgggatagagaaagaaatctggtgcctgggggtccctgtgttcacccctagagtttgttttaaaatttttaattgaagcatgtgaagtgtacgtgcagaaaagtgggaacatgatagtgtatggcttggtggattttcacaaactgaacatacctgtgtaatcagcatctagacccagacccagagcatcacaaatatcccccatcctgggcttttcccagaggagatgggggcttctgaagatggacttacctgggacctgccccccatgagccaggacggtccccccacagtcagcctgtgcaaaggccccgtggccaggggtggaggagaatatgtgggtgtggacaggatgggagactgtggcctgaacaggagattttattatatctggagaccctgagagaccctgagacctggggcaccatggctggccaggtcagaagcatcctgactgcagaggtccgtgcagccacaccctcttccctgccagcaagctgtctgcggctcatcggaggc

SEQ ID NO: 50209 - DNA, 5815 bp, Artificial Sequence
  derived and/or modified sequence
atgcctttggacaaggctatgccactgaagcattatctccttttgctggtgggctgccaagcctggggtgcagggttggcctaccatggctgccctagcgagtgtacctgctccagggcctcccaggtggagtgcaccggggcacgcattgtggcagtgcccacccctctgccctggaacgccatgagcctgcagatcctcaacacgcacatcactgaactcaatgagtccccgttcctcaatatctcagccctcatcgccctgaggattgagaagaatgagctgtcgcgcatcacgcctggggccttccgaaacctgggctcgctgcgctatctcagcctcgccaacaacaagctgcaggttctgcccatcggcctcttccagggcctggacagcctcgagtctctccttctgtccagtaaccagctgttgcagatccagccggcccacttctcccagtgcagcaacctcaaggagctgcagttgcacggcaaccacctggaatacatccctgacggagccttcgaccacctggtaggactcacgaagctcaatctgggcaagaatagcctcacccacatctcacccagggtcttccagcacctgggcaacctccaggtcctccggctgtatgagaacaggctcacggatatccccatgggcacttttgatgggcttgttaacctgcaggaactggctctgcagcagaaccagattggactgctctcccctggtctcttccacaacaaccacaacctccagagactctacctgtccaacaaccacatctcccagctgccacccagcgtcttcatgcagctgccccagctcaaccgtcttactctctttgggaattccctgaaggagctctctccggggatcttcgggcccatgcccaacctgcgggagctttggctctatgacaaccacatctcttctctacccgacaatgtcttcagcaacctccgccagttgcaggtcctgattcttagccgcaatcagatcagcttcatctccccgggtgccttcaacgggctaacggagcttcgggagctgtccctccacaccaacgcactgcaggacctggacgggaacgtcttccgcatgttggccaacctgcagaacatctccctgcagaacaaccgcctcagacagctcccagggaatatcttcgccaacgtcaatggcctcatggccatccagctgcagaacaaccagctggagaacttgcccctcggcatcttcgatcacctggggaaactgtgtgagctgcggctgtatgacaatccctggaggtgtgactcagacatccttccgctccgcaactggctcctgctcaaccagcctaggttagggacggacactgtacctgtgtgtttcagcccagccaatgtccgaggccagtccctcattatcatcaatgtcaacgttgctgttccaagcgtccatgtccccgaggtgcctagttacccagaaacaccatggtacccagacacacccagttaccctgacaccacatccgtctcttctaccactgagctaaccagccctgtggaagactacactgatctgactaccattcaggtcactgatgaccgcagcgtttggggcatgacccaggcccagagcgggctggccattgccgccattgtaattggcattgtcgccctggcctgctccctggctgcctgcgtcggctgttgctgctgcaagaagaggagccaagctgtcctgatgcagatgaaggcacccaatgagtgttaaagaggcaggctggagcagggctggggaatgatgggactggaggacctgggaatttcatctttctgcctccacccctgggtccatggagctttcccgtgattgctctttctggccccagagaaaggtgagcctacctcttcctgacttgcctgattctcccgtagagaagcaggtcgtgccggaccttcctacaatcaggaagatagatccaactggccatggcaaaagccctggggatttccgattcatacccctgggcttccttcgagagggctcttcctccaaatcctccccacctgtcctccaagaacagccttccctgcgcccaggccccctccgggcctctgtagactcagttagtccacagcctgctcacttcgtgggaatagttctccgctgagatagcccctctcgcctaagtattatgtaagttgatttcccttcttttgtttctcttgtttgtgctacggcttgacccagcatgtcccctcaaatgaaagttctccccttgattttctgctcctgaaggcagggtgagttctctcctcaaagaagacttcaaaccatttaactggtttcttaagagccgtcaatcagcctggttttggggatgctatgaaagagagaaggaaaatcatgccgctcagttcctggagacagaagagccgtcatcagtgtctcacttgtgatttttatctggaaaaggaagaaacaccccagcacagcaagctcagccttttagagaaggatatttccaaactgcaaactttgctttgaaaagtttagccctttaaggaatgaaatcatgtagaattttggacttctaaaaacattaaaatcagcttattaatacgggatagagaaagaaatctggtgcctgggggtccctgtgttcacccctagagtttgttttaaaatttttaattgaagcatgtgaagtgtacgtgcagaaaagtgggaacatgatagtgtatggcttggtggattttcacaaactgaacatacctgtgtaatcagcatctagacccagacccagagcatcacaaatatcccccatcctgggcttttcccagaggagatgggggcttctgaagatggacttacctgggacctgccccccatgagccaggacggtccccccacagtcagcctgtgcaaaggccccgtggccaggggtggaggagaatatgtgggtgtggacaggatgggagactgtggcctgaacaggagattttattatatctggagaccctgagagaccctgagacctggggcaccatggctggccaggtcagaagcatcctgactgcagaggtccgtgcagccacaccctcttccctgccagcaagctgtctgcggctcatcggaggcccctccgcctggagccttctatggacgtgatatgcctgtatctgtttttaattttcattcttcacttaggggaagtgaaatcgctcagagatgagatcctttaattgaaaacgaagtgtaacggaatctagtgtctttctaatgtggtaaaattctccatcaacatcacagtcagctggcagctgaacttcagaatctcacttacagcaggcgacacgggggtacaccgatgggtcacactgggtctgggggctccctggagctcctcctgcgtgtggtctggttaggagttgagttgtttgctccagggttattctcctcctcgagtcacagtcacacgaatacctgccttctctggctttcctgctatacacatattcacatggcgctcaagaagttaggctcatggcaacgtgtgtctttctctggacaactggcccagtttacagtgaaatggagaatttcaggtctccacgtctgcccaggaaagaacttcagctgactccacggggatctggaaatccacgaccaatcccgatcggctcttattagctccccgctccacaagacacctgtgctttggaaatccaccaccaatcccgatcggctcttattagctccccgctccacaagacacctgtgatctggaaatctaccaccaatcccgatcggctcttattagctccccgctccacaagacacctgtgacatcctccagggccacaggagcacgtgctgaccagttttcccttccagttcctgcacaaaaagtgtccagagggctgtttgcaaacactagtgcactttgtagcttttcaccctctgtcccagggaatctaggagagatgaggcccgtcagagtcaagagatgtcatccccccagggtctccaaggcatttccacactattggtggcacctggaggacatgcaccaaggcttgccagagccaacaggaagtgagcccagagcatggcacatgagcatcacccgctgatggtggcctgctgtgcctggtgccaacaggggcatcccggcccgtacccctccagacaggaagcatgggtttgcccacagacctgtcgggtgctcctgtgagtggcctccagatgtctttgtgcataggcacaagtgggccagggctggagggaggtgggaaacctcatcatccggtgggccctgccaatcttaacccagaacccttaggtattcctggcagtagccatgacattggagcaccttcctctccagccagaggctgacctgagggccactgtcctcagatgacaccacccaggagcaccctaggtgaggggtgagggcccccttatgtgaacctcttgcctcttcctttctcccatcagagtggttggatggagccattggcctccttttcttcagcgggcccttcaacctctctgcaccatgttgtctggctgaggagctactagaaaagctgagtggagtctcctttccaacaggatgatgcatttgctcaattctcagggctggaatgagccggctggtcccccagaaagctggagtggggtacagagttcagttttcctctctgtttacagctccttgacagtcccacgcccatctggagtgggagctgggagtcagtgttggagaagaaacaacaaaagccaattagaaccactatttttaaaaagtgcttactgtgcacagatactcttcaagcactggacgtggattctctctctagccctcagcacccctgcggtaggagtgccgcctctacccacttgtgatggggtacagaggcacttgctcttctgcatggtgttcaataggctgggagttttatttatctcttcaaactttgtacaagagctcatggcttgtcttgggctttcgtcattaaaccaaaggaaatggaagccattcccctgttgctctccttagtcttggtcatcagaacctcacttggtaccatatagatcaaaagctttgtaaccacaggaaaaaataaactcttccatcccttaaagaatagaatagtttgtccctctcatgggaattgggctgtatgtatattgttcttcctccttagaatttagagatacaagagttctacttagaacttttcatggacacaatttccacaacctttcagatgctgatgtagagctattgggaaagaacttccaaactcaggaagtttgcagagagcagacagctagagataactcgggacccagagttggtcgacagatgttagatgtatcctagcttttagctataaaccactcaaagattcagcccccagatcccacagtcagaactgaatctgcgttgttgggaagccagcagtggccttgggaaggaagccatggctgtggttcagagagggtgggctggcaagccacttccggggaaaactccttccgccccaggtttcttcttctcttaaggagagattgttctcaccaacccgctgccttcatgctgccttcaaagctagatcatgtttgccttgcttagagaattactgcaaatcagccccagtgcttggcgatgcatttacagatttctaggccctcagggttttgtagagtgtgagccctggtgggcagggttggggggtctgtcttctgctggatgctgcttgtaatccatttggtgtacagaatcaacaataaataatatacatgtata

SEQ ID NO: 50210 - DNA, 1746 bp, Artificial Sequence
  derived and/or modified sequence
atgcccctgaagcactacctgctgctgctggtgggctgccaggcctggggcgccggcctggcctaccacggctgccccagcgagtgcacctgcagccgggccagccaggtggagtgcaccggggcccgcatcgtggccgtgcccacccccctgccctggaatgccatgagcctgcagatcctgaacacccacatcacagagctgaatgaaagccccttcctgaacatcagcgccctgattgccctgcgcatcgagaagaatgagctgagccgcatcacccctggggccttcaggaacctgggcagcctgcgctacctgagcctggccaacaacaagctgcaggtgctgcccatcggcctcttccagggcctggacagcctggagagcctgctgctgagcagcaaccagctgctgcagatccagcctgcccacttcagccagtgcagcaacctgaaggagctgcagctgcacggcaaccacctggagtacatcccagatggagcctttgaccacctggtgggcctgaccaagctgaacctgggcaagaacagcctgacccacatcagccccagggtcttccagcacctgggcaacctgcaggtgctgcggctgtatgagaaccggctgacagacatccccatgggcacctttgatggcctggtgaacctgcaggagctggccctgcagcagaaccagatcggcctgctgagccctggcctcttccacaacaaccacaacctgcagaggctgtacctgagcaacaaccacatcagccagctgcccccatctgtgttcatgcagctgccccagctgaaccggctgaccctgtttggaaacagcctgaaggagctgagccctggcatcttcggccccatgcccaacctgcgggagctgtggctgtatgacaaccacatcagcagcctgcctgacaacgtgttcagcaacctgcggcagctgcaggtgctgatcctgagcaggaaccagatctccttcatcagccctggggccttcaacggcctgacagagctgcgggagctgagcctgcacaccaatgccctgcaggacctggatggaaatgtgttcaggatgctggccaacctgcagaacatcagcctgcagaacaaccggctgcggcagctgcccggcaacatctttgccaacgtgaatggcctgatggccatccagctgcagaacaaccagctggagaacctgcccctgggcatctttgaccacctgggcaagctgtgtgagctgcggctgtatgacaacccctggaggtgtgacagcgacatcctgcccctgaggaactggctgctgctgaaccagccccggctgggcacagacacagtgcctgtgtgcttcagccctgccaacgtgcggggccagagcctcatcatcatcaacgtgaatgtggccgtgcccagcgtgcacgtgcctgaggtgcccagctacccagagaccccctggtacccagacacccccagctacccagacaccacctctgtgagcagcaccacagagctgaccagccctgtggaggactacacagacctgaccaccatccaggtgacagatgacagatctgtgtggggcatgacccaggcccagagcggcctggccatcgccgccatcgtcatcggcatcgtggccctggcctgcagcctggccgcctgtgtgggctgctgctgctgcaagaagaggagccaggccgtgctgatgcagatgaaggccccaaatgaatgttag

SEQ ID NO: 50211 - DNA, 1764 bp, Artificial Sequence
  derived and/or modified sequence
atgcccctggacaaggccatgcccctgaagcactacctgctgctgctggtgggctgccaggcctggggcgccggcctggcctaccacggctgccccagcgagtgcacctgcagccgggccagccaggtggagtgcaccggggcccgcatcgtggccgtgcccacccccctgccctggaatgccatgagcctgcagatcctgaacacccacatcacagagctgaatgaaagccccttcctgaacatcagcgccctgattgccctgcgcatcgagaagaatgagctgagccgcatcacccctggggccttcaggaacctgggcagcctgcgctacctgagcctggccaacaacaagctgcaggtgctgcccatcggcctcttccagggcctggacagcctggagagcctgctgctgagcagcaaccagctgctgcagatccagcctgcccacttcagccagtgcagcaacctgaaggagctgcagctgcacggcaaccacctggagtacatcccagatggagcctttgaccacctggtgggcctgaccaagctgaacctgggcaagaacagcctgacccacatcagccccagggtcttccagcacctgggcaacctgcaggtgctgcggctgtatgagaaccggctgacagacatccccatgggcacctttgatggcctggtgaacctgcaggagctggccctgcagcagaaccagatcggcctgctgagccctggcctcttccacaacaaccacaacctgcagaggctgtacctgagcaacaaccacatcagccagctgcccccatctgtgttcatgcagctgccccagctgaaccggctgaccctgtttggaaacagcctgaaggagctgagccctggcatcttcggccccatgcccaacctgcgggagctgtggctgtatgacaaccacatcagcagcctgcctgacaacgtgttcagcaacctgcggcagctgcaggtgctgatcctgagcaggaaccagatctccttcatcagccctggggccttcaacggcctgacagagctgcgggagctgagcctgcacaccaatgccctgcaggacctggatggaaatgtgttcaggatgctggccaacctgcagaacatcagcctgcagaacaaccggctgcggcagctgcccggcaacatctttgccaacgtgaatggcctgatggccatccagctgcagaacaaccagctggagaacctgcccctgggcatctttgaccacctgggcaagctgtgtgagctgcggctgtatgacaacccctggaggtgtgacagcgacatcctgcccctgaggaactggctgctgctgaaccagccccggctgggcacagacacagtgcctgtgtgcttcagccctgccaacgtgcggggccagagcctcatcatcatcaacgtgaatgtggccgtgcccagcgtgcacgtgcctgaggtgcccagctacccagagaccccctggtacccagacacccccagctacccagacaccacctctgtgagcagcaccacagagctgaccagccctgtggaggactacacagacctgaccaccatccaggtgacagatgacagatctgtgtggggcatgacccaggcccagagcggcctggccatcgccgccatcgtcatcggcatcgtggccctggcctgcagcctggccgcctgtgtgggctgctgctgctgcaagaagaggagccaggccgtgctgatgcagatgaaggccccaaatgaatgttag

SEQ ID NO: 50212 - DNA, 1746 bp, Artificial Sequence
  derived and/or modified sequence
atgcccctgaagcactacctgctgctgctggtgggctgccaggcctggggagctggtctggcgtaccacggctgcccatccgaatgtacctgtagcagggcatctcaggttgagtgcactggcgcaagaattgtcgcagtcccaactcctctgccctggaacgcaatgagtttacagatccttaacacacatattactgagctgaatgaatcgccgttcctgaacatctcagccttaattgccttgcggatcgagaaaaacgagctatctaggatcactccgggggcttttagaaacctcgggtctctgcgctatctctctctggccaacaacaagctccaggtcctgccaataggcttgttccagggactcgattctctggaatcactcttactcagcagtaatcaactcctgcagattcagcctgctcacttttcacagtgttcaaatctcaaggagcttcaactgcatggcaaccacctcgagtacatcccagacggcgcatttgaccatctcgtgggcctcaccaagctgaacctggggaagaactccctgacccacatctctcctcgcgtgttccagcatttgggaaatctacaggtgctgaggttatacgagaatcgcctaacagacattcctatggggactttcgacggtctggttaatctccaggaacttgccttgcagcagaaccagataggtttactgtctcctgggctgtttcataacaatcataatcttcagcgtctctacttgtcgaacaatcatattagccagctgccaccatcagtgttcatgcagctcccccagctgaacaggctgacgttatttggtaactctctgaaagagttatcccccggtattttcggccccatgccaaatttgcgggagctgtggctttatgataaccacatcagctccctccccgataacgtgttttccaatctgagacagcttcaagtgctgatactttcccggaatcagattagttttatctcaccaggcgcttttaacgggttaactgagctacgtgaactgtccttgcatactaatgccttgcaggatctggacggaaacgtttttcgcatgctcgccaaccttcagaatatctctctccagaataacaggttgcgccaacttccaggcaatatcttcgcaaatgtgaacggcctaatggccatccaattgcagaacaaccaacttgagaatctcccgctgggtatattcgatcaccttgggaagctctgtgaactgcggctctatgataatccttggaggtgcgacagtgacatcttgcctcttaggaactggctgttactgaaccagccacggctgggaactgacaccgtacctgtgtgcttcagtccagccaacgtgcgcggccagtcacttattattatcaacgtgaacgtagctgtcccctctgtgcatgttcccgaggttccaagttatcccgaaactccctggtacccggataccccatcctatcctgacacgacatctgtgagcagtacaacagagttgaccagccccgttgaagattacactgatcttacaacgatccaggtgactgatgaccgatccgtgtggggaatgactcaggctcaaagtgggctggctattgccgctattgttataggcattgttgcccttgcgtgctcgttggcagcctgtgtgggctgttgttgttgtaaaaagcgctctcaagccgtgttgatgcagatgaaggctcctaacgagtgctag

SEQ ID NO: 50213 - DNA, 1764 bp, Artificial Sequence
  derived and/or modified sequence
atgcccctggacaaggccatgcccctgaagcactacctgctgctgctggtcggctgccaagcttggggtgcaggtctggcttatcatggttgccccagcgaatgtacttgcagcagggcctctcaggtggagtgtactggcgctaggattgtggccgtgccaacacctctcccatggaatgcaatgtcgctgcagatcctcaatacacacattacagagctgaacgagtccccctttcttaacatatcagccttgattgctttgcgcattgaaaagaacgagctttccagaattactcccggcgcgtttcgtaatctggggtccttgcggtacctgagtctcgcaaacaacaaactgcaggttttgcctattgggttgtttcagggacttgactcactcgagtccctgctcctgtcatccaatcagctccttcagatacagcctgcacatttctcccaatgctctaatctgaaagagcttcagctacatgggaaccatcttgaatatatccccgatggcgcatttgatcacttagtgggactcacgaaacttaacctgggcaagaacagccttactcacataagtcctagggtgtttcagcacctgggaaatctgcaggtactgagattgtacgaaaataggctcacggacattccaatgggaacattcgacgggctcgtcaacttacaggaattggccctgcagcaaaaccagatcggtctgctcagcccggggctgttccacaacaaccacaatctgcagcggctttacctgtctaacaaccacattagccaactgcccccttcagtctttatgcaactgccacagctgaatagactgacgctgtttggcaatagccttaaagaactctcccccggaatcttcgggcctatgcccaacctgagggaattatggctgtacgacaatcatatctctagcctgcccgacaatgtgttcagcaatctgaggcagctccaagtgcttatcctcagtcgaaatcagatttcctttatttcccccggggccttcaatgggttgacagaactccgggagctgtccttgcacaccaacgcgctgcaggatctggatggcaatgtctttcgtatgctcgcaaatcttcagaatatttccttgcagaataatcgcttgcggcagctgccgggaaacattttcgcaaacgtgaacggattgatggctatccagctgcagaacaaccaattagagaaccttcccctcgggatctttgaccatctggggaagctctgtgaactccgactatatgacaatccctggagatgtgacagcgacatactgccattacgcaattggctgctgctaaaccaaccccgcttgggtacggatacagttcccgtctgtttctctcccgcaaatgtcagaggtcagagcctcatcataatcaacgttaatgtggccgttccctcagtgcacgtgcccgaagtgccatcctacccggagactccttggtatccagataccccttcctaccccgatactactagtgtctccagtacaacagaactgacatctcccgtcgaggattacacggacctgacgaccatccaggtcaccgatgacagatcggtttggggaatgacccaggctcagagtggccttgctattgctgctatcgtgattggaatcgtcgccttagcatgcagcctcgcggcttgcgtcggctgctgttgttgcaaaaagaggtcacaggccgtgctaatgcagatgaaagcccctaatgagtgttag

SEQ ID NO: 50214 - DNA, 1764 bp, Artificial Sequence
  derived and/or modified sequence
atgcccctggacaaggccatgcccctgaagcactacctgctgctgttagtcgggtgccaggcctggggagctgggcttgcatatcatggctgtccaagcgagtgtacatgcagtcgtgctagccaggtggagtgtaccggggcccgcatagtggccgtccctacgcccctgccgtggaatgccatgagcctgcaaatcctcaatacccatatcacagaactgaatgaatctcctttccttaacataagcgccctgatagctctgcgaatcgaaaagaacgagctgtcaagaataacaccgggagcttttcgaaatctcggcagcctccggtatctgtccctggccaacaataaactgcaggtgctccctataggcctgttccagggattggactcacttgaatctctgctgctgtctagtaatcagctcttgcagattcaacccgcccacttctcgcagtgtagtaacctgaaggaactccagttgcatggcaaccatttagaatacatccctgatggggcgttcgaccatctggtgggactgaccaagctgaatcttggcaaaaacagtctgacccatataagcccccgggtgttccagcacctcggtaacttgcaggttctccgcttatatgagaacagacttaccgacatccctatgggcaccttcgatgggttggtcaatttgcaagagctagctttacagcaaaaccaaatcggacttctttcccctggcctcttccacaataaccacaacctgcagaggctttacttgagcaataaccacattagccagctgcccccaagtgtgtttatgcaactccctcagcttaatcgtctgacactgtttggcaactcgctcaaggaactaagccccgggatcttcggaccgatgcccaacttaagagaattgtggttgtacgacaatcatatctcctccctgcctgataacgtgttctccaatctgcgccagctgcaggtgctcattctctcgcggaaccagatctcctttatttcaccaggggctttcaacggcctgacggagttacgagagcttagtttacacacaaatgcacttcaggatttggacggaaatgtttttcggatgcttgctaatctccagaatatctcactgcagaataaccgactgcgacagctgcctggtaacattttcgccaacgtaaatggtctgatggccatccaactgcagaataaccaactcgagaacctgcccctggggatcttcgatcacctcggcaagctttgcgaacttagactctacgacaatccctggagatgtgacagtgacattctcccactgaggaactggctgctcctgaaccagcctcggcttggcacagatacagtgcctgtttgttttagtccggcaaatgtgcgagggcagagtttgatcattatcaacgttaacgtagcagtcccctccgtccatgttccagaagtgcccagttaccctgaaactccttggtatcccgacacaccctcatatccggacaccacaagtgttagttcaaccaccgaactgacatctcccgttgaagactacacagatcttaccacaatccaggttacagacgacagaagcgtttggggtatgactcaggcacaaagtggattggcaatcgctgcgattgtgatagggatcgtggctcttgcgtgttctttggcagcatgtgtcggctgctgttgctgtaagaagcgctcccaggcagtgctcatgcagatgaaggcccctaacgagtgctag

SEQ ID NO: 50215 - DNA, 1746 bp, Artificial Sequence
  derived and/or modified sequence
atgccactcaagcactatttgctgcttctggtggggtgccaggcttggggggctggcttggcttatcatgggtgtccatcagagtgtacgtgcagccgtgcttcacaggtagaatgtaccggcgcacgaattgtagcggtaccgacgcctctgccttggaatgctatgtcactgcaaatcctgaacactcatattacggaactgaacgaaagcccttttctgaacatctctgctctcatagctctgaggatcgaaaagaacgaattgtcccggatcactccgggagcgttcaggaaccttggaagtttacgctatctgtctctggctaacaataaattgcaggtgctgccaataggcctgtttcaaggacttgattctctggagtcactactgctatcaagcaatcaactgttgcagattcaacctgctcactttagccagtgttcaaacctgaaggagctccagctccacggaaaccatttagaatatattcccgacggggcattcgaccacctggtcggtcttaccaagctgaacctgggcaaaaattcactcacacatatcagtcctcgagtttttcaacatctgggcaacctacaggtgctaaggctgtatgaaaacaggttgacagatattcccatggggacgttcgacggtctggtgaatttgcaagaactggcactccaacagaatcagataggactgttgtcacccggtctttttcataataaccacaacctccaacgactgtacctgagcaacaaccatatcagtcagttgccgccaagcgtctttatgcagctccctcaacttaaccgactgacactctttggcaattcactgaaagagctctccccaggtatcttcggacccatgccaaacctgagggaactgtggctctacgacaatcatatctctagcctgcccgataatgtgttttcaaatctgagacagctgcaggtgctgattctgtctagaaaccagatcagctttataagcccaggcgcatttaacgggctaacagagttacgagaactgtctctgcacacgaatgcgctacaggacctcgacggaaacgtttttaggatgctggctaacctgcagaatatctccctacagaacaatagactcaggcagctcccagggaatattttcgcgaatgtgaacggattgatggcaattcaactgcaaaacaatcaacttgagaatttgcccctcggcatctttgatcacttgggaaagttgtgcgagcttagactgtacgacaatccctggcgatgcgactccgacattctgcctctgagaaactggctgttactaaaccagcccagattaggcaccgatacagtccccgtctgtttcagtcccgctaatgtaaggggccagtcattgatcatcatcaacgtaaatgtcgccgtcccctcagtgcacgtgcctgaagtaccttcctatcctgaaaccccctggtatcccgatactcccagctatccggacaccacatcggtgagcagcaccaccgaactaacatctcctgtggaagattacacggacttaactaccattcaggtaacagacgaccgcagcgtgtggggtatgacacaggcgcagagtgggctggccatcgccgctatcgtgatcggcattgttgctttagcatgcagtctggccgcatgcgttggatgctgttgctgcaaaaaaagatcacaggcagtactaatgcagatgaaggcgcctaatgaatgctag

SEQ ID NO: 50216 - DNA, 1764 bp, Artificial Sequence
  derived and/or modified sequence
atgcctcttgataaggctatgccccttaaacactaccttctgctgctggtcggatgccaggcctggggcgctggtttagcctatcatgggtgcccgtcagaatgtacctgttcaagggccagtcaggtcgagtgtactggtgcgagaatagttgccgtgcccacaccactgccttggaacgctatgtccctgcagatactgaacactcatatcaccgagctgaatgaatccccttttctgaacatatctgcgctgatcgcactaaggatagaaaagaatgaactttcccggattactcctggagcattcagaaatctgggaagtttacgatacctatccctggctaacaacaaattgcaagtgctccctatcggtctgtttcaggggctggactcactggagagcctgctgttgtcctcaaatcaacttttgcagatccaacccgctcacttttcacagtgtagtaatctgaaggagcttcagttacacggcaaccatcttgagtacattcccgatggggcttttgaccatctggttgggctgacgaagctgaatctcggtaagaactccctcactcatataagtccaagagtttttcagcatctaggaaatctacaggttctgaggctctacgagaatcggctgacagacattccaatgggaacctttgacggactggtgaatctacaggagctcgcacttcagcagaatcaaatcgggcttctcagccccggtctcttccacaataaccataatctgcagcgtttgtacttgagtaacaatcacataagccagttaccacctagcgtgttcatgcagctgccccaactgaaccgactgacgctcttcgggaattcccttaaggaactgagtccaggtattttcggtcccatgccaaatctccgggagctctggctgtatgacaaccacatctctagcctgcctgacaacgtgttcagcaacttgcgccagctccaggtcctgattttaagccgcaaccagatatctttcatttccccgggagccttcaacggcctcacagaactccgagagctgagcctccacaccaatgctctgcaggacctcgatggcaacgtgtttaggatgctagccaatttacaaaacatttcactgcagaacaatcgactgcgccagctgccagggaatatcttcgccaatgttaacggactgatggccattcaactgcagaataatcagctcgagaacctgccactgggtattttcgaccatctgggcaaactctgcgaactcaggctatacgataacccctggcgctgtgatagcgacattctgcccctccgcaattggctattattgaatcagcctagacttggaacagacacagtgcccgtgtgtttcagcccagcaaacgttcgcggacagagtttaatcatcatcaacgtcaatgttgccgtgccgagtgttcatgtgccagaggtgcccagttaccctgagactccttggtatcccgacactccctcttatccggacacaacaagcgtgtcttccaccacagagttgacttctccagtggaggactataccgacttaactactattcaagtgacggatgatcggtcagtctggggaatgacccaagcacagagtgggttagccatcgccgctattgtcatcggtattgtggccctcgcatgtagccttgccgcatgtgtgggttgctgctgttgcaaaaagagatcacaggccgttcttatgcagatgaaggcacctaacgagtgttag

SEQ ID NO: 50217 - DNA, 1764 bp, Artificial Sequence
  derived and/or modified sequence
atgccacttgataaagccatgcctttaaaacactatctcctgctgctcgtggggtgtcaggcttggggtgctggtctggcttatcacgggtgtccctccgagtgtacgtgtagcagagccagccaggtggagtgtactggcgcacgtattgtggccgtgcccactcctcttccatggaacgccatgtccctgcagattcttaatacccacattactgagctgaacgagtcgccatttttgaatatcagtgccctgatcgccctgaggatcgagaaaaatgaactgtctaggataacacccggtgcattccggaaccttggttcactccggtatctcagcttagcaaataacaaattgcaggtgctccctattggcctgtttcagggccttgactcgctcgagagcctgttgctttcaagtaatcagctactgcagatccagccagcccatttttctcaatgttctaatttgaaagagctccagctgcacggcaatcatttagaatacattccagacggagcatttgatcacttggtgggcctcaccaagctgaacctggggaagaactccttgacccatatcagtccgagggtttttcagcatctaggcaacttgcaggtgctgcgcctttacgagaaccgcctgacagacattcctatgggcaccttcgacggcttggtcaacctgcaggaactcgctctgcagcagaatcagattgggttattgtccccgggtctcttccataataatcataacctccagaggctatacttatctaacaatcacattagccagctgccaccgtccgtttttatgcaactgccacaactcaatcgcctgacccttttcggcaactccctcaaggaactgtcaccaggcatctttggacccatgcccaacctgagggagctgtggttgtacgacaatcacattagctcactaccggataatgttttctcaaatcttcgccagctccaggtcctgatactgagccgaaatcaaattagctttatttcacccggtgccttcaatggactgactgagcttagagagctgagtctgcatacaaacgcactgcaggatctggacggaaacgtctttaggatgctcgccaacctccaaaacatttcgttgcagaataatagacttagacaactgccagggaatattttcgctaacgtcaatgggctgatggcaattcagctgcagaacaatcaattggagaatctgccccttggcatcttcgatcatcttggaaagctctgtgagctgagactgtacgataacccctggcgatgtgattctgatatcctgccactgcggaactggctgcttctgaaccagcctagactgggaacagacaccgtgcccgtctgtttctctccggcaaatgtgagaggacagagtctgatcattatcaacgtcaacgtcgccgttccttcagtccacgtgcccgaagtgccaagctacccagaaacgccatggtacccagacactccctcttatcctgacactaccagtgtgagctcgaccaccgagttgactagtcccgtagaggattacaccgacttaacgacaatccaggtgacggacgatcggagtgtgtggggcatgacccaagcacaatctgggctggccattgctgcaattgtgattggcatcgtcgccctggcatgcagtttggctgcttgcgtgggatgttgctgctgtaagaagagaagccaggcagtgttaatgcagatgaaggcacccaatgagtgctag

SEQ ID NO: 50218 - DNA, 1086 bp, Artificial Sequence
  derived and/or modified sequence
atgggaattatccagtccatcttggcgacatctagagactgttatagcttcaagaagaagcccattcccaaaaaacctactatgttggccctggcgaagatcctgcttataagtaccctattttactctctcctctctggtagccatggcaaagagaaccaagacattaatactacccagaatatcgctgaggtgtttaagaccatggagaacaagcccataagtctggaaagcgaagcaaatctgaattccgataaagagaacatcaccacatcaaatctgaaggccagtcatagtccaccactcaacctgccaaataattctcacggcatcacagacttcagcagcaactcttcggcagaacattccctgggcagtctgaaacccacttctaccatatcaacctcaccccctctgattcacagcttcgtgtctaaggtgccctggaatgcaccaatagccgatgaggatctactgcccatatctgcccaccccaatgccacccccgctctgtcatccgaaaacttcacatggtcactggtgaatgacacagtgaaaaccccagataattcttcaatcaccgtcagcattttaagctccgaacctacatcccccagcgtgacccccctgatcgtggagccaagtggttggctaacgaccaactccgactctttcactgggtttaccccttaccaggagaagaccaccctccagcctactctgaaattcactaacaactctaaattgtttccaaatacctccgatccgcagaaagagaatcgcaataccgggatcgtgttcggggcaatcctgggcgcaatcctaggggtgtccctgctcacactcgtcggctacctcctgtgtggcaaacgcaaaacagattctttttcacatagacggctgtacgatgatcgcaatgagccagttcttagactcgataacgccccagagccatacgatgtctcatttggaaactccagctattacaaccccactctgaacgatagtgccatgcctgaatccgaagaaaatgctcgagacggaatccctatggatgacatccctcctctgcggacatctgtttag

SEQ ID NO: 50219 - DNA, 1086 bp, Artificial Sequence
  derived and/or modified sequence
atgggaatcatacagtccatcctggctacatcacgggattgctactcgttcaagaagaagcccatccctaagaaacccaccatgttggctctggcaaaaattcttcttatcagcaccctgttctactccctgctttcaggaagccacggcaaagaaaatcaggacataaacaccacccagaatattgctgaagttttcaagactatggagaataaacccatctctcttgagagcgaggccaatcttaattccgacaaggaaaatatcacgacctccaacctgaaagcttctcactcacctcctcttaacctgcccaataacagtcatggcattaccgacttcagttcaaacagcagtgccgagcactccctaggtagtctcaagcctacatcgactatatcaacaagccccccactgattcattcatttgtgtcaaaggtcccttggaatgcacccattgctgacgaagacttgctacccatctccgctcacccaaacgccacccccgctctgagttccgagaatttcacatggagcttggttaacgacactgtgaagacgccagacaattcctccattactgtctccatcttgtcctccgagcctacttctccaagcgtgacacctctgatcgtcgagccctccggttggttaaccaccaatagtgacagctttactgggttcaccccgtaccaggaaaagacaaccctgcagcctaccctgaagtttaccaacaactcaaagcttttccccaatacctctgatcctcaaaaggagaatcggaatacagggatcgtgtttggcgcaatacttggtgccattctcggtgtcagtctcctgaccctcgtcggctaccttctgtgtggcaagcggaagactgatagcttcagccaccgccgactgtatgatgaccgcaacgagcccgtgctgcggctggacaacgctccagagccctacgatgtgtcatttgggaactcttcttattacaacccaacactaaatgatagtgccatgcccgaatccgaagaaaacgccagagatggaatcccgatggacgatattccccctctgagaactagtgtatag

SEQ ID NO: 50220 - DNA, 1086 bp, Artificial Sequence
  derived and/or modified sequence
atgggcatcatccagagcatactggccactagccgtgactgttactcatttaaaaagaaacccattccgaagaagcctactatgttggcgctggctaagatcctgctcatctcgacacttttctattccttactgtccgggtctcacggtaaagaaaatcaggacatcaacaccactcaaaatatagctgaggtgttcaagacaatggaaaacaagccaatatctttggagtccgaggcaaatctgaattccgataaggaaaacattaccacaagcaacttaaaggccagccactcaccccccctcaacttgcctaacaattcccacggcataacagacttttcctctaattcctcagctgagcatagtctcggttcccttaagccgacatccaccatttcgacctctccccctctgattcactcattcgtaagtaaagtgccgtggaatgccccaatagccgatgaagacctgctcccaatttcggctcaccctaatgcaacccccgccctgagttctgaaaatttcacctggtctctggtcaacgatactgtaaaaactccagataacagttctattaccgtgtcaatcttgtcgtctgaacccacaagcccatctgtgacccccctcatcgttgagccttccggttggttgactacgaatagcgacagtttcaccggcttcacaccttaccaggaaaagacaacactccaacctaccctaaagtttaccaataatagcaaattattccctaataccagtgatccccagaaggagaaccgcaacactgggatcgtgtttggcgctatcctaggcgctattctaggagtgtcgctcctcacactggtcggataccttctgtgcgggaagcgaaaaacagatagttttagccatcgaagactttacgatgatcgcaacgaacctgttctccgcctcgacaacgcccccgaaccttatgatgtgtcttttgggaattcatcctactataatccaaccttgaatgattcagctatgcctgagagcgaagaaaacgcccgcgacggcattccaatggacgatattccacctctgaggacctccgtctag

SEQ ID NO: 50221 - DNA, 1086 bp, Artificial Sequence
  derived and/or modified sequence
atgggaattatacagtcaatcttggctacttcgcgcgactgttatagctttaagaaaaagccaatccccaagaagccaactatgctagccctggcgaaaatacttctgatatccacactgttttatagcctccttagcggttcacatggaaaagaaaatcaggatattaacactacccagaacatcgcagaggtgttcaaaacaatggagaataagccaatctcactggagagtgaagccaatctcaactcggacaaagagaatataaccacctccaacctgaaagccagccattccccccccttaaacctacccaacaacagccatggcataacagatttcagctcgaatagttctgccgagcatagcctcgggtccctcaaacctacctccactatctccacatccccaccactaattcattccttcgtatcgaaagtcccctggaacgcacccattgccgatgaggacctactgcccatctctgcccaccccaatgccaccccagctctgtcatccgaaaatttcacatggagccttgtgaacgacacagttaagacccctgataactcctctattactgtaagtattctgtcctctgagcccactagcccctcagtaactccgttaatcgtcgaaccaagcggatggctcactactaatagtgactccttcactggctttaccccataccaggaaaaaaccaccctacagcccactctcaagtttacaaacaatagtaagcttttccccaacacttctgacccccaaaaagagaatcgtaatactgggattgtgtttggagctatcttaggtgcaatattgggcgtttctttactgacgctcgtaggctacctcttgtgtggcaaaaggaaaacagattcctttagccatcgccggctttacgacgaccggaacgaaccagtgcttagactggataatgcccccgaaccttacgatgttagcttcggaaattctagctattacaaccctacccttaacgactccgccatgcccgagagcgaggaaaacgctagagacggaataccaatggacgatattcctcccctccgcactagtgtgtag

SEQ ID NO: 50222 - DNA, 3156 bp, Artificial Sequence
  derived and/or modified sequence
tctaatgcacgacagattcctttcagacaggacaactgtgatatttcagttcctgattgtaaatacctcctaagcctgaagattcctttaaaaaaaaaccaataccaaagaagcctacaatgttggccttagccaaaattctgttgatttcaacgttgttttattcacttctatcggggagccatggaaaagaaaatcaagacataaacacaacacagaacattgcagaagtttttaaaacaatggaaaataaacctatttctttggaaagtgaagcaaacttaaactcagataaagaaaatataaccacctcaaatctcaaggcgagtcattcccctcctttgaatctacccaacaacagccacggaataacagatttctccagtaactcatcagcagagcattctttgggcagtctaaaacccacatctaccatttccacaagccctcccttgatccatagctttgtttctaaagtgccttggaatgcacctatagcagatgaagatcttttgcccatctcagcacatcccaatgctacacctgctctgtcttcagaaaacttcacttggtctttggtcaatgacaccgtgaaaactcctgataacagttccattacagttagcatcctctcttcagaaccaacttctccatctgtgacccccttgatagtggaaccaagtggatggcttaccacaaacagtgatagcttcactgggtttaccccttatcaagaaaaaacaactctacagcctaccttaaaattcaccaataattcaaaactctttccaaatacgtcagatccccaaaaagaaaatagaaatacaggaatagtattcggggccattttaggtgctattctgggtgtctcattgcttactcttgtgggctacttgttgtgtggaaaaaggaaaacggattcattttcccatcggcgactttatgacgacagaaatgaaccagttctgcgattagacaatgcaccggaaccttatgatgtgagttttgggaattctagctactacaatccaactttgaatgattcagccatgccagaaagtgaagaaaatgcacgtgatggcattcctatggatgacatacctccacttcgtacttctgtatagaactaacagcaaaaaggcgttaaacagcaagtgtcatctacatcctagccttttgacaaattcatctttcaaaaggttacacaaaattactgtcacgtggattttgtcaaggagaatcataaaagcaggagaccagtagcagaaatgtagacaggatgtatcatccaaaggttttctttcttacaatttttggccatcctgaggcatttactaagtagccttaatttgtattttagtagtattttcttagtagaaaatatttgtggaatcagataaaactaaaagatttcaccattacagccctgcctcataactaaataataaaaattattccaccaaaaaattctaaaacaatgaagatgactctttactgctctgcctgaagccctagtaccataattcaagattgcattttcttaaatgaaaattgaaagggtgctttttaaagaaaatttgacttaaagctaaaaagaggacatagcccagagtttctgttattgggaaattgaggcaatagaaatgacagacctgtattctagtacgttataattttctagatcagcacacacatgatcagcccactgagttatgaagctgacaatgactgcattcaacggggccatggcaggaaagctgaccctacccaggaaagtaatagcttctttaaaagtcttcaaaggttttgggaattttaacttgtcttaatatatcttaggcttcaattatttgggtgccttaaaaactcaatgagaatcatggtaaaaaaaaaaagttaaccaaagaatatacctgtacataatttgtacagttttaagttgttagataggaactggatttcttatgtattagacattattgctcaatcataatggaatagattctgcatccctaaatgtatgaaccataaggttaaaaaagatgaatggaaatatcaaacaactttttactgagcatcagtttcataatcaataatataagaagattaatttggattctagtatgtttcagtttgtttttaattaccaccttcctttggtagaaaaaatatgttccttgatgtaggaaagtctaggttttagagattagaggatgagatcaagagttaaattcctaaagaagcactgaatatatgaagagagcaaacaaatcaagtaccaacctagaggctttatttttgaattgattcatggtgtgtgtgtgtgtgtgtgtgtgtgtgtgtgtgtgtgtgtaacacagaaacagcttcagaaaataagggatagaaagtaatgaagaaagtacttaccccatattgccataaaaatagcaaagaagactgtccctccattatcgaacaaatatgtcacctgagtagaaaacaaacagaaatattagtcatgcaaattgattataataagccagtgaatactgtttgcactcaggtactatgattttttctcaaatagaatcatattattttatagtacagaaatattatatatgaattcctttcatgggtcttgcaacaatttcacatgatttttctcatggggagaggtgaagaaacaacattagccctcttctctcctctcttgattccctttataccccaccatcatttctgattataaataattctaccattctatggaagtatttgtgggtcacagattgtcaaactacttaatgaaagttgtatgaaattagtttttcaggtgaggcattcctagttgcaattcctgttagcaaaacttctaggagtggggaagttggaaaatgcaggattcttccagtgagccagcatttcccatagctaaccctattctcttagtctttcaaaatgtagaatgggtccaataatggctataagatgtaataaatcccatcttaatttgttttaaaagtttcataaatcactgaacacttatgaaacaaagtgttttttaatcagatatcaactgaaacttcataaaggatgcatagttttataatgttattgaatcaaattttaaggcttgtattgtttgattttaataaagtataaattcaattt

SEQ ID NO: 50223 - DNA, 1086 bp, Artificial Sequence
  derived and/or modified sequence
atgggaattatccagagcatacttgcgaccagccgggactgttactccttcaaaaagaaacctattcctaagaaaccgacaatgcttgctctagcaaaaatactgctgatctctaccctcttctacagcttattgagcgggtcccacggcaaagaaaatcaagacatcaatactacacagaacatcgcggaggtcttcaaaaccatggaaaacaaaccaatctcgctcgagtcagaagcgaacctaaactccgataaggagaatattacaacatccaatttgaaagctagtcatagcccacccctcaatctacccaacaactcccacgggatcaccgatttcagcagtaacagtagcgctgaacactccctcggctcacttaaaccgacatcgacaatcagcacaagccccccactgatccactcctttgtcagcaaagtcccttggaacgcccctatagcagacgaagatctactacctatctcagcccaccccaatgcaacaccagcactgtcgtccgaaaactttacatggtcccttgtcaatgacacagtcaaaacgccggataactctagtatcaccgtcagtattctgtcctcggaacctacatccccaagcgtaactcccctgattgtagaaccatcaggctggctaaccactaactccgactcatttaccggattcacaccttatcaagaaaagactactcttcagcccacactgaaatttacaaacaattccaagttatttccaaataccagcgatccgcagaaagagaatagaaacacaggtattgttttcggggcaattcttggcgcaatactgggggtctcgttgctgaccctggttgggtatctactgtgtggaaagagaaagaccgattctttctcccatcgacgattgtacgatgatcgaaatgagcccgtattgcgattggataacgctcccgaaccctatgatgtcagctttggtaattcaagttattataaccccacgttgaatgatagcgccatgccagaatccgaagagaacgctcgcgatggaatccctatggatgatattcctcctttaagaacctctgtgtag

SEQ ID NO: 50224 - DNA, 1086 bp, Artificial Sequence
  derived and/or modified sequence
atgggtataatccagtctatcctagcaacgagccgcgactgttacagcttcaagaagaaacccattccaaagaagcccaccatgctagcactagccaaaatcttactgatctctactctcttctacagccttctttcaggcagtcacggaaaagaaaaccaggatatcaataccacacaaaacatcgcagaagtattcaaaacaatggagaacaaacctatttctctggaaagcgaggcaaatttaaactcagataaggaaaatatcaccaccagtaatcttaaggcttcccactcaccccccttaaacctacccaacaacagccatggcataacagatttcagctcgaatagttctgccgagcatagcctcgggtccctcaaacctacctccactatctccacatccccaccactaattcattccttcgtatcgaaagtcccctggaacgcacccattgccgatgaggacctactgcccatctctgcccaccccaatgccaccccagctctgtcatccgaaaatttcacatggagccttgtgaacgacacagttaagacccctgataactcctctattactgtaagtattctgtcctctgagccaaccagcccttcagtcacacctcttatcgtggaaccctccggctggctcacaacaaatagcgactcctttacaggtttcacgccttatcaagaaaaaaccaccctacagcctacacttaaattcacgaacaattccaagctgtttcccaatactagcgacccccagaaagagaacagaaataccggtatcgtcttcggggccattctcggtgccatcctcggagtgagcctgctcaccttagtggggtatctgttatgtggcaagcggaaaactgattccttttctcaccgcagactctatgacgacaggaatgaacccgtgcttagattggacaacgctcctgaaccttatgacgtatccttcggcaactcaagttactataatcccacgctaaacgattctgcaatgcctgagtcagaagagaatgcacgagacggaattcccatggacgacatccctcctctgcgcacaagtgtttag

SEQ ID NO: 50225 - DNA, 1086 bp, Artificial Sequence
  derived and/or modified sequence
atgggcatcatccagagcatcctggccaccagcagagactgctacagcttcaagaagaagcccatccccaagaagcccaccatgctggccctggccaagatcctgctgatcagcaccctgttctacagcctgctgagcggcagccacggcaaggagaaccaggacatcaacaccacccagaacatcgccgaggtgttcaagaccatggagaacaagcccatcagcctggagagcgaggccaacctgaacagcgacaaggagaacatcaccaccagcaacctgaaggccagccacagcccccccctgaacctgcccaacaacagccacggcatcaccgacttcagcagcaacagcagcgccgagcacagcctgggcagcctgaagcccaccagcaccatcagcaccagcccccccctgatccacagcttcgtgagcaaggtgccctggaacgcccccatcgccgacgaggacctgctgcccatcagcgcccaccccaacgccacccccgccctgagcagcgagaacttcacctggagcctggtgaacgacaccgtgaagacccccgacaacagcagcatcaccgtgagcatcctgagcagcgagcccaccagccccagcgtgacccccctgatcgtggagcccagcggctggctgaccaccaacagcgacagcttcaccggcttcaccccctaccaggagaagaccaccctgcagcccaccctgaagttcaccaacaacagcaagctgttccccaacaccagcgacccccagaaggagaacagaaacaccggcatcgtgttcggcgccatcctgggcgccatcctgggcgtgagcctgctgaccctggtgggctacctgctgtgcggcaagagaaagaccgacagcttcagccacagaagactgtacgacgacagaaacgagcccgtgctgagactggacaacgcccccgagccctacgacgtgagcttcggcaacagcagctactacaaccccaccctgaacgacagcgccatgcccgagagcgaggagaacgccagagacggcatccccatggacgacatcccccccctgagaaccagcgtgtag

SEQ ID NO: 50226 - DNA, 1086 bp, Artificial Sequence
  derived and/or modified sequence
atggggattattcagtccattttagcaacatctcgtgactgctattccttcaagaaaaagccaattccaaagaaacctactatgctggccttagccaagattctgttgattagcaccctgttttattccctgctgtctggaagccacggcaaggagaatcaggacattaatactacccagaatatcgccgaggtctttaagaccatggaaaataaaccaatctccttagaaagtgaggccaacctgaactccgataaggagaatatcacgactagtaacctcaaagcttctcactctccccccctgaacctacccaataacagtcatgggataaccgacttttcttcaaactcctctgcggagcatagtctcgggtccctgaagccaacaagcacgatctccactagcccccccttaattcactcctttgtgagcaaagtgccttggaatgcacccattgcagatgaagatctcctcccaatctcagcccatcctaatgctactccagcactctctagcgagaattttacatggagccttgtcaatgatactgtgaagactcctgacaattccagtattactgtatccattctaagctctgaacctacgtccccatctgtgactccactgatcgtggagccatcaggttggctgaccaccaattcagattcctttacggggtttacgccgtaccaggaaaaaactactcttcagcccacgctgaagttcaccaataacagcaaactcttccccaataccagtgacccacaaaaggaaaaccgaaataccggaatcgtctttggggctatacttggcgctattctaggagtttccctgctgaccctggtgggatacctcctttgtggtaaaagaaaaaccgactccttctcacaccggagactttacgatgacagaaacgaacccgtgctgcggctcgataacgcacccgaaccctacgatgtgtccttcggaaactcaagctactataacccgactctgaacgacagtgctatgcccgaaagtgaagaaaatgcaagggacgggattccgatggacgacattcctcccttgaggacctctgtttag

SEQ ID NO: 50227 - DNA, 1086 bp, Artificial Sequence
  derived and/or modified sequence
atgggtataatccagagcatcctggcgacctctagagattgttactcctttaaaaagaaaccgattcccaagaagccaaccatgcttgctctggctaagattcttctcatcagtaccttgttttatagcctgttgtctggctcccacgggaaagaaaaccaggatatcaacacgacccagaatattgcggaagttttcaaaacgatggaaaataaaccgatctcactggaatccgaggcaaacctaaactccgacaaagaaaatattactaccagcaatctgaaggcatctcattctccaccactcaatctgcctaataactctcatggaatcactgacttttcgagcaatagcagtgccgaacacagcctgggttctctcaaaccaacaagcaccatctcaacttctcccccactcatccactcctttgtgagcaaggtcccttggaatgcacccatcgctgatgaggatctgctgcctatcagcgcccaccctaatgctacccccgctctcagcagtgagaacttcacctggtcccttgtgaatgataccgtgaagacccccgacaatagctctatcaccgtcagcattttgtccagcgaaccaaccagcccatcagtgaccccactcatcgtggaaccttcaggctggctaactaccaacagtgatagtttcacaggctttacgccgtaccaagagaagacaacgctccagccaaccctaaaattcacgaataacagtaagctcttccccaacaccagcgatccccagaaggagaatcgaaacaccggcatcgtctttggagctatcctgggagcaatactcggcgtctccttgctaaccctggtgggttatctcctctgcggcaagaggaaaacagactctttttctcaccgccggctttacgatgatcgcaatgaacccgttctgcggcttgacaacgcccctgagccttacgacgtgtctttcggcaactcatcttactacaaccccacactcaatgactccgcaatgcctgagagcgaggagaacgcacgcgacgggatcccaatggatgatatcccgcctcttaggacctctgtctag

SEQ ID NO: 50228 - DNA, 1086 bp, Artificial Sequence
  derived and/or modified sequence
atgggcatcatccagagcatcctggccaccagccgggactgctacagcttcaagaagaagcccatccccaagaagcccaccatgctggccctggccaagatcctgctgatcagcaccctcttctacagcctgctgagcggcagccacggcaaggagaaccaggacatcaacaccacccagaacattgctgaggtgttcaagaccatggagaacaagcccatcagcctggagagcgaggccaacctgaacagcgacaaggagaacatcaccaccagcaacctgaaggccagccacagcccccccctgaacctgcccaacaacagccacggcatcacagacttcagcagcaacagcagcgctgagcacagcctgggcagcctgaagcccaccagcaccatcagcaccagccccccactcatccacagctttgtgtccaaggtgccctggaatgcccccatcgcagatgaggacctgctgcccatcagcgcccaccccaatgccaccccagccctgagcagcgagaacttcacctggagcctggtgaatgacacagtgaagaccccagacaacagcagcatcaccgtgtccatcctgagcagcgagcccaccagccccagcgtgacccccctgattgtggagcccagcggctggctgaccaccaacagcgacagcttcaccggcttcaccccctaccaggagaagaccaccctgcagcccaccctgaagttcaccaacaacagcaagctgttccccaacaccagtgacccccagaaggaaaatagaaatactggaattgtgtttggagccatcctgggcgccatcctgggcgtgtccctgctgaccctggtgggctacctgctgtgtgggaagaggaagacagacagcttcagccaccggcggctgtatgatgacagaaatgaacctgtgctgcggctggacaatgcccctgagccctatgatgtgtcctttggaaacagcagctactacaaccccaccctgaatgacagcgccatgcctgagagtgaagaaaatgccagagatggcatccccatggatgacatcccccccctgcggacctctgtgtag

SEQ ID NO: 50229 - DNA, 1086 bp, Artificial Sequence
  derived and/or modified sequence
atgggcatcatccagagcatcctggccaccagccgggactgctactccttcaagaagaaacccattcccaagaagcctaccatgttagccctagccaaaattctactgatctccacccttttctatagcctgctgagcggatcacacggcaaggagaatcaggatatcaatacaactcagaatatagcagaggtcttcaagactatggagaacaagcctatttccttggagagcgaagcgaatctcaatagcgataaagagaacattaccacatccaacttgaaagccagtcattccccccccctgaacctgcccaacaattctcatggaattacagattttagctccaatagcagcgctgaacattcactaggctcgcttaaacccacctccacaataagtacgagccctccgctgatccattcatttgtgagcaaagtgccgtggaatgccccaatcgctgacgaggacctcctgccaatctctgcacatccaaacgccacacctgccctcagttctgagaactttacatggtctctggtgaatgacaccgtgaagacaccagacaacagcagcatcacggtgtctattctgtcctcggaaccgacctctcccagcgtgactcctctcattgtggagccttcaggatggctcacgactaatagcgatagttttacaggattcaccccataccaagagaagaccactcttcaaccaactctaaagttcactaacaatagcaagctctttcccaatacctccgaccctcaaaaggagaacaggaacacagggatcgtgttcggggcaatactgggcgccatactgggtgttagcttattaactttagtgggatatcttctgtgtggcaaaaggaagactgactccttcagccaccggcgtctttacgatgacaggaacgaacctgttctgagactggataatgctcccgaaccttacgatgtgtcattcggaaacagttcatattacaaccccactttgaacgacagcgctatgccagaaagcgaggagaacgctagagatggaattcccatggacgatattcctcccttgagaacctcggtatag

SEQ ID NO: 50230 - DNA, 1086 bp, Artificial Sequence
  derived and/or modified sequence
atgggcatcatccagagcatcctggccaccagccgggactgctacagctttaagaaaaaacccatacccaaaaagcctacaatgctcgctctcgccaaaatcctgctcatctctaccctgttctactccctcctatccgggtctcatggcaaagagaatcaggatatcaataccacccagaacattgccgaagtgttcaagaccatggagaataagcccatttccttggaaagcgaggccaatcttaactctgacaaagagaatatcactacgtccaatttaaaggcgagtcactccccaccgctgaacctgcccaataactcacacgggatcaccgatttcagctccaatagttccgcagaacacagcctggggtctctcaagcccacctccaccatctccacctccccacccctcattcacagttttgttagtaaggtgccgtggaacgctcccatcgctgacgaagacttgcttcccatctcggcccaccctaacgccacacccgccctcagtagcgaaaacttcacatggagcctggtcaatgataccgtgaagaccccagacaattcatctatcacagtaagcatactcagttctgagccgacatctccctccgtgacacccctcatcgttgaacccagtggttggcttacgacaaatagtgattcattcacaggcttcacgccttatcaggagaagaccaccctgcagcccacacttaaattcaccaataattctaaactattcccaaacacctccgacccacagaaggagaacaggaatactggtatcgtttttggggccatcctgggcgctattctgggagtttcactcctcacattggtcggataccttctttgtggaaaacggaaaacagactcgttctcccatcgccggctttatgatgaccgcaacgagcctgttctgcggctagataatgccccagaaccctacgatgtctctttcggaaactcctcttactacaacccaaccctcaacgatagtgccatgccggaatctgaggagaatgcgcgggatggcattcccatggatgacatacctcccctgcgaaccagcgtgtag

SEQ ID NO: 50231 - RNA, 1086 nt, Artificial Sequence
  derived and/or modified sequence
augggcaucauccagagcauacuggccacuagccgugacuguuacucauuuaaaaagaaacccauuccgaagaagccuacuauguuggcgcuggcuaagauccugcucaucucgacacuuuucuauuccuuacuguccgggucucacgguaaagaaaaucaggacaucaacaccacucaaaauauagcugagguguucaagacaauggaaaacaagccaauaucuuuggaguccgaggcaaaucugaauuccgauaaggaaaacauuaccacaagcaacuuaaaggccagccacucacccccccucaacuugccuaacaauucccacggcauaacagacuuuuccucuaauuccucagcugagcauagucucgguucccuuaagccgacauccaccauuucgaccucucccccucugauucacucauucguaaguaaagugccguggaaugccccaauagccgaugaagaccugcucccaauuucggcucacccuaaugcaacccccgcccugaguucugaaaauuucaccuggucucuggucaacgauacuguaaaaacuccagauaacaguucuauuaccgugucaaucuugucgucugaacccacaagcccaucugugaccccccucaucguugagccuuccgguugguugacuacgaauagcgacaguuucaccggcuucacaccuuaccaggaaaagacaacacuccaaccuacccuaaaguuuaccaauaauagcaaauuauucccuaauaccagugauccccagaaggagaaccgcaacacugggaucguguuuggcgcuauccuaggcgcuauucuaggagugucgcuccucacacuggucggauaccuucugugcgggaagcgaaaaacagauaguuuuagccaucgaagacuuuacgaugaucgcaacgaaccuguucuccgccucgacaacgcccccgaaccuuaugaugugucuuuugggaauucauccuacuauaauccaaccuugaaugauucagcuaugccugagagcgaagaaaacgcccgcgacggcauuccaauggacgauauuccaccucugaggaccuccgucuag

SEQ ID NO: 50232 - RNA, 1086 nt, Artificial Sequence
  derived and/or modified sequence
augggaauuauacagucaaucuuggcuacuucgcgcgacuguuauagcuuuaagaaaaagccaauccccaagaagccaacuaugcuagcccuggcgaaaauacuucugauauccacacuguuuuauagccuccuuagcgguucacauggaaaagaaaaucaggauauuaacacuacccagaacaucgcagagguguucaaaacaauggagaauaagccaaucucacuggagagugaagccaaucucaacucggacaaagagaauauaaccaccuccaaccugaaagccagccauuccccccccuuaaaccuacccaacaacagccauggcauaacagauuucagcucgaauaguucugccgagcauagccucgggucccucaaaccuaccuccacuaucuccacauccccaccacuaauucauuccuucguaucgaaaguccccuggaacgcacccauugccgaugaggaccuacugcccaucucugcccaccccaaugccaccccagcucugucauccgaaaauuucacauggagccuugugaacgacacaguuaagaccccugauaacuccucuauuacuguaaguauucuguccucugagcccacuagccccucaguaacuccguuaaucgucgaaccaagcggauggcucacuacuaauagugacuccuucacuggcuuuaccccauaccaggaaaaaaccacccuacagcccacucucaaguuuacaaacaauaguaagcuuuuccccaacacuucugacccccaaaaagagaaucguaauacugggauuguguuuggagcuaucuuaggugcaauauugggcguuucuuuacugacgcucguaggcuaccucuuguguggcaaaaggaaaacagauuccuuuagccaucgccggcuuuacgacgaccggaacgaaccagugcuuagacuggauaaugcccccgaaccuuacgauguuagcuucggaaauucuagcuauuacaacccuacccuuaacgacuccgccaugcccgagagcgaggaaaacgcuagagacggaauaccaauggacgauauuccuccccuccgcacuaguguguag

SEQ ID NO: 50233 - RNA, 1086 nt, Artificial Sequence
  derived and/or modified sequence
augggaauuauccagagcauacuugcgaccagccgggacuguuacuccuucaaaaagaaaccuauuccuaagaaaccgacaaugcuugcucuagcaaaaauacugcugaucucuacccucuucuacagcuuauugagcgggucccacggcaaagaaaaucaagacaucaauacuacacagaacaucgcggaggucuucaaaaccauggaaaacaaaccaaucucgcucgagucagaagcgaaccuaaacuccgauaaggagaauauuacaacauccaauuugaaagcuagucauagcccaccccucaaucuacccaacaacucccacgggaucaccgauuucagcaguaacaguagcgcugaacacucccucggcucacuuaaaccgacaucgacaaucagcacaagccccccacugauccacuccuuugucagcaaagucccuuggaacgccccuauagcagacgaagaucuacuaccuaucucagcccaccccaaugcaacaccagcacugucguccgaaaacuuuacauggucccuugucaaugacacagucaaaacgccggauaacucuaguaucaccgucaguauucuguccucggaaccuacauccccaagcguaacuccccugauuguagaaccaucaggcuggcuaaccacuaacuccgacucauuuaccggauucacaccuuaucaagaaaagacuacucuucagcccacacugaaauuuacaaacaauuccaaguuauuuccaaauaccagcgauccgcagaaagagaauagaaacacagguauuguuuucggggcaauucuuggcgcaauacugggggucucguugcugacccugguuggguaucuacuguguggaaagagaaagaccgauucuuucucccaucgacgauuguacgaugaucgaaaugagcccguauugcgauuggauaacgcucccgaacccuaugaugucagcuuugguaauucaaguuauuauaaccccacguugaaugauagcgccaugccagaauccgaagagaacgcucgcgauggaaucccuauggaugauauuccuccuuuaagaaccucuguguag

SEQ ID NO: 50234 - RNA, 1086 nt, Artificial Sequence
  derived and/or modified sequence
auggguauaauccagucuauccuagcaacgagccgcgacuguuacagcuucaagaagaaacccauuccaaagaagcccaccaugcuagcacuagccaaaaucuuacugaucucuacucucuucuacagccuucuuucaggcagucacggaaaagaaaaccaggauaucaauaccacacaaaacaucgcagaaguauucaaaacaauggagaacaaaccuauuucucuggaaagcgaggcaaauuuaaacucagauaaggaaaauaucaccaccaguaaucuuaaggcuucccacucaccccccuuaaaccuacccaacaacagccauggcauaacagauuucagcucgaauaguucugccgagcauagccucgggucccucaaaccuaccuccacuaucuccacauccccaccacuaauucauuccuucguaucgaaaguccccuggaacgcacccauugccgaugaggaccuacugcccaucucugcccaccccaaugccaccccagcucugucauccgaaaauuucacauggagccuugugaacgacacaguuaagaccccugauaacuccucuauuacuguaaguauucuguccucugagccaaccagcccuucagucacaccucuuaucguggaacccuccggcuggcucacaacaaauagcgacuccuuuacagguuucacgccuuaucaagaaaaaaccacccuacagccuacacuuaaauucacgaacaauuccaagcuguuucccaauacuagcgacccccagaaagagaacagaaauaccgguaucgucuucggggccauucucggugccauccucggagugagccugcucaccuuagugggguaucuguuauguggcaagcggaaaacugauuccuuuucucaccgcagacucuaugacgacaggaaugaacccgugcuuagauuggacaacgcuccugaaccuuaugacguauccuucggcaacucaaguuacuauaaucccacgcuaaacgauucugcaaugccugagucagaagagaaugcacgagacggaauucccauggacgacaucccuccucugcgcacaaguguuuag

SEQ ID NO: 50235 - DNA, 936 bp, Artificial Sequence
  derived and/or modified sequence
atgggcataattcagtctattttagcaacctccagagactgttactcgtttaaaaagaaaccaatccccaagaaacccaccatgctggcccttgctaagattctgctcatatctactctgttctattctctactcagtggatcccatggcaaagaaaatcaggatatcaataccactcagaacatcgcggaggtgtttaagacaatggaaaacaagcctatttctctagaatctgaggctaacttgaacagcgataaagagaatattacaaccagtaacctgaaggctagtcacagcccacccctaaatcttccaaataactcccatggaatcacagatttcagctctaattcctcggccgaacatagtcttgggagtctcaagccaaccagcactatctcaacatcccctccacttatccacagcttcgtcagtaaagtgccctggaatgctcccatcgcggacgaagacctgctgcctatttctgcccaccctaatgctaccccagcattgtcctcagaaaattttacctggtcactggttaatgatactgtgaaaactcctgacaattcaagcatcactgtttccatcctatcctcagaacctacgtctccatccgtcaccccacttatagtggagccatctggctggctgactaccaactcagatagcttcaccggtttcacaccttaccaagagaaaacgaccttacagcctactttgaaattcaccaacaactccaagttgtttccaaacacatccgacccacagaaggtgctgaggctcgacaacgcccctgaaccttacgatgtttcattcggcaattcgtcttattacaacccaaccctcaatgactccgctatgcccgagtcagaggagaatgccagagatggcatcccaatggacgatatcccacccctgcgcaccagtgtgtag

SEQ ID NO: 50236 - DNA, 936 bp, Artificial Sequence
  derived and/or modified sequence
atgggcattattcagagcatcctggccacctcgcgagactgttactcattcaagaagaaaccaatcccgaagaagcccacgatgcttgctctggcgaaaattctgctgatcagtactctgttctactcccttctgagtggctcgcatggcaaagaaaaccaagacataaacactacgcagaacatcgccgaggtgttcaaaacaatggagaataagcccatctcactggagagcgaagctaatctaaactccgataaggaaaacattactacgtctaatctcaaagcctcccacagtcctccccttaacctacccaacaactcccacggcatcacagatttttctagtaacagtagcgccgagcacagtctcgggtcactcaaaccgacatccacaatctccactagtccacccttgattcactcattcgtgagcaaggtgccctggaacgcccctatcgccgatgaagatctgctgcctatctctgcccaccctaacgcaacacctgcactgagcagcgagaattttacttggagtctcgttaatgatacagtcaagactcccgataactcctctattaccgtgtcaatcctaagtagtgaacccacgagcccatccgtgacgccacttatcgtggaacccagtggttggctcactaccaacagcgactcctttacagggttcaccccgtaccaggaaaagacaactctgcaacccacactgaaatttaccaacaacagtaaactcttcccaaacactagtgacccacagaaggttcttagactggataacgccccagagccatatgatgtgtccttcgggaactcttcatactacaatccaacactcaatgatagtgccatgccagagtcggaggagaacgctcgcgatgggatccctatggatgacattcccccattgagaacctccgtgtag

SEQ ID NO: 50237 - DNA, 936 bp, Artificial Sequence
  derived and/or modified sequence
atgggaattattcagtcaatcttggccacctcaagagactgttactcctttaagaaaaaacccatacccaaaaaaccaactatgctggccctggccaaaatactgctgattagtacgctattctattccctgctgtctggatcacacggaaaggagaatcaggatattaatacaacacaaaatattgctgaagtcttcaagacaatggagaataagcccatttccctagaatccgaggctaatcttaatagcgataaggaaaatattacaacctctaatctcaaagcttctcattctccaccactcaatttgcctaacaattcacacggaatcactgactttagtagcaacagttcagccgaacactcccttggcagccttaagcctacctccacaataagcacaagccccccgcttatccactcatttgtctccaaggtaccttggaacgccccaattgccgacgaggacctgcttccaatctccgcgcaccccaatgccacccccgctctaagcagcgagaatttcacttggtcactggtcaacgataccgttaaaactcctgataatagttctatcactgtgtctattctgtcctcagagcccacttcccccagcgtcacccctctcatcgttgagccatcaggctggctgactacgaattccgacagctttactggatttacaccctatcaagaaaagaccactctgcaacccaccctgaagtttaccaacaattccaagctattccctaatacaagtgacccccagaaggtgctgcgactggataacgcccccgaaccatatgatgtgtcatttggcaatagctcctattataacccgaccctgaacgatagtgctatgccggagtctgaagaaaatgctagggacggtatccctatggatgatatccctccacttcgcacctcggtctag

SEQ ID NO: 50238 - DNA, 936 bp, Artificial Sequence
  derived and/or modified sequence
atggggatcattcaatcaatactcgctaccagccgggactgctactctttcaaaaaaaaacccatacctaaaaaacccaccatgctggcattggccaagattcttctcatctctacacttttctactctcttcttagcggatcccacggaaaggagaatcaagatatcaacaccacgcagaatattgctgaggtgtttaaaacaatggagaacaaaccgatcagtctggagagcgaggcaaatcttaatagcgacaaggaaaacattacgacctctaatcttaaagcatctcacagtcctcccctcaatctgcctaataactctcatggcatcactgatttctcatccaatagtagcgcagagcactcattaggtagcctgaaacctactagcacaatctccacctcccctcccctaatacacagctttgtgagtaaagtcccctggaacgcaccaatagccgatgaggaccttcttccaatttccgcacatccaaatgccacacccgcactgtcttcagagaatttcacctggagcctggttaacgacacagtgaagacgcccgacaattcctccatcaccgtaagcatactgtcttctgaaccgaccagccccagcgtaactcccctgatcgtggagccaagcgggtggctaacgaccaattcagattcatttaccggattcacgccttatcaggagaagacgacactgcagccaactttgaagtttacaaacaacagcaaactctttccaaatacatcagatccccaaaaagtgttgaggctcgataatgcaccagagccatacgacgtttcatttgggaactcaagctactataaccccactctgaacgattccgctatgccagaatccgaagaaaacgcacgtgacggcattcctatggacgatattccgccactcagaacctctgtgtag

SEQ ID NO: 50239 - DNA, 936 bp, Artificial Sequence
  derived and/or modified sequence
atgggaattatacaatccatactcgccaccagccgcgactgttattcctttaaaaagaagcctatccccaagaaacctaccatgttggcccttgcaaagatcctccttattagcacattattttactcgttgttgtctggatcgcacggcaaagagaatcaggacattaatacaacgcagaatattgcagaagtctttaaaaccatggaaaacaaacctatttcgctcgagagcgaggcaaatctaaactctgacaaggaaaatatcaccactagcaaccttaaagccagtcactcccctcctttgaacctccccaacaactcccatgggatcactgacttttcctctaacagcagcgctgaacattcactgggcagcctaaaacccacttccactatcagcacaagtcctccactaatccacagtttcgtgtctaaagtgccctggaacgctccgatcgccgacgaagacctgctacccatatccgcccatcctaacgcaaccccagccttaagcagcgaaaacttcacctggagtctggttaacgatacagtgaaaaccccagacaattcttcaattacagttagcatcctgagcagcgaacctacttccccaagtgtgacacccctcatcgtcgagccaagtggttggttgacaacaaactctgactctttcactggtttcacaccctaccaagaaaaaactacactacagcctacgctgaagtttactaataattctaagcttttcccgaatacgtccgatccgcagaaggtcctaaggttagacaacgcacccgagccctatgacgtctcttttggcaacagctcctactacaaccctacgctcaacgacagcgcaatgcccgagagcgaagagaacgcaagagatggcatccccatggacgatatcccccctctgagaacatctgtgtag

SEQ ID NO: 50240 - DNA, 936 bp, Artificial Sequence
  derived and/or modified sequence
atgggtataatccagtctatcctagctacaagccgcgactgttattcatttaagaaaaaacccattccaaaaaagcctactatgcttgcccttgcaaaaattcttctaatatctaccttattctatagcctgttgtccgggtcacatgggaaagagaaccaggatatcaacacgacccaaaatatagccgaggtgttcaaaacaatggaaaataaacccatcagtctagaaagtgaagccaacctgaactccgataaagagaatattacaacatctaacttaaaggcaagccacagcccacccctcaatctgcctaataactctcatggcatcactgatttctcatccaatagtagcgcagagcactcattaggtagcctgaaacctactagcacaatctccacctcccctcccctaatacacagctttgtgagtaaagtcccctggaacgcaccaatagccgatgaggaccttcttccaatttccgcacatccaaatgccacacccgcactgtcttcagagaatttcacctggagcctggttaacgacacagtgaagacgcccgacaattcctccatcaccgtaagcatactgtcttctgagcctacatcaccttccgtaacacccttgatagtcgagcccagcggctggctcacaaccaattccgactcatttaccggtttcaccccttaccaagagaaaacaacccttcagccaaccctcaaattcacaaataatagcaaactttttcctaacacttctgacccccagaaagtcctgaggctggacaatgcccctgagccctacgacgtgtcctttggaaatagttcctactataaccctacacttaatgactccgctatgcctgagagcgaagagaacgcaagagatgggatcccaatggacgacataccccctctcagaacaagcgtgtag

SEQ ID NO: 50241 - DNA, 936 bp, Artificial Sequence
  derived and/or modified sequence
atgggcatcatccagagcatcctggccaccagcagagactgctacagcttcaagaagaagcccatccccaagaagcccaccatgctggccctggccaagatcctgctgatcagcaccctgttctacagcctgctgagcggcagccacggcaaggagaaccaggacatcaacaccacccagaacatcgccgaggtgttcaagaccatggagaacaagcccatcagcctggagagcgaggccaacctgaacagcgacaaggagaacatcaccaccagcaacctgaaggccagccacagcccccccctgaacctgcccaacaacagccacggcatcaccgacttcagcagcaacagcagcgccgagcacagcctgggcagcctgaagcccaccagcaccatcagcaccagcccccccctgatccacagcttcgtgagcaaggtgccctggaacgcccccatcgccgacgaggacctgctgcccatcagcgcccaccccaacgccacccccgccctgagcagcgagaacttcacctggagcctggtgaacgacaccgtgaagacccccgacaacagcagcatcaccgtgagcatcctgagcagcgagcccaccagccccagcgtgacccccctgatcgtggagcccagcggctggctgaccaccaacagcgacagcttcaccggcttcaccccctaccaggagaagaccaccctgcagcccaccctgaagttcaccaacaacagcaagctgttccccaacaccagcgacccccagaaggtgctgagactggacaacgcccccgagccctacgacgtgagcttcggcaacagcagctactacaaccccaccctgaacgacagcgccatgcccgagagcgaggagaacgccagagacggcatccccatggacgacatcccccccctgagaaccagcgtgtag

SEQ ID NO: 50242 - DNA, 936 bp, Artificial Sequence
  derived and/or modified sequence
atgggaattatccaaagcatcctcgcaaccagcagagattgctattcctttaagaagaaacccattccgaagaaacctactatgctggcacttgcaaagattctactgatttctacgctgttttattctctgctctccggtagccatggcaaagaaaatcaggatattaacaccacacagaatatcgctgaagtattcaagacaatggaaaacaagccaattagtctggagtctgaagctaacctgaactcggacaaggagaacattaccacaagtaacttgaaggcctcacacagcccgcctctaaacctaccaaacaatagccatggaatcacggattttagctccaattcttcggccgaacactcgctgggcagcctgaaacccacgtctaccatttcaaccagcccgcctttgattcactcctttgtgagtaaggtgccctggaatgcaccaattgccgacgaggacctgctgccgattagcgctcatcctaacgcgactcctgcactgtcctctgagaatttcacttggagtctggtcaatgacactgtgaaaacacctgataattcctctataaccgtttcaatactgtcaagtgagcctactagcccttccgtaactcccctgatcgttgagcccagcggctggctcaccacaaattctgatagcttcaccgggttcaccccttaccaggaaaaaaccaccttgcaaccaactctcaaattcacaaacaattctaagctgtttcccaacactagcgaccctcagaaagtcttacgactagataatgctcctgagccatatgacgtgagcttcggtaattcatcttactacaacccaaccttaaatgattcagctatgcctgaaagtgaggagaatgccagagacggtatccccatggatgacatacctccacttcgcacttctgtgtag

SEQ ID NO: 50243 - DNA, 936 bp, Artificial Sequence
  derived and/or modified sequence
atgggtatcatacagtctatcctcgccacctcacgcgactgctatagcttcaagaagaagcctattccgaagaagcccactatgttggctctggccaaaatcctgctcatttcaaccttgttttactccctgctttcggggtcccatgggaaggagaaccaggatataaatactacccagaacatcgccgaggtctttaagaccatggagaataagccaatttcactggagtccgaagccaatctaaactctgataaagagaacattaccaccagtaacttgaaggcctcacacagcccacctctgaatctgcccaacaattctcatggcatcactgatttttcctcgaactcctccgccgagcactcgctgggtagtcttaaaccaacatcaacaatcagcaccagcccgcctttaattcacagttttgtatctaaagtcccatggaacgcccctattgcggatgaggatctccttcctattagtgctcaccccaacgctacacccgccttatcatctgaaaacttcacatggagtcttgtcaatgacactgtcaagacgcctgacaattcttcaatcaccgtgtcaatcctgagcagcgagcccacgagccccagcgttacgcctctgatcgtggaaccttcagggtggctgaccaccaattccgacagtttcactggatttaccccgtaccaggaaaaaacaacactccaacctacattgaagtttaccaataactccaaacttttcccgaacacatcagacccacaaaaagtgctgcgtctagacaacgcccctgagccctacgacgtatcttttggcaattcttcctactataaccccactttaaacgatagtgctatgcccgagagcgaagaaaatgctcgcgacggcattccaatggacgacattcctccactccgtacaagtgtgtag

SEQ ID NO: 50244 - DNA, 936 bp, Artificial Sequence
  derived and/or modified sequence
atgggcatcatccagagcatcctggccaccagccgggactgctacagcttcaagaagaagcccatccccaagaagcccaccatgctggccctggccaagatcctgctgatcagcaccctcttctacagcctgctgagcggcagccacggcaaggagaaccaggacatcaacaccacccagaacattgctgaggtgttcaagaccatggagaacaagcccatcagcctggagagcgaggccaacctgaacagcgacaaggagaacatcaccaccagcaacctgaaggccagccacagcccccccctgaacctgcccaacaacagccacggcatcacagacttcagcagcaacagcagcgctgagcacagcctgggcagcctgaagcccaccagcaccatcagcaccagccccccactcatccacagctttgtgtccaaggtgccctggaatgcccccatcgcagatgaggacctgctgcccatcagcgcccaccccaatgccaccccagccctgagcagcgagaacttcacctggagcctggtgaatgacacagtgaagaccccagacaacagcagcatcaccgtgtccatcctgagcagcgagcccaccagccccagcgtgacccccctgattgtggagcccagcggctggctgaccaccaacagcgacagcttcaccggcttcaccccctaccaggagaagaccaccctgcagcccaccctgaagttcaccaacaacagcaagctgttccccaacaccagtgacccccagaaggtgctgcggctggacaatgcccctgagccctatgatgtgtcctttggaaacagcagctactacaaccccaccctgaatgacagcgccatgcctgagagtgaagaaaatgccagagatggcatccccatggatgacatcccccccctgcggacctctgtgtag

SEQ ID NO: 50245 - DNA, 936 bp, Artificial Sequence
  derived and/or modified sequence
atgggcatcatccagagcatcctggccaccagccgggactgctacagctttaagaagaagcccattccgaaaaaacccacaatgctggccctggccaaaattctcctaatttccaccctcttctattctctcttgtctggtagtcatggcaaggagaatcaggacattaacacaacccagaacatcgcagaggtcttcaagaccatggaaaataaacctattagtcttgagagcgaggccaacctaaactccgacaaagagaacattactacaagcaacctaaaggccagccacagcccacccctcaatctgccgaacaactcacacggcattactgacttttcatctaatagctccgccgagcacagtctggggtccttgaaaccaactagtactatcagcacaagcccgcctcttatccacagttttgtctctaaggttccttggaatgcccccattgccgacgaagaccttctccccatttccgctcatcccaacgcaacacctgccttaagttctgagaattttacatggtccctcgttaatgacacagttaaaacgcctgataattcaagcatcaccgtgtcgatcctgagctctgagccaactagccctagcgtaacccctcttatcgttgaaccaagcggatggctgactacaaacagcgacagctttacaggtttcaccccctatcaagagaagactacccttcagcctaccttgaaattcaccaacaattctaaattatttcctaataccagcgatccacagaaggtcctgcggctggataatgcaccagaaccttacgatgtatcctttgggaattcctcgtattacaaccccactcttaatgattccgccatgcctgaaagtgaagagaatgctagggatggaatccctatggatgacatccctcctttaagaacttcagtgtag

SEQ ID NO: 50246 - DNA, 936 bp, Artificial Sequence
  derived and/or modified sequence
atgggcatcatccagagcatcctggccaccagccgggactgctacagctttaagaagaagccaataccaaagaagcctacaatgctggcccttgcaaaaatacttctgatatcaaccctgttctatagtttacttagcgggagccacggcaaagaaaaccaggacatcaatactacacagaacatagcagaagtttttaaaacaatggaaaataaacctataagcctggaaagtgaggctaatctcaattcagacaaagaaaacatcaccaccagcaatctcaaagcaagccacagcccaccattgaatctgcccaacaattcccacggtatcacggattttagtagtaatagctctgccgaacatagcttagggagtctgaaacccacgtccacaattagcaccagtcccccccttattcatagtttcgtctcaaaagtgccgtggaacgcccctatcgctgacgaagaccttctacctataagtgcacaccctaatgcaactccagccctgagtagcgagaattttacttggtccttagtgaatgacaccgtgaagactcccgacaacagcagtattacggtgtctattctgagcagcgagcccactagcccctccgtcactcctctaatcgtcgaaccttccggatggttaaccacaaattctgacagttttacaggctttactccataccaagagaaaaccaccctgcagccaaccttgaagtttacgaataattccaaactgttcccgaatacaagcgatccccagaaagttttacggctggacaacgcgccagagccatacgacgttagtttcggcaacagtagctattacaaccccaccctaaacgactccgcaatgccagaatcagaagagaacgctcgggacggtatccccatggatgacatacccccactgagaactagtgtctag

SEQ ID NO: 50247 - RNA, 936 nt, Artificial Sequence
  derived and/or modified sequence
augggaauuauucagucaaucuuggccaccucaagagacuguuacuccuuuaagaaaaaacccauacccaaaaaaccaacuaugcuggcccuggccaaaauacugcugauuaguacgcuauucuauucccugcugucuggaucacacggaaaggagaaucaggauauuaauacaacacaaaauauugcugaagucuucaagacaauggagaauaagcccauuucccuagaauccgaggcuaaucuuaauagcgauaaggaaaauauuacaaccucuaaucucaaagcuucucauucuccaccacucaauuugccuaacaauucacacggaaucacugacuuuaguagcaacaguucagccgaacacucccuuggcagccuuaagccuaccuccacaauaagcacaagccccccgcuuauccacucauuugucuccaagguaccuuggaacgccccaauugccgacgaggaccugcuuccaaucuccgcgcaccccaaugccacccccgcucuaagcagcgagaauuucacuuggucacuggucaacgauaccguuaaaacuccugauaauaguucuaucacugugucuauucuguccucagagcccacuucccccagcgucaccccucucaucguugagccaucaggcuggcugacuacgaauuccgacagcuuuacuggauuuacacccuaucaagaaaagaccacucugcaacccacccugaaguuuaccaacaauuccaagcuauucccuaauacaagugacccccagaaggugcugcgacuggauaacgcccccgaaccauaugaugugucauuuggcaauagcuccuauuauaacccgacccugaacgauagugcuaugccggagucugaagaaaaugcuagggacgguaucccuauggaugauaucccuccacuucgcaccucggucuag

SEQ ID NO: 50248 - RNA, 936 nt, Artificial Sequence
  derived and/or modified sequence
auggggaucauucaaucaauacucgcuaccagccgggacugcuacucuuucaaaaaaaaacccauaccuaaaaaacccaccaugcuggcauuggccaagauucuucucaucucuacacuuuucuacucucuucuuagcggaucccacggaaaggagaaucaagauaucaacaccacgcagaauauugcugagguguuuaaaacaauggagaacaaaccgaucagucuggagagcgaggcaaaucuuaauagcgacaaggaaaacauuacgaccucuaaucuuaaagcaucucacaguccuccccucaaucugccuaauaacucucauggcaucacugauuucucauccaauaguagcgcagagcacucauuagguagccugaaaccuacuagcacaaucuccaccuccccuccccuaauacacagcuuugugaguaaaguccccuggaacgcaccaauagccgaugaggaccuucuuccaauuuccgcacauccaaaugccacacccgcacugucuucagagaauuucaccuggagccugguuaacgacacagugaagacgcccgacaauuccuccaucaccguaagcauacugucuucugaaccgaccagccccagcguaacuccccugaucguggagccaagcggguggcuaacgaccaauucagauucauuuaccggauucacgccuuaucaggagaagacgacacugcagccaacuuugaaguuuacaaacaacagcaaacucuuuccaaauacaucagauccccaaaaaguguugaggcucgauaaugcaccagagccauacgacguuucauuugggaacucaagcuacuauaaccccacucugaacgauuccgcuaugccagaauccgaagaaaacgcacgugacggcauuccuauggacgauauuccgccacucagaaccucuguguag

SEQ ID NO: 50249 - RNA, 936 nt, Artificial Sequence
  derived and/or modified sequence
augggaauuauacaauccauacucgccaccagccgcgacuguuauuccuuuaaaaagaagccuauccccaagaaaccuaccauguuggcccuugcaaagauccuccuuauuagcacauuauuuuacucguuguugucuggaucgcacggcaaagagaaucaggacauuaauacaacgcagaauauugcagaagucuuuaaaaccauggaaaacaaaccuauuucgcucgagagcgaggcaaaucuaaacucugacaaggaaaauaucaccacuagcaaccuuaaagccagucacuccccuccuuugaaccuccccaacaacucccaugggaucacugacuuuuccucuaacagcagcgcugaacauucacugggcagccuaaaacccacuuccacuaucagcacaaguccuccacuaauccacaguuucgugucuaaagugcccuggaacgcuccgaucgccgacgaagaccugcuacccauauccgcccauccuaacgcaaccccagccuuaagcagcgaaaacuucaccuggagucugguuaacgauacagugaaaaccccagacaauucuucaauuacaguuagcauccugagcagcgaaccuacuuccccaagugugacaccccucaucgucgagccaagugguugguugacaacaaacucugacucuuucacugguuucacacccuaccaagaaaaaacuacacuacagccuacgcugaaguuuacuaauaauucuaagcuuuucccgaauacguccgauccgcagaagguccuaagguuagacaacgcacccgagcccuaugacgucucuuuuggcaacagcuccuacuacaacccuacgcucaacgacagcgcaaugcccgagagcgaagagaacgcaagagauggcauccccauggacgauauccccccucugagaacaucuguguag

SEQ ID NO: 50250 - RNA, 936 nt, Artificial Sequence
  derived and/or modified sequence
auggguauaauccagucuauccuagcuacaagccgcgacuguuauucauuuaagaaaaaacccauuccaaaaaagccuacuaugcuugcccuugcaaaaauucuucuaauaucuaccuuauucuauagccuguuguccgggucacaugggaaagagaaccaggauaucaacacgacccaaaauauagccgagguguucaaaacaauggaaaauaaacccaucagucuagaaagugaagccaaccugaacuccgauaaagagaauauuacaacaucuaacuuaaaggcaagccacagcccaccccucaaucugccuaauaacucucauggcaucacugauuucucauccaauaguagcgcagagcacucauuagguagccugaaaccuacuagcacaaucuccaccuccccuccccuaauacacagcuuugugaguaaaguccccuggaacgcaccaauagccgaugaggaccuucuuccaauuuccgcacauccaaaugccacacccgcacugucuucagagaauuucaccuggagccugguuaacgacacagugaagacgcccgacaauuccuccaucaccguaagcauacugucuucugagccuacaucaccuuccguaacacccuugauagucgagcccagcggcuggcucacaaccaauuccgacucauuuaccgguuucaccccuuaccaagagaaaacaacccuucagccaacccucaaauucacaaauaauagcaaacuuuuuccuaacacuucugacccccagaaaguccugaggcuggacaaugccccugagcccuacgacguguccuuuggaaauaguuccuacuauaacccuacacuuaaugacuccgcuaugccugagagcgaagagaacgcaagagaugggaucccaauggacgacauacccccucucagaacaagcguguag

SEQ ID NO: 50251 - protein, 1204 aa, Artificial Sequence
  derived and/or modified sequence
MYVTMMMTDQIPLELPPLLNGEVAMMPHLVNGDAAQQVILVQVNPGETFTIRAEDGTLQCIQGPAEVPMMSPNGSIPPIHVPPGYISQVIEDSTGVRRVVVTPQSPECYPPSYPSAMSPTHHLPPYLTHHPHFIHNSHTAYYPPVTGPGDMPPQFFPQHHLPHTIYGEQEIIPFYGMSTYITREDQYSKPPHKKLKDRQIDRQNRLNSPPSSIYKSSCTTVYNGYGKGHSGGSGGGGSGSGPGIKKTERRARSSPKSNDSDLQEYELEVKRVQDILSGIEKPQVSNIQARAVVLSWAPPVGLSCGPHSGLSFPYSYEVALSDKGRDGKYKIIYSGEELECNLKDLRPATDYHVRVYAMYNSVKGSCSEPVSFTTHSCAPECPFPPKLAHRSKSSLTLQWKAPIDNGSKITNYLLEWDEGKRNSGFRQCFFGSQKHCKLTKLCPAMGYTFRLAARNDIGTSGYSQEVVCYTLGNIPQMPSAPRLVRAGITWVTLQWSKPEGCSPEEVITYTLEIQEDENDNLFHPKYTGEDLTCTVKNLKRSTQYKFRLTASNTEGKSCPSEVLVCTTSPDRPGPPTRPLVKGPVTSHGFSVKWDPPKDNGGSEILKYLLEITDGNSEANQWEVAYSGSATEYTFTHLKPGTLYKLRACCISTGGHSQCSESLPVRTLSIAPGQCRPPRVLGRPKHKEVHLEWDVPASESGCEVSEYSVEMTEPEDVASEVYHGPELECTVGNLLPGTVYRFRVRALNDGGYGPYSDVSEITTAAGPPGQCKAPCISCTPDGCVLVGWESPDSSGADISEYRLEWGEDEESLELIYHGTDTRFEIRDLLPAAQYCCRLQAFNQAGAGPYSELVLCQTPASAPDPVSTLCVLEEEPLDAYPDSPSACLVLNWEEPCNNGSEILAYTIDLGDTSITVGNTTMHVMKDLLPETTYRIRIQAINEIGAGPFSQFIKAKTRPLPPLPPRLECAAAGPQSLKLKWGDSNSKTHAAEDIVYTLQLEDRNKRFISIYRGPSHTYKVQRLTEFTCYSFRIQAASEAGEGPFSETYTFSTTKSVPPTIKAPRVTQLEGNSCEILWETVPSMKGDPVNYILQVLVGRESEYKQVYKGEEATFQISGLQTNTDYRFRVCACRRCLDTSQELSGAFSPSAAFVLQRSEVMLTGDMGSLDDPKMKSMMPTDEQFAAIIVLGFATLSILFAFILQYFLMK

SEQ ID NO: 50252 - protein, 71 aa, Artificial Sequence
  derived and/or modified sequence
MYVTMMMTDQIPLELPPLLNGEVAMMPHLVNGDAAQQVILVQVNPGETFTIRAEDGTLQCIQEVNVKRHCL

SEQ ID NO: 50253 - DNA, 7904 bp, Artificial Sequence
  derived and/or modified sequence
aagctcgggcgggggagcggggcgcggcgggaaggagcgggcgacccggtgtgtgggccagcggagctccggaagccagttgagggaagttctccatgaatgtacgtcacaatgatgatgaccgaccaaatccctctggaactgccaccattgctgaacggagaggtagccatgatgccccacttggtgaatggagatgcagctcagcaggttattctcgttcaagttaatccaggtgagactttcacaataagagcagaggatggaacacttcagtgcattcaaggacctgctgaagttcccatgatgtcacccaatggatccattcctcccattcatgtgcctccaggttatatctcacaggtgattgaagatagtactggagtccgccgggtggtggtcacaccccagtctcctgagtgttatcccccaagctacccctcagccatgtctccaacccatcatctccctccctatctgactcaccatccacattttattcataactcacacacggcttactacccacctgttaccggacctggagatatgccgcctcagttttttccccagcatcatcttccccacacaatatatggtgagcaagaaattataccattttatggaatgtcaacctacatcacccgagaagaccagtacagcaagcctccgcacaaaaaactgaaagaccgccagatcgatcgccagaaccgcctcaacagccctccttcttctatctacaaaagcagctgcacaacagtatacaatggctatgggaagggccatagtggtggaagtggcggaggcggcagcggtagtggtcccggaattaagaaaacagagcgacgagcaagaagcagcccaaagtcgaatgattcagacttgcaagaatatgagttggaagtaaagagggtgcaagacattctttcgggaatagagaaaccacaggtttctaatattcaggcaagagcagttgtgttgtcctgggctccccctgttggactttcctgtggaccccacagtggtctttccttcccctacagttacgaggtggccttatcagacaaaggacgagatggaaaatacaagataatttacagtggagaagaattagaatgtaacctgaaagatcttagaccagcaacagattatcatgtgagggtgtatgccatgtacaattccgtaaagggatcctgctccgagcctgttagcttcaccacccacagctgtgcacccgagtgtcctttcccccctaagctggcacataggagcaaaagttcactaaccctgcagtggaaggcaccaattgacaacggttcaaaaatcaccaactaccttttagagtgggatgagggaaaaagaaatagtggtttcagacagtgcttcttcgggagccagaagcactgcaagttgacaaagctttgtccggcaatggggtacacattcaggctggccgctcgaaacgacattggtaccagtggttatagccaagaggtggtgtgctacacattaggaaatatccctcagatgccttctgcaccaaggctggttcgagctggcatcacatgggtcacgttgcagtggagtaagccagaaggctgttcacccgaggaagtgatcacctacaccttggaaattcaggaggatgaaaatgataaccttttccacccaaaatacactggagaggatttaacctgtactgtgaaaaatctcaaaagaagcacacagtataaattcaggctgactgcttctaatacggaaggaaaaagctgtccaagcgaagttcttgtttgtacgacgagtcctgacaggcctggacctcctaccagaccgcttgtcaaaggcccagttacatctcatggctttagtgtcaaatgggatccccctaaggacaatggtggttcagaaatcctcaagtacttgctagagattactgatggaaattctgaagcgaatcagtgggaagtggcctacagtgggtcggctaccgaatacaccttcacccacttgaaaccaggcactttgtacaaactccgagcatgctgcatcagtaccggcggacacagccagtgttctgaaagtctccctgttcgcacactaagcattgcaccaggtcaatgtcgaccaccgagggttttgggtagaccaaagcacaaagaagtccacttagagtgggatgttcctgcatcggaaagtggctgtgaggtctcagagtacagcgtggagatgacggagcccgaagacgtagcctcggaagtgtaccatggcccagagctggagtgcaccgtcggcaacctgcttcctggaaccgtgtatcgcttccgggtgagggctctgaatgatggagggtatggtccctattctgatgtctcagaaattaccactgctgcagggcctcctggacaatgcaaagcaccttgtatttcttgtacacctgatggatgtgtcttagtgggttgggagagtcctgatagttctggtgctgacatctcagagtacaggttggaatggggagaagatgaagaatccttagaactcatttatcatgggacagacacccgttttgaaataagagacctgttgcctgctgcacagtattgctgtagactacaggccttcaatcaagcaggggcagggccgtacagtgaacttgtcctttgccagacgccagcgtctgcccctgaccccgtctccactctctgtgtcctggaggaggagccccttgatgcctaccctgattcaccttctgcgtgccttgtactgaactgggaagagccgtgcaataacggatctgaaatccttgcttacaccattgatctaggagacactagcattaccgtgggcaacaccaccatgcatgttatgaaagatctccttccagaaaccacctaccggatcagaattcaggctataaatgaaattggagctggaccatttagtcagttcattaaagcaaaaactcggccattaccacccttgcctcctaggctagaatgtgctgctgctggtcctcagagcctgaagctaaaatggggagacagtaactccaagacacatgctgctgaggacattgtgtacacactacagctggaggacagaaacaagaggtttatttcaatctacagaggacccagccacacctacaaggtccagagactgacggaattcacatgctactccttcagaatccaggcagcaagcgaggctggagaagggcccttctcagaaacctataccttcagcacaaccaaaagtgtcccccccaccatcaaagcacctcgagtaacacagttagaaggaaattcatgtgaaattttatgggagacggtaccatcaatgaaaggtgaccctgttaactacattctgcaggtattggttggaagagaatctgagtacaaacaggtgtacaagggagaagaagccacattccaaatctcaggcctccagaccaacacagactacaggttccgcgtatgtgcgtgtcgtcgctgtttagacacctctcaggagctaagcggagccttcagcccctctgcggcttttgtattacaacgaagtgaggtcatgcttacaggggacatggggagcttagatgatcccaaaatgaagagcatgatgcctactgatgaacagtttgcagccatcattgtgcttggctttgcaactttgtccattttatttgcctttatattacagtacttcttaatgaagtaaacccaacaaaactagaggtatgaattaatgctacacattttaatacacacatttattcagatactcccctttttaaagcccttttgttttttgatttatatactctgttttacagatttagctagaaaaaaaatgtcagtgttttggtgcacctttttgaaatgcaaaactaggaaaaggttaaactggatttttttttttaaaaaaaagaaaaaaaaagaagaaaagtataccagataccaaaagctagctttcttatgttttcctttaaattttcagatttaccttcattctgttttcactgatgtcttttgcaagcctttgatttttttttttttgttacagtttagtaatttatattcaccagtcacttcatatgtcttgaacatctgtatctgtaaacatgaatcaccgtgtgtgtacttacagggctaggatttcagtgttgtcagagtattaccacacagcaacagcaacatacagaagatatgttcactcagataagactgccctaaacaaccattttgtcactcagttatttaactgtgtttagctcatttaaatcaaaatgtgtactttaatctaaaatgttttaataatctgtatttcttataattttaacactatgagctgcctgtataagaaatcaagtaaccagaatgcacctataaattatggagcattgtagattttaccacatcaattcatagcagtaactttaagagggcattgtgcaatagttagttgttttcttgttcagctattttaaaggctgctttaacttgtttgtttgtctttgtatataactacttctaatctaatcactagagttattatattctgttatgtttgaccagaattatatgacaagaactggtgacagtttagtgcctctgcccattgtccatgatttacactaattgtgagcagtcttcttatgtgtcagctcattatttttgaaacatttgcctttaggctgttctttgaggtatcaatgaagtgattgaatttcaataccttaattcagtgcacataatactaatgtaacagcagatgaaaattgataaaacccaaaagagagtcatctaaatttgtagttcctatttctgtgggtttgcctggccatggttggagagggaatggtgtttgatggtaaacacagggtgtttggggatcaaggagcctagattctctccctggatctgtcactaacttgctgcgtgacctgaacacgtcactttacctctctgtgcctcagttttcccatgcatgaaaaataaaataaaataaaacggggattctaatgtttgtaagtgctttgagatctttgaccaacaggtgctattggagtgcaaagtgttactcttacgtgtttattttgagtcatgagataatcaattttaacccaaagtcattggattatttatatgaagtccataatgttcgagtacctcagggacatttaagagttggaggtgcaaatatattccaaaagggtgcaacagacacagtgtatccccctgcttctgtttttgtatatttttgctacttggtttttcttgatcatagctattttgtgcttgatctttattgtctaagatgcagtatcctgtactagcttataatattcccataccaaagtcatggggaaacaaacattattttgtttttggtttatttatactatattctgcatacagtactttaaatgccaattacagtgcaatctttatttattgtaaaattttttaagtgtacttatgtactaattttcccttgtagcatgttatatttttgtgttttatacttttgtaattttaggtcagtcttgttccttggcaacatctgtagtattattaatcttctgacattttcttatgtttttaaaaagataagagcatctagtgcattaaatgccaaaaaaaaaatacattatcagtgattgaaacgtttacatgtacccaaaaaccataatcatctcttggaagaaaatgctgagatcaatgaattattctgtgtgcctatattgacgtagtgagtactagagagttctgtattttattattgactataataattagtttaattagctttgcaaactgatggcatcaaggtaaatatatttttgccaaagttctggccttccaaaactcacccccttatttaaatgtgtgctatgacccactatgaccacagcatctgcattttctaaaaaattccatgcaggtgttttggggagaggtattttttaagcaatgaaaattcaactgagtacaaagccccctcttggggggttggggaagtctcttttttgaaacacttcagaactgctgctataaagaaattctctaattggttgaattttttttttaagtaaatagtactttaggccaaaatttatatgaatatttgatcttcttgagattttcatactatcatttaaccaccaggaagctgaagtgtgtgaagtacaaagctgacagcactttattttattgctctccattatttggtattcattatattccttcagtcagaaaattattactctctatggcactgttttttatcacaaatatgtatatgtgatattgatatataactatatatattgccatcacacacgaacaataaaataaagtgttctattaacctgatctctttgcccttttgctatgtgaggagtgaatgagtggccttctgatgctctgactcttctctgtatgtcaaactcatccctggcacaagaaattccagtcatgtgaagcaaactgccctttgtcctcaaagaaattgttgaaaaagaaaactttttaaagagattttttgcatattctctgccttgttcttatcaacttgaaatgttggcattttctaaccttgttttgttggctacaataattcagtattcatgtcaaaattgagaagtgccctaattgaatgtgtttgaatgttatccttgcacaattctttaaattgaaagataaaatgttttacctcactgttggacatacattccaagcttttcaactctaggagaaaaagaaaatcatgttttcctgtattgtaaattttagactatttcatatacattgtattaaaactgccatatcaattttaatgtatagattttgcaaatattatgctatatgtaatacctaactgtatctgtagtgtatatgtaatatatttatgcccaataaatgttttaattctttctgacttaaatagggtttttctgccatgactaggattgcttttgttgttgttgttgttgtttctttctttttttttttttttgagacggagtcttgctctgtcgccaggctggagtgcagtggcgcgatctcagctcactgcaacctccagctcccaggttcaagtgattcccctgcctcagcctcccaagtagctggggattacaggcactcgccaccatgcccggataattttttttttttttttgagttggagtcttgctctgtcgcccaggctggagtgcagtgacccaatctcggctcactgcaagctccacctcccgggttcatgccattctcctgcctcagcctcccaagtagctgggactacaggtgcccgccaccacgcccggctaatttttttaattttagtagagtcggggtttcaccatgttggccaagatggtctcgatctgacctcgtgatctgcccgcctcggcctcccaaagtgctgggattacaggtgtgagcccccgcacccagccttattcttcccttttaaatacttaaagcacattcagattagttgaaaattcacgtgtttttggaggccaggcaggtggccttctgcagagacagcagcagctcagctcttgctgaccaaggccttggaggactgtgagccacaatcacatatgtccatgtttcaaaagaagctaaatatccagatttcctccatgggccaactaaaaggtgattgtggactatacaggctgccagtttaatcctttatcagagtctctgtggataatgtaccttgttgcctaatactttatctgtctaccaaaactcagtccagatctccctctgttcacctggcacactgggtgcttcctctcccctgacgaactctatagagtgttcatgtcctttcctgcaggtctcattcaacaacaacaacaacaacagcaataaaacacagtgttcctgcta

SEQ ID NO: 50254 - DNA, 388 bp, Artificial Sequence
  derived and/or modified sequence
gcggcggcggcggctggaggaggagagcggcggcggcgggagcagcgaagggggcggcagggatcctccaggctgccggctgggaaggcgtgggcgacccggtgtgtggcgcgcccagagccccgcgtttcagccctagggaaggaagccagttgagggaagttctccatgaatgtacgtcacaatgatgatgaccgaccaaatccctctggaactgccaccattgctgaacggagaggtagccatgatgccccacttggtgaatggagatgcagctcagcaggttattctcgttcaagttaatccaggtgagactttcacaataagagcagaggatggaacacttcagtgcattcaagaagtaaatgttaaaaggcactgtttatga

SEQ ID NO: 50255 - DNA, 5083 bp, Artificial Sequence
  derived and/or modified sequence
gcggcggcggcggctggaggaggagagcggcggcggcgggagcagcgaagggggcggcagggatcctccaggctgccggctgggaaggcgtgggcgacccggtgtgtggcgcgcccagagccccgcgtttcagccctagggaaggaagccagttgagggaagttctccatgaatgtacgtcacaatgatgatgaccgaccaaatccctctggaactgccaccattgctgaacggagaggtagccatgatgccccacttggtgaatggagatgcagctcagcaggttattctcgttcaagttaatccaggtgagactttcacaataagagcagaggatggaacacttcagtgcattcaaggacctgctgaagttcccatgatgtcacccaatggatccattcctcccattcatgtgcctccaggttatatctcacaggtgattgaagatagtactggagtccgccgggtggtggtcacaccccagtctcctgagtgttatcccccaagctacccctcagccatgtctccaacccatcatctccctccctatctgactcaccatccacattttattcataactcacacacggcttactacccacctgttaccggacctggagatatgccgcctcagttttttccccagcatcatcttccccacacaatatatggtgagcaagaaattataccattttatggaatgtcaacctacatcacccgagaagaccagtacagcaagcctccgcacaaaaaactgaaagaccgccagatcgatcgccagaaccgcctcaacagccctccttcttctatctacaaaagcagctgcacaacagtatacaatggctatgggaagggccatagtggtggaagtggcggaggcggcagcggtagtggtcccggaattaagaaaacagagcgacgagcaagaagcagcccaaagtcgaatgattcagacttgcaagaatatgagttggaagtaaagagggtgcaagacattctttcgggaatagagaaaccacaggtttctaatattcaggcaagagcagttgtgttgtcctgggctccccctgttggactttcctgtggaccccacagtggtctttccttcccctacagttacgaggtggccttatcagacaaaggacgagatggaaaatacaagataatttacagtggagaagaattagaatgtaacctgaaagatcttagaccagcaacagattatcatgtgagggtgtatgccatgtacaattccgtaaagggatcctgctccgagcctgttagcttcaccacccacagctgtgcacccgagtgtcctttcccccctaagctggcacataggagcaaaagttcactaaccctgcagtggaaggcaccaattgacaacggttcaaaaatcaccaactaccttttagagtgggatgagggaaaaagaaatagtggtttcagacagtgcttcttcgggagccagaagcactgcaagttgacaaagctttgtccggcaatggggtacacattcaggctggccgctcgaaacgacattggtaccagtggttatagccaagaggtggtgtgctacacattaggaaatatccctcagatgccttctgcaccaaggctggttcgagctggcatcacatgggtcacgttgcagtggagtaagccagaaggctgttcacccgaggaagtgatcacctacaccttggaaattcaggaggatgaaaatgataaccttttccacccaaaatacactggagaggatttaacctgtactgtgaaaaatctcaaaagaagcacacagtataaattcaggctgactgcttctaatacggaaggaaaaagctgtccaagcgaagttcttgtttgtacgacgagtcctgacaggcctggacctcctaccagaccgcttgtcaaaggcccagttacatctcatggctttagtgtcaaatgggatccccctaaggacaatggtggttcagaaatcctcaagtacttgctagagattactgatggaaattctgaagcgaatcagtgggaagtggcctacagtgggtcggctaccgaatacaccttcacccacttgaaaccaggcactttgtacaaactccgagcatgctgcatcagtaccggcggacacagccagtgttctgaaagtctccctgttcgcacactaagcattgcaccaggtcaatgtcgaccaccgagggttttgggtagaccaaagcacaaagaagtccacttagagtgggatgttcctgcatcggaaagtggctgtgaggtctcagagtacagcgtggagatgacggagcccgaagacgtagcctcggaagtgtaccatggcccagagctggagtgcaccgtcggcaacctgcttcctggaaccgtgtatcgcttccgggtgagggctctgaatgatggagggtatggtccctattctgatgtctcagaaattaccactgctgcagggcctcctggacaatgcaaagcaccttgtatttcttgtacacctgatggatgtgtcttagtgggttgggagagtcctgatagttctggtgctgacatctcagagtacaggttggaatggggagaagatgaagaatccttagaactcatttatcatgggacagacacccgttttgaaataagagacctgttgcctgctgcacagtattgctgtagactacaggccttcaatcaagcaggggcagggccgtacagtgaacttgtcctttgccagacgccagcgtctgcccctgaccccgtctccactctctgtgtcctggaggaggagccccttgatgcctaccctgattcaccttctgcgtgccttgtactgaactgggaagagccgtgcaataacggatctgaaatccttgcttacaccattgatctaggagacactagcattaccgtgggcaacaccaccatgcatgttatgaaagatctccttccagaaaccacctaccggatcagaattcaggctataaatgaaattggagctggaccatttagtcagttcattaaagcaaaaactcggccattaccacccttgcctcctaggctagaatgtgctgctgctggtcctcagagcctgaagctaaaatggggagacagtaactccaagacacatgctgctgaggacattgtgtacacactacagctggaggacagaaacaagaggtttatttcaatctacagaggacccagccacacctacaaggtccagagactgacggaattcacatgctactccttcagaatccaggcagcaagcgaggctggagaagggcccttctcagaaacctataccttcagcacaaccaaaagtgtcccccccaccatcaaagcacctcgagtaacacagttagaaggaaattcatgtgaaattttatgggagacggtaccatcaatgaaaggtgaccctgttaactacattctgcaggtattggttggaagagaatctgagtacaaacaggtgtacaagggagaagaagccacattccaaatctcaggcctccagaccaacacagactacaggttccgcgtatgtgcgtgtcgtcgctgtttagacacctctcaggagctaagcggagccttcagcccctctgcggcttttgtattacaacgaagtgaggtcatgcttacaggggacatggggagcttagatgatcccaaaatgaagagcatgatgcctactgatgaacagtttgcagccatcattgtgcttggctttgcaactttgtccattttatttgcctttatattacagtacttcttaatgaagtaaacccaacaaaactagaggtatgaattaatgctacacattttaatacacacatttattcagatactcccctttttaaagcccttttgttttttgatttatatactctgttttacagatttagctagaaaaaaaatgtcagtgttttggtgcacctttttgaaatgcaaaactaggaaaaggttaaactggatttttttttttaaaaaaaagaaaaaaaaagaagaaaagtataccagataccaaaagctagctttcttatgttttcctttaaattttcagatttaccttcattctgttttcactgatgtcttttgcaagcctttgatttttttttttttgttacagtttagtaatttatattcaccagtcacttcatatgtcttgaacatctgtatctgtaaacatgaatcaccgtgtgtgtacttacagggctaggatttcagtgttgtcagagtattaccacacagcaacagcaacatacagaagatatgttcactcagataagactgccctaaacaaccattttgtcactcagttatttaactgtgtttagctcatttaaatcaaaatgtgtactttaatctaaaatgttttaataatctgtatttcttataattttaacactatgagctgcctgtataagaaatcaagtaaccagaatgcacctataaattatggagcattgtagattttaccacatcaattcatagcagtaactttaagagggcattgtgcaatagttagttgttttcttgttcagctattttaaaggctgctttaacttgtttgtttgtctttgtatataactacttctaatctaatcactagagttattatattctgttatgtttgaccagaattatatgacaagaactggtgacagtttagtgcctctgcccattgtccatgatttacactaattgtgagcagtcttcttatgtgtcagctcattatttttgaaacatttgcctttaggctgttctttgaggtatcaatgaagtgattgaatttcaataccttaattcagtgcacataatactaatgtaacagcagatgaaaattgataaaacccaaaagagagtcatctaaatttgtagttcctatttctgtgggtttgcctggccatggttggagagggaatggtgtttgatggtaaacacagggtgtttggggatcaaggagcctagattctctccctggatctgtcactaacttgctgcgtgacctgaacacgtcactttacctctctgtgcctcagttttcccatgcatgaaaaataaaataaaataaaacggg

SEQ ID NO: 50256 - DNA, 3684 bp, Artificial Sequence
  derived and/or modified sequence
agtgtctaccaccaaactcctaaggctggatggtggaagccagttgagggaagttctccatgaatgtacgtcacaatgatgatgaccgaccaaatccctctggaactgccaccattgctgaacggagaggtagccatgatgccccacttggtgaatggagatgcagctcagcaggttattctcgttcaagttaatccaggtgagactttcacaataagagcagaggatggaacacttcagtgcattcaaggacctgctgaagttcccatgatgtcacccaatggatccattcctcccattcatgtgcctccaggttatatctcacaggtgattgaagatagtactggagtccgccgggtggtggtcacaccccagtctcctgagtgttatcccccaagctacccctcagccatgtctccaacccatcatctccctccctatctgactcaccatccacattttattcataactcacacacggcttactacccacctgttaccggacctggagatatgccgcctcagttttttccccagcatcatcttccccacacaatatatggtgagcaagaaattataccattttatggaatgtcaacctacatcacccgagaagaccagtacagcaagcctccgcacaaaaaactgaaagaccgccagatcgatcgccagaaccgcctcaacagccctccttcttctatctacaaaagcagctgcacaacagtatacaatggctatgggaagggccatagtggtggaagtggcggaggcggcagcggtagtggtcccggaattaagaaaacagagcgacgagcaagaagcagcccaaagtcgaatgattcagacttgcaagaatatgagttggaagtaaagagggtgcaagacattctttcgggaatagagaaaccacaggtttctaatattcaggcaagagcagttgtgttgtcctgggctccccctgttggactttcctgtggaccccacagtggtctttccttcccctacagttacgaggtggccttatcagacaaaggacgagatggaaaatacaagataatttacagtggagaagaattagaatgtaacctgaaagatcttagaccagcaacagattatcatgtgagggtgtatgccatgtacaattccgtaaagggatcctgctccgagcctgttagcttcaccacccacagctgtgcacccgagtgtcctttcccccctaagctggcacataggagcaaaagttcactaaccctgcagtggaaggcaccaattgacaacggttcaaaaatcaccaactaccttttagagtgggatgagggaaaaagaaatagtggtttcagacagtgcttcttcgggagccagaagcactgcaagttgacaaagctttgtccggcaatggggtacacattcaggctggccgctcgaaacgacattggtaccagtggttatagccaagaggtggtgtgctacacattaggaaatatccctcagatgccttctgcaccaaggctggttcgagctggcatcacatgggtcacgttgcagtggagtaagccagaaggctgttcacccgaggaagtgatcacctacaccttggaaattcaggaggatgaaaatgataaccttttccacccaaaatacactggagaggatttaacctgtactgtgaaaaatctcaaaagaagcacacagtataaattcaggctgactgcttctaatacggaaggaaaaagctgtccaagcgaagttcttgtttgtacgacgagtcctgacaggcctggacctcctaccagaccgcttgtcaaaggcccagttacatctcatggctttagtgtcaaatgggatccccctaaggacaatggtggttcagaaatcctcaagtacttgctagagattactgatggaaattctgaagcgaatcagtgggaagtggcctacagtgggtcggctaccgaatacaccttcacccacttgaaaccaggcactttgtacaaactccgagcatgctgcatcagtaccggcggacacagccagtgttctgaaagtctccctgttcgcacactaagcattgcaccaggtcaatgtcgaccaccgagggttttgggtagaccaaagcacaaagaagtccacttagagtgggatgttcctgcatcggaaagtggctgtgaggtctcagagtacagcgtggagatgacggagcccgaagacgtagcctcggaagtgtaccatggcccagagctggagtgcaccgtcggcaacctgcttcctggaaccgtgtatcgcttccgggtgagggctctgaatgatggagggtatggtccctattctgatgtctcagaaattaccactgctgcagggcctcctggacaatgcaaagcaccttgtatttcttgtacacctgatggatgtgtcttagtgggttgggagagtcctgatagttctggtgctgacatctcagagtacaggttggaatggggagaagatgaagaatccttagaactcatttatcatgggacagacacccgttttgaaataagagacctgttgcctgctgcacagtattgctgtagactacaggccttcaatcaagcaggggcagggccgtacagtgaacttgtcctttgccagacgccagcgtctgcccctgaccccgtctccactctctgtgtcctggaggaggagccccttgatgcctaccctgattcaccttctgcgtgccttgtactgaactgggaagagccgtgcaataacggatctgaaatccttgcttacaccattgatctaggagacactagcattaccgtgggcaacaccaccatgcatgttatgaaagatctccttccagaaaccacctaccggatcagaattcaggctataaatgaaattggagctggaccatttagtcagttcattaaagcaaaaactcggccattaccacccttgcctcctaggctagaatgtgctgctgctggtcctcagagcctgaagctaaaatggggagacagtaactccaagacacatgctgctgaggacattgtgtacacactacagctggaggacagaaacaagaggtttatttcaatctacagaggacccagccacacctacaaggtccagagactgacggaattcacatgctactccttcagaatccaggcagcaagcgaggctggagaagggcccttctcagaaacctataccttcagcacaaccaaaagtgtcccccccaccatcaaagcacctcgagtaacacagttagaaggaaattcatgtgaaattttatgggagacggtaccatcaatgaaaggtgaccctgttaactacattctgcaggtattggttggaagagaatctgagtacaaacaggtgtacaagggagaagaagccacattccaaatctcaggcctccagaccaacacagactacaggttccgcgtatgtgcgtgtcgtcgctgtttagacacctctcaggagctaagcggagccttcagcccctctgcggcttttgtattacaacgaagtgaggtcatgcttacaggggacatggggagcttagatgatcccaaaatgaagagcatgatgcctactgatgaacagtttgcagccatcattgtgcttggctttgcaactttgtccattttatttgcctttatattacagtacttcttaatgaagtaaacccaa

SEQ ID NO: 50257 - DNA, 3615 bp, Artificial Sequence
  derived and/or modified sequence
atgtacgtaaccatgatgatgaccgatcagatcccacttgagctcccgccccttctgaatggagaggtggccatgatgcctcacttggtcaacggcgacgcagcacagcaggtgatattggtacaagtgaatcccggcgaaaccttcaccatacgagccgaggatggaactttgcagtgcatacaggggcctgccgaggtcccgatgatgagtccgaatggctctattcctccaatccatgtgcctcctggctatatctcccaagtgatagaggactccacgggcgtgcggcgggtagtcgtgacaccccaatcacctgagtgttatcctcccagctatccatccgcaatgtcaccgacacatcatctacctccttatctgacacaccaccctcacttcatacataactcacatacagcctactatccaccagtgaccggaccgggggatatgccccctcaattttttccccagcatcatcttccacacaccatttatggggagcaggaaatcattccattctacggaatgagcacctacattactagagaggatcaatattccaaacctccacataaaaaattgaaagatcgccaaatcgatcgtcagaaccggcttaatagccctccatcctccatatataaaagcagctgtacgaccgtgtacaatgggtacgggaagggccacagtggcggctcaggcggcggcggttccggatcagggccgggaataaagaagactgagcggagggcacgatctagccctaaatcgaacgactccgacttgcaggagtacgagctcgaagtaaagcgcgtgcaggacattttgagcggtatagagaagcctcaggtcagtaatattcaagcccgggcggttgtgctttcctgggcccctccagtaggcctttcatgtggaccacacagtggtttgtcgttcccatacagctatgaagtggctctgtcagataaggggagagacgggaaatacaaaataatttacagcggggaggaattagaatgcaatctcaaggacctaagacccgcaaccgattaccatgtacgagtgtatgccatgtacaactcagtcaagggatcttgcagtgagcctgttagctttacgacccatagctgcgctcccgaatgcccctttcctccaaagctggctcacaggagtaagtcatctttgaccctgcagtggaaagctccgattgacaatggaagcaaaattacaaactacttgctggaatgggatgaggggaagcgcaatagtggcttcagacagtgtttctttggctcgcagaagcattgcaagcttacaaaactctgccctgctatgggctacacttttaggttggctgctaggaatgatattggcacctctggttattctcaagaggtggtgtgttatacactgggaaacattccacagatgccatctgcacctaggcttgttagggcggggattacgtgggttacactgcaatggagtaagcctgagggttgttctcctgaagaagtaattacttacacccttgagatacaggaagacgagaacgataatctttttcatccgaagtacacgggtgaagacttgacctgcacagtgaaaaacctaaagcggagtacccagtacaagttccgcctgactgcttcaaacaccgaagggaaatcgtgtccttcagaagtcctggtctgcacgacctcacccgaccggccggggccccctactagacctttggtgaaaggtccggtcaccagtcacggtttcagcgttaagtgggacccaccgaaagacaacggtggatctgaaattctgaaatatctgttggaaataacagacggtaactccgaggccaaccaatgggaggtcgcctatagtggaagtgctacggagtacacgttcacacacctgaaaccaggaaccttgtacaagctccgcgcctgttgcatcagcacgggtggccacagtcagtgttctgaaagccttccagtccggaccctgagcattgccccagggcagtgccgtcccccgagagtactgggacgacctaagcataaagaagtccacttggaatgggacgtacctgcaagcgaatcgggctgcgaggtgagcgagtattctgtcgagatgactgagcctgaggacgtggctagcgaggtgtaccatgggcccgaactcgagtgtaccgtgggcaacctgttgcctggcacggtgtacaggttccgcgtgagggccctgaacgatggggggtatggtccttatagtgacgtgagtgaaattaccacagcagcagggcctcctggccagtgcaaggctccatgtatctcttgtactcccgatgggtgtgtgctggtgggatgggagtcaccagatagttcgggagcggatatctccgagtatcggctcgagtggggggaggacgaagaatccttagaattgatttatcacgggactgataccagatttgagattcgggacctgctgccagcagcacagtattgttgtagactgcaggctttcaaccaggccggtgcaggaccatacagcgaactggtcctttgccagacgcccgccagtgcccccgatccagtgtctaccttatgtgtgctggaggaggagccactcgatgcctatcctgacagcccaagcgcatgtctcgtgctgaactgggaagaaccttgcaataatggtagcgagatccttgcatatactatcgatctgggcgacaccagcataaccgtgggaaacactacaatgcatgtgatgaaagacctcctgccagagacaacctataggatccgaattcaggcgataaatgagatcggcgcaggtccattctcacaatttattaaagccaagacccgcccactgccacccctaccaccgcgcttggagtgtgcggccgccggaccccagtctcttaaactgaaatggggcgacagcaactctaagacgcatgctgccgaggatatagtgtatactcttcaattggaagacaggaacaagaggttcatctcaatataccgcggcccatctcacacatacaaggtacagagacttactgagtttacatgctactcttttcgaatacaagccgcatcagaggctggagaaggtccgtttagcgaaacttatacattcagtacaaccaaatccgtgcctccaacaattaaggcccctagggtcactcagctcgaggggaattcatgcgaaattctgtgggaaaccgttccttcaatgaagggggaccctgtgaattacatactgcaagttcttgtcgggagagagtcagaatataagcaggtttacaagggcgaggaagctacttttcagatttctggacttcagacaaacacagattaccgatttagggtgtgcgcttgccgacgctgtctcgatacttcccaggagcttagcggagctttcagcccatccgcagctttcgttttgcagcggtcagaggtgatgcttaccggggacatgggatcactggatgatcccaagatgaagagcatgatgcctacggatgagcaatttgctgccatcattgtgctggggttcgccacactgagcattctgtttgcttttatcttgcaatacttcttaatgaagtag

SEQ ID NO: 50258 - DNA, 216 bp, Artificial Sequence
  derived and/or modified sequence
atgtatgtcactatgatgatgactgaccagattccgttagagctccctcccttgttgaacggtgaggtggcaatgatgccacatctcgttaacggggacgcagcccagcaggtcatacttgtccaggtaaatccgggcgaaacgttcacaataagggccgaagacgggactcttcaatgcattcaggaggtgaatgtgaaacgccattgcctctag

SEQ ID NO: 50259 - DNA, 3615 bp, Artificial Sequence
  derived and/or modified sequence
atgtacgtgactatgatgatgacggatcaaattccactcgagcttcctcctctgctgaatggggaagtcgctatgatgccccacctggtaaacggcgatgccgctcaacaggttattctggtccaggttaatcccggagaaacctttaccatcagagcggaggatgggacattgcagtgcatccagggacctgcagaagtgcctatgatgtcaccaaatgggtcgatacccccgattcacgtgccccccggctacatctcccaggtgattgaggattctactggtgtgagacgggttgtagtgacaccccagagcccggaatgctaccctccgtcttaccctagcgctatgtcgcccacccatcacctgcccccttatttaacccaccacccccatttcatccataacagtcacacggcctactatcctcctgtgacagggccaggcgacatgccccctcaattttttccacagcatcacctgccacatacaatctatggagaacaagagattatcccattttacggtatgagtacctacatcacacgggaggatcagtactctaagccacctcataagaaactgaaggaccgtcagattgatcggcaaaatagactgaacagccctccatcatcaatctacaaaagctcatgtactacagtgtataacgggtatggcaagggccactcagggggaagcggcggtgggggcagcggcagtgggccagggatcaagaaaaccgagagacgcgctaggtcaagtccaaaaagtaacgatagcgacttacaggagtatgagctggaggtcaagagggtgcaggatattctgagtggcatagaaaagcctcaagtttcgaatatccaagcccgagcagtcgtcttgagctgggctccacctgtgggattatcatgcggtcctcactccggactctccttcccatactcttatgaagtggctctttcggataagggtagggacgggaagtacaagatcatttactctggggaagagttggaatgcaacctcaaagatttgcgccccgcaaccgactatcatgtgagggtttatgctatgtacaatagcgtgaagggatcttgctccgaacccgtaagcttcacgacgcactcatgcgccccggagtgtccctttccccctaaactcgctcatcgatccaaatcaagcctaaccttgcagtggaaagcacccatcgataacgggtccaaaattacaaattatctgctggagtgggacgaagggaaaagaaacagcgggttccggcagtgtttctttggctctcagaaacattgcaagttgaccaagctatgccctgctatgggctatacttttaggctggcagcccgcaacgacatcggaaccagcggatattcacaagaggtggtatgttacacattggggaacatccctcagatgccttcggctcctcggctagttcgcgcagggatcacatgggtgacacttcagtggtctaagccagagggctgtagcccggaagaggtcattacctacactctcgagatacaggaggatgagaatgataacctgtttcatcccaagtacactggggaggatctgacgtgtactgtcaaaaatctcaagcgttccacacagtacaagttcaggctcacagcatctaataccgagggaaaatcatgtccaagcgaagtgctagtgtgcacaacgtcccccgacagacccggtcctcctaccaggccgttggttaaaggcccggtgacaagtcacggttttagtgtcaaatgggacccccccaaagacaatggcggatccgagatccttaagtaccttctagagattacggatgggaacagtgaagccaaccagtgggaggtggcatactcgggctcggctacagaatatacctttacccacttgaaacctggcacattgtataagttgagagcatgttgtatctctacaggcgggcatagtcagtgtagtgagagcctccctgtcagaacgcttagcatagctcccggacagtgtcggcccccccgagtgctgggacggccgaaacacaaggaggtgcatctcgagtgggatgtgcctgcatcagaatccggttgtgaagtcagtgagtactccgtcgagatgacagagcctgaggatgtcgcctccgaagtatatcatgggccggaactggaatgtacggtcggcaacctgctccccggtactgtgtatcgcttccgcgtgcgggctctgaatgacggaggctatggcccgtatagtgacgtgtccgaaatcacgaccgctgccgggcctcccggacagtgcaaagcaccctgtatctcatgtacacccgacggatgcgtcctagtcggttgggagagccctgactctagtggggccgacatctccgagtataggctcgagtggggagaggatgaagaaagtctggagctcatttatcatggtacagacaccaggtttgaaatccgcgacctgctgccagcagctcagtattgttgcagacttcaggcgttcaatcaggccggagccgggccatatagcgagctcgttctgtgtcagacacctgccagcgcgcccgaccctgtgagtacactgtgcgtcctggaggaggaacctcttgacgcttaccctgactcgccttctgcgtgcctggtgctgaattgggaggaaccctgtaataatgggagcgaaatcctggcatataccattgatctgggcgataccagcatcaccgtgggaaacacaactatgcatgtaatgaaggacctgcttcccgaaaccacgtaccggataaggatccaggccataaatgagatcggagcagggcccttctctcagttcattaaagcgaagacaagaccactgccccctctccctccccgattggaatgcgctgctgccggccctcagtcactcaaattgaagtggggggactctaactcaaaaactcacgcggctgaggatattgtgtatacgttgcagctcgaagaccgcaacaaacgctttatcagtatctataggggaccatctcacacctataaagtccagcggcttaccgagttcacatgctattctttcaggattcaggcagcgtctgaggctggagagggcccattctctgaaacgtacacattcagtaccacaaaaagcgttccacccactatcaaagcgccaagagtgacgcagcttgagggtaacagctgtgagatactgtgggagacagtaccttcaatgaagggcgatccagtcaactacatcctgcaggtgttggtgggtcgggagagtgagtacaaacaggtctataagggggaagaggcaacgttccagatatcgggactccagactaataccgactaccgatttcgagtgtgcgcttgtcggcggtgtctcgatacaagtcaggagctctcaggagcattctcaccctctgcagcctttgtactccagcgctcagaggtaatgcttaccggagatatgggctccttggatgaccccaaaatgaagtctatgatgccaactgatgaacaattcgccgcaattatcgtgcttggattcgccaccctgtcaatcttgtttgcctttatactgcagtattttctcatgaaatag

SEQ ID NO: 50260 - DNA, 3615 bp, Artificial Sequence
  derived and/or modified sequence
atgtatgtgaccatgatgatgaccgaccaaatacctcttgaactcccaccgctcttgaacggcgaagtcgcgatgatgcctcatctggttaatggcgacgccgcccagcaggtgatcctcgtgcaagttaatccaggggagacgttcaccatccgggctgaggatggaacactccagtgtatccagggccccgcggaagtgcctatgatgagcccgaacgggagtatcccccctatccacgtgcccccgggatatattagccaggttatcgaggattcgacaggcgtgcggcgcgtggtggtaacgccccaatctccagagtgttatccaccttcctacccatctgccatgagtcctacgcatcacctgcccccatatcttactcaccaccctcatttcatacacaacagtcatacggcttactatccaccagtgaccggtccaggcgacatgcctcctcagttcttccctcagcaccaccttcctcataccatttatggagagcaggaaataattcccttctatggcatgtccacctacattacaagggaggatcagtactctaagcccccccataaaaaactgaaggatagacaaatcgataggcaaaatcgtcttaactcaccccccagctccatctacaaaagctcctgtaccactgtttataatggctatggtaaaggacattcaggagggagcggcggtggtggtagcgggtctggtcctggaataaagaagaccgaacgcagagcaagaagtagtcccaagtccaacgactcggacctgcaggagtacgaactcgaggtgaagcgggtgcaagatattctgagcggtattgagaaacctcaggttagcaacattcaggctcgagcagttgtgctctcttgggcccctcctgtgggtctgagctgcggcccccactcgggactgtcatttccttacagctacgaagtggcactatccgataaaggcagggacgggaagtataaaatcatctattccggggaagagctcgagtgtaacttaaaggatctgagacccgctacggactaccacgtgagagtctatgccatgtacaactctgtgaaagggtcctgcagcgagcccgtctcatttaccactcacagctgtgctccagagtgccccttcccccccaaattagcccatagaagcaaatcttcactgactctgcagtggaaagctcctatagacaacggcagcaagatcacgaactacctcttggagtgggacgaggggaagcgaaactcaggatttaggcagtgtttttttgggtctcagaaacattgtaaacttactaaactgtgtccagccatgggatataccttccggctcgccgctcgtaacgacatcgggacctctggttatagccaggaagtcgtgtgttacactctggggaacatccctcagatgccttccgctccacgccttgtgcgcgctggtataacctgggtgaccttgcagtggagtaaacccgaagggtgcagtcctgaggaagtgattacatataccctcgagattcaggaagacgagaacgataatctttttcatcccaaatacaccggtgaagacctgacttgtacagtgaagaaccttaaacgatctacacagtataagtttagattgaccgctagtaacactgaaggcaaaagctgcccttctgaagttctcgtgtgtaccacaagtcctgaccgtcctggcccaccaacacggcctttggtcaaggggcccgtgactagccatgggttctccgttaaatgggacccccctaaggacaacggtggcagcgaaatactgaagtacctgctggagataaccgacggaaactctgaagctaaccagtgggaggtggcgtatagcggctcagcgacggagtacacgtttacccatttaaagcctggaacgctgtacaagcttagggcttgttgtatctcaacaggtgggcatagccagtgctcagagtctctccccgtacggaccctctctatcgccccggggcagtgtcggcctccaagagttctaggacgacctaaacacaaagaagtgcacctggagtgggacgtgcccgcaagtgaatccggatgtgaggtgtccgaatacagcgttgaaatgaccgaacctgaggatgtcgcctccgaagtatatcatggacctgagctggagtgtaccgtgggcaaccttttgcctggtaccgtgtatcggtttcgagtcagggcgctcaacgacggaggatatggcccttacagtgatgtctcggaaatcaccactgctgcagggccccccggacagtgcaaagcgccatgtatttcgtgtacaccagatggctgtgtcctggtgggctgggaatcccctgactcgagtggggctgatattagcgagtaccggctggagtggggcgaagatgaagagagtctagagttaatttaccatggcacagacaccaggttcgagatccgggacttgttgccggccgcgcaatattgttgccgcctccaggccttcaaccaagctggagcgggaccctacagtgagctggttctctgccagacacccgccagcgctccggacccggtgagcaccctgtgtgtccttgaagaggagcccctggacgcctaccctgattcccctagcgcttgccttgtacttaactgggaggaaccctgcaataacggcagcgagatccttgcctatactatagacctgggggacacctccatcactgtcggtaacaccactatgcatgtcatgaaggacctcctacccgagaccacgtatagaatccggattcaggcgattaacgagattggcgctgggccgttctctcagttcatcaaggctaagactcgacccctgccccccctgccaccacgccttgagtgcgctgctgctgggccacagagcctgaagttgaaatggggcgattcaaactccaagacccatgccgccgaggatatagtatacactctgcaattagaggatcggaataaacggtttattagcatttacaggggtccaagccatacatataaggtgcagaggctgactgaatttacctgctattccttcagaatccaggcagcttctgaagcgggggaggggcccttttccgaaacatatacattttccacaactaaatcagtgccccccaccattaaggcacctagagtcactcagcttgaggggaacagttgcgagattctgtgggaaaccgttcctagcatgaaaggcgatcctgtgaactacatcctgcaggttttggtggggcgagaaagcgagtataaacaagtgtataagggggaggaagccactttccagatctctggactccagaccaatacggactacaggttcagggtttgcgcgtgccggcgatgtctcgataccagccaagaactgtcaggagcattcagtcccagcgctgcctttgtattgcagcgaagtgaagtgatgctcaccggcgatatggggtcccttgatgatcccaaaatgaaatcgatgatgcctaccgacgaacagttcgctgcaatcattgtcctggggttcgccactttgtctatcctatttgcgttcatattgcagtatttcttaatgaagtag

SEQ ID NO: 50261 - DNA, 3615 bp, Artificial Sequence
  derived and/or modified sequence
atgtatgtgaccatgatgatgacagaccagatccccctggagctgccccccctgctgaatggagaggtggccatgatgccccacctggtgaatggagatgctgcccagcaggtgatcctggtgcaggtgaaccctggagagaccttcaccatccgggcagaagatggcaccctgcagtgcatccagggccctgctgaggtgcccatgatgagccccaacggcagcatcccccccatccacgtgcccccaggctacatcagccaggtgattgaggacagcactggagtgagaagagtggtggtgaccccccagagccctgagtgctacccacccagctaccccagcgccatgagccccacccaccacctgcccccctacctgacccaccacccccacttcatccacaacagccacacagcctactacccacctgtgacaggccctggggacatgccaccccagttcttcccccagcaccacctgccccacaccatctacggggagcaggagatcatccccttctacggcatgagcacctacatcacccgggaggaccagtacagcaagccaccccacaagaagctgaaggaccggcagattgaccggcagaaccggctgaacagcccccccagcagcatctacaagagcagctgcaccaccgtgtacaacggctacggcaagggccacagcggcggcagcggcggcggcggcagcggcagcggccctggcatcaagaagacagaaagaagagcccggagcagccccaagagcaatgacagcgacctgcaggagtatgagctggaggtgaagagggtgcaggacatcctgtctggaattgagaagccccaggtgagcaacatccaggcccgggctgtggtgctgtcctgggcccctcctgtgggcctgagctgtggcccccacagcggcctgtccttcccctacagctatgaggtggccctgagtgacaagggcagagatggcaagtacaagatcatctacagcggggaggagctggagtgcaacctgaaggacctgcggcctgccacagactaccacgtgcgggtgtatgccatgtacaacagcgtgaagggcagctgcagcgagcctgtgtccttcaccacccacagctgtgcccctgagtgccccttcccccccaagctggcccacaggagcaagagcagcctgaccctgcagtggaaggcccccatcgacaatggcagcaagatcaccaactacctgctggagtgggatgagggcaagagaaattctggcttccggcagtgcttcttcggcagccagaagcactgcaagctgaccaagctgtgcccagccatgggctacaccttccggctggccgccagaaatgacatcggcaccagcggctacagccaggaggtggtgtgctacaccctgggcaacatcccccagatgcccagcgccccccggctggtgcgggccggcatcacctgggtgaccctgcagtggagcaagccagagggctgcagccctgaggaggtgatcacctacaccctggagatccaggaggatgaaaatgacaacctcttccaccccaagtacacaggagaggacctgacctgcaccgtgaagaacctgaagaggagcacccagtacaagttccggctgacagccagcaacacagagggcaagagctgccccagcgaggtgctggtgtgcaccaccagcccagaccggcccggcccccccacccggcccctggtgaagggccctgtgaccagccacggcttctctgtgaagtgggacccccccaaggacaatggaggcagcgagatcctgaagtacctgctggagatcacagatggcaacagcgaggccaaccagtgggaggtggcctacagcggcagcgccacagagtacaccttcacccacctgaagccaggcaccctgtacaagctgcgggcctgctgcatcagcactggaggccacagccagtgcagcgagagcctgcctgtgaggaccctgagcatcgcccctggccagtgccggcccccccgggtgctgggccggcccaagcacaaggaggtgcacctggagtgggatgtgcctgccagcgagagcggctgtgaggtgtctgagtacagcgtggagatgacagagccagaagatgtggccagcgaggtgtaccacggccctgagctggagtgcaccgtgggcaacctgctgcccggcaccgtgtaccgcttccgggtgcgggccctgaatgatggcggctacggcccctacagtgatgtgtctgagatcaccacagctgctggccccccaggccagtgcaaggccccctgcatcagctgcaccccagatggctgtgtgctggtgggctgggagagcccagacagcagtggagctgacatcagcgagtaccgcctggagtggggagaagatgaggagagcctggagctgatctaccacggcacagacaccaggtttgagatccgggacctgctgcctgctgcccagtactgctgccgcctgcaggccttcaaccaggccggggccggcccctacagcgagctggtgctgtgccagaccccagccagcgccccagaccctgtgtccaccctgtgtgtgctggaggaggagcccctggatgcctacccagacagccccagcgcctgcctggtgctgaactgggaggagccctgcaacaacggcagcgagatcctggcctacaccatcgacctgggggacaccagcatcaccgtgggcaacaccaccatgcacgtgatgaaggacctgctgcctgagaccacctaccgcatccgcatccaggccatcaatgaaattggagctggccccttcagccagttcatcaaggccaagacccggcccctgccccccctgcccccccggctggagtgtgccgctgctggcccccagagcctgaagctgaagtggggagacagcaacagcaagacccatgctgctgaagatattgtgtacaccctgcagctggaggacaggaacaagcgcttcatcagcatctaccggggccccagccacacctacaaggtgcagaggctgacagagttcacctgctacagcttccgcatccaggccgccagcgaggccggggagggccccttcagcgagacctacaccttcagcaccaccaagtctgtgccccccaccatcaaggccccccgggtgacccagctggagggcaacagctgtgagatcctgtgggagaccgtgcccagcatgaagggggaccctgtgaactacatcctgcaggtgctggtgggccgggagagcgagtacaagcaggtgtacaagggggaggaggccaccttccagatcagcggcctgcagaccaacacagactaccgcttccgggtgtgtgcctgccgccgctgcctggacaccagccaggagctgagcggggccttcagccccagcgctgcctttgtgctgcagaggtctgaggtgatgctgaccggggacatgggcagcctggatgaccccaagatgaagtccatgatgcccacagatgagcagtttgctgccatcatcgtgctgggctttgccaccctgagcatcctgtttgccttcatcctgcagtacttcctgatgaagtag

SEQ ID NO: 50262 - DNA, 216 bp, Artificial Sequence
  derived and/or modified sequence
atgtatgtgaccatgatgatgacagaccagatccccctggagctgccccccctgctgaatggagaggtggccatgatgccccacctggtgaatggagatgctgcccagcaggtgatcctggtgcaggtgaaccctggagagaccttcaccatccgggcagaagatggcaccctgcagtgcatccaggaggtgaatgtgaagaggcactgcctgtag

SEQ ID NO: 50263 - DNA, 3615 bp, Artificial Sequence
  derived and/or modified sequence
atgtacgtgaccatgatgatgaccgaccagatccccctggagctgcctcccctgctcaacggggaggtggccatgatgccacacctggtgaatggagacgctgcgcagcaagtgattctggtgcaggtaaatcccggtgagacctttaccataagagccgaggatggaactttgcaatgcatacaagggcctgccgaggtgcctatgatgagccctaacggatcaattccaccaatccacgtaccccccggctacattagtcaggtaatcgaggactctacaggagtacgacgcgtcgtggtgacacctcaatctccggaatgctacccccctagctacccaagtgccatgagcccgacacaccatttgccaccctatctgacacaccatccccacttcattcacaactcccatactgcctactacccaccggtaacaggacccggagatatgcccccacagttcttccctcagcaccacctgccgcatacaatatatggcgaacaagaaataattcctttttacgggatgagcacgtacattaccagggaggatcagtattccaagcccccacataagaagttgaaggaccgccagatagatagacagaatcggctgaatagtcccccaagctcaatctacaaatcatcctgcaccaccgtctacaacggctacgggaagggccactcaggcggatcaggtgggggcggatctgggtcggggcccgggattaagaagacggagcggcgggcgcggtcctcacccaaaagtaacgatagcgatctacaggagtatgagctggaagtcaagagggtccaggacatcctaagcgggatcgaaaaaccgcaggttagcaatattcaggcccgggcagtggtcttgagctgggcccctccagtgggactgtcatgtggaccccattctggtctgtcatttccttatagttacgaagtggccttgtctgataaaggacgggacggtaagtataagatcatctacagtggcgaggagctcgaatgcaacctgaaagaccttcggcctgccaccgattatcacgtcagggtgtacgccatgtataactccgttaaaggctcttgttcagaaccggtctcatttacaactcacagctgcgctccagaatgcccatttccccccaagctcgcccacaggagcaagtcctcacttactcttcaatggaaggcacctatcgataacggatcaaagattaccaattatctgctagagtgggatgaagggaagaggaacagtggcttccgccagtgttttttcggcagccaaaagcactgcaagttgacgaaattgtgccccgctatgggttatacgtttcgccttgcagctagaaacgacattggcacttctggatattcccaagaagtggtgtgctacacgctgggcaatatcccacagatgcccagtgcaccacgtttagtcagggccggcattacctgggttacactccaatggtcaaagcccgagggatgttcacctgaagaagttatcacttatacactggaaattcaggaggatgaaaatgataacttgttccatcccaagtacacaggcgaagaccttacttgcacagtaaagaatctgaagcgaagtacccagtacaagttcagattgacagcatctaataccgaggggaagagctgcccatccgaggtccttgtgtgtactacaagtccagaccgtcctggtccccccacgcgaccactggtgaaaggccctgtgacgagccatggattctcggtgaaatgggatcccccaaaggataatgggggctcagaaatcctgaaatacctgttagaaattactgacggaaactcggaagcaaaccagtgggaagtggcgtactccggcagcgccaccgagtatacctttactcacctgaaaccaggtactttatataaattgagagcatgttgcatcagcactggcgggcattcacagtgctctgagagcctcccagtccgtaccctgagcatcgcccctggacagtgtcgcccaccacgggttttgggtagacctaaacacaaagaggtccaccttgagtgggatgtgcctgcctccgaatccgggtgtgaagtgagtgagtacagtgtcgagatgacggaaccagaagacgtcgcaagtgaagtttatcacggccctgaacttgagtgtactgttggaaacctgttgcccggaacggtgtatagattcagagttagggctctcaacgatggcggctatggaccatattccgatgtttcggagataacgacagcagccggcccccccggtcagtgcaaggctccctgcataagctgtacacctgatggttgcgtactggtgggatgggaatcacccgatagcagcggtgccgacatctccgagtaccgcctggagtggggcgaagatgaagagtcactggagctaatctaccacggtacagatacacggtttgaaatcagggatttactccccgccgcacagtattgctgtagattacaggccttcaaccaggcgggagctggcccttatagtgaactggtgctctgtcagacgccggcatctgcccctgatcctgtgtctacactatgcgttctcgaggaggagcctctggacgcctatccagacagtccgtccgcctgtctggtcctgaactgggaagagccctgtaataacggatcagaaatcctcgcatataccatcgacctcggagatacttctataaccgttggcaacaccacaatgcacgtcatgaaggacttactgccagaaacgacctaccgtatcagaattcaggccatcaacgagattggggctgggccattcagccaatttattaaagctaaaacccggccgctgccgcctcttccaccacgccttgaatgtgccgcagccggcccacagtcgcttaagctgaaatggggggacagtaatagcaaaactcacgccgcagaggacatcgtgtatactcttcagctggaagatcgcaacaaaagatttatatcgatttaccgggggccatcccatacatacaaagtccaacgcctgactgaattcacgtgctatagctttagaatccaagctgcctctgaggctggggagggaccatttagcgaaacatacactttttctacaaccaagagtgtccctccaacaattaaagccccacgagttacccaacttgaaggcaactcttgcgaaatactttgggagacagtacccagcatgaaaggcgatcccgtgaattatatcctgcaggtacttgttggccgggaatctgaatacaagcaggtgtacaagggggaagaagctaccttccagataagtggactccagacgaataccgactaccgatttagagtgtgtgcttgcaggcggtgtctggataccagccaggagctttctggagcttttagcccatcggcagccttcgtcctacagcggtctgaagtcatgttaacaggcgatatgggtagcctcgacgatcccaaaatgaaaagcatgatgccaactgacgagcagttcgcagcgataatcgtcctggggttcgccacactgtctattttgttcgcctttatcttacagtactttctgatgaaatag

SEQ ID NO: 50264 - DNA, 216 bp, Artificial Sequence
  derived and/or modified sequence
atgtacgtgaccatgatgatgaccgaccagatccccctggagctgccacccctgcttaatggggaagtggcgatgatgccacacctggtgaatggagatgccgcgcagcaggtgattctagtgcaagtgaacccaggcgaaactttcacgattagggcggaggacggtaccctgcagtgcatccaggaagtcaacgtgaaaaggcattgcctctag

SEQ ID NO: 50265 - DNA, 3615 bp, Artificial Sequence
  derived and/or modified sequence
atgtacgtgaccatgatgatgaccgaccagatccccctggagctgccccctttgttaaacggggaagtggctatgatgccgcacctggtgaacggcgacgctgctcaacaggtgatactggttcaggtgaatcctggtgagaccttcacaatccgggctgaggatgggacgctgcagtgtatccagggcccagccgaagtccctatgatgagcccaaatgggtccatcccacccatccacgtccctcctggttatatttcccaggtaatcgaggatagcaccggcgttcgtcgggtagtggtcaccccccaatcaccagagtgctatccaccatcctacccgagcgcaatgagccctacccatcaccttcccccttatctgacgcaccacccccatttcattcataactcacatacagcatactacccgcccgtgacaggccccggtgacatgccacctcaattcttcccgcagcatcacctaccccataccatctacggagaacaggaaattattccattttatggaatgtctacgtacattacacgggaagatcagtactcaaagccaccccacaagaagctcaaggaccgacagatcgaccgccagaacagactgaacagccccccctccagcatttacaaatcatcttgtactactgtatacaatgggtacggtaaggggcattcgggcgggtcagggggcggcggctctggctcaggccctggaatcaagaagactgagagacgcgcaagaagcagcccaaagtctaatgattctgatctgcaggaatatgagcttgaggtaaaacgggtccaggacatactttctgggattgagaaacctcaggtgtctaacattcaggctcgcgcagtggttctgtcttgggccccacccgtgggcctgtcttgtgggcctcactcaggcttgtcgtttccttattcctatgaagtagctctgtccgataagggcagagacgggaaatacaagattatctattctggggaggaactggaatgcaacttaaaggaccttcgccccgctaccgactatcatgttcgtgtctacgctatgtataactccgttaaaggttcttgctccgagcccgtgagctttacaactcactcttgcgcaccagagtgcccctttcctccgaaattggcacaccgctcaaaatcctctttaaccctccaatggaaagcaccaatcgacaacgggagtaagatcacaaattatctcctagaatgggacgagggcaagagaaactcaggatttagacagtgcttcttcgggagccagaagcactgcaagctcaccaagctgtgtcccgctatggggtatacattccggctcgctgctaggaacgatatcggtacctctggttactctcaggaagtcgtgtgctacaccttggggaatatacctcaaatgccatccgcccctcgacttgtccgggcgggcataacttgggttaccttgcaatggagtaaacctgaaggttgctccccagaggaagtgattacatatactctcgagattcaggaagacgagaatgataacctgttccatccaaagtacaccggagaggatctgacatgtaccgtcaagaacctcaagcggtcaacacagtacaaattcagattgacggctagcaataccgaaggcaagagctgcccatccgaggtcctcgtgtgtactacgtccccagatcgcccgggcccccccacaagaccattggtgaaagggcccgtgacttctcatggattctccgtaaagtgggatcccccaaaggataacggcggttctgaaattctgaaatatctcctcgagattaccgacggtaattccgaagccaaccaatgggaggtggcttactcgggtagtgccaccgaatacaccttcacacacctgaaacctggaacgctctacaagctgcgcgcctgttgtatatccacaggcgggcactcccagtgcagtgagagcttacccgtgaggaccttatccatcgcacccggccaatgccggcctccaagagtgcttggtcgccctaagcacaaggaagtgcatctggagtgggacgttcccgcatccgagtctggctgcgaggtttccgaatactccgtcgagatgactgaaccagaagacgtggcctctgaagtttatcacggccctgagctggagtgtacagtgggaaatctcctgccagggaccgtttacaggtttagagtcagagccctgaatgacggcggctatgggccttatagtgatgtgagcgagatcacgacagccgctggccctccgggccagtgcaaagccccctgtatctcatgcaccccagacggatgtgtgttagttggatgggagagcccagactcaagtggggcggatatcagtgaatacagacttgagtggggcgaagacgaagaaagtctcgagctgatctatcatgggacagacacaaggttcgaaatccgggatctgctccccgcggcacagtattgctgccggttgcaagcctttaatcaagcaggcgccggtccatattccgagctggtgctgtgtcaaacgccggcctctgcaccggatcctgtcagcaccttgtgcgtcctggaagaggagcccctagacgcctatcccgactctcccagcgcgtgcctagtgctcaattgggaagaaccttgcaataatggatccgagatcttagcttataccattgacctcggagacacatccattaccgtagggaataccactatgcacgtgatgaaggacttattacccgaaacgacctaccgtatcaggatccaggccatcaatgagattggcgcaggcccattctctcagttcataaaggccaaaaccaggcccctacccccgttgccgccacggcttgagtgcgctgccgctgggcctcaatctctgaaattgaaatggggagacagcaatagcaaaacccacgccgccgaggatatcgtatacacactgcagcttgaggaccgaaataagcgctttatctccatctatcggggaccctctcatacctataaggttcagagactaacggagtttacctgctatagtttcagaatccaggctgccagcgaggctggagagggcccattctcagagacctacacattttccaccactaaatctgtgcccccaaccattaaagcccctagagtaacgcagcttgagggcaattcttgtgaaatcctgtgggaaacagtccccagcatgaagggcgaccccgtgaattatatattacaggtcctcgtgggcagagaaagtgaatataaacaggtatataagggtgaagaagctacttttcagatttctggcttacagaccaatacggactacaggttccgcgtgtgcgcctgtagacgatgcctggataccagtcaggagctttccggagccttttctccttctgctgcgtttgtgctccaaagaagcgaggtgatgcttacaggagatatgggcagtcttgacgatcctaaaatgaagtctatgatgcccaccgatgaacagttcgccgcaattatcgtgctcggctttgccaccctctccatcctgttcgcctttatcctgcaatacttcctgatgaaatag

SEQ ID NO: 50266 - DNA, 3615 bp, Artificial Sequence
  derived and/or modified sequence
atgtacgtgaccatgatgatgaccgaccagatccccctggagctgcccccgctcctaaatggcgaggtcgctatgatgcctcacctggtcaacggcgatgcagcccagcaggttatcctggtccaggttaatcctggggagacatttactatccgcgccgaagacggaacccttcagtgtatacagggccccgcagaagttcccatgatgtccccgaacgggagtatccctcccattcacgtcccccccggatacatctcccaggtgatagaagactcaaccggcgtacggcgggtagtcgtgacacctcagtcacccgaatgctatcctcctagttacccatctgccatgtctccgacacaccatctgcccccgtacctcacccatcacccccattttatacacaattcacatacagcatactaccctcccgtaaccgggccgggcgacatgccgccgcagtttttcccacagcatcacctgccacatactatctacggggagcaggaaatcattccattttacggcatgtctacctacatcacacgcgaggatcagtactccaagcctccacacaaaaagttaaaagatcggcagatcgacagacaaaaccggctaaattctccaccttcatccatttacaagtctagctgcaccaccgtgtataatggctacggcaaagggcacagcggaggcagtggaggcgggggatctgggtccggacccgggataaagaagacagaacgtagggctcgttctagccctaaatcaaatgattcagacctgcaagaatatgaattggaagtgaaacgagtccaggacatactctcaggcatcgaaaagcctcaggtgtcaaacattcaggcccgggccgtagtgctctcttgggcacctcctgtaggacttagctgcggcccccatagtggtctctcgtttccctattcctacgaagtagccctcagtgataaggggagagacggcaagtataagataatctatagcggagaggaacttgagtgcaatctcaaggacttacggccagcaacagattaccacgtgcgcgtttacgctatgtataatagcgttaaagggtcctgcagcgaacctgtctcttttaccacacattcatgtgcacctgagtgccctttccctccaaagttggcacatcgatccaaaagttcattgacgctccagtggaaagcacccattgacaatgggtccaaaattacaaattacctgctcgaatgggatgaagggaaacgcaattcaggctttcgccagtgttttttcgggtcgcagaaacattgcaagctgaccaagctgtgtccagctatgggctacaccttccgattggccgcccgaaatgacatagggaccagcggctattctcaggaagtagtttgttacaccttggggaatatcccacagatgcccagcgctcctcggctggtgagggcagggatcacctgggttacactgcagtggtcaaagcccgaaggctgtagtccagaagaggtgattacttataccttggagatacaggaggacgagaacgacaatctgtttcaccctaaatacaccggagaggacctaacatgtacagtcaaaaatctgaagcgatccacacaatacaagttcaggctcacagcatccaatacagaggggaagtcttgccccagcgaggtgctcgtgtgcaccacttcaccggatcgccccgggccaccaacaagacccctcgtgaaaggacccgtcacctctcatggattctcagtcaaatgggaccctcctaaggacaatggtggctccgagatcctgaaatacttgcttgagattactgacggcaattccgaggccaatcagtgggaagttgcctactctggcagcgccactgaatatactttcacacacctgaagcccggcacgctctataaacttcgagcatgctgcatatctacggggggacacagccagtgcagcgagtccctgcccgttagaaccttgagcattgcaccgggccaatgcaggccccctcgagtccttggacggcccaagcataaggaagtgcatctcgagtgggacgtgcccgcctctgagtcgggctgcgaggtgtctgagtattcagtcgaaatgaccgagccagaggacgtagcaagcgaagtataccatggcccggagcttgaatgtacagtggggaaccttttacccggcactgtgtacagatttagggtgagggccctcaacgatggaggctacggcccatacagtgatgtaagcgaaatcacaaccgcagctggtccgccgggtcagtgcaaggctccctgcattagttgtactcctgacgggtgcgtcctggtgggatgggagtcccctgatagttctggcgctgacatcagcgaatatcgcctagagtggggagaagacgaagagtctctggagctcatttaccacggcacagacaccaggtttgagatccgtgatctgctgccggctgcacaatactgctgcaggttacaagcgtttaatcaggccggagctggaccgtattcagagctcgtgttgtgtcaaactcccgcctccgctccggacccagtgtctactctttgtgtccttgaagaagagcctctcgacgcttatcccgacagcccgtccgcctgccttgttctcaactgggaagagccatgtaataacggttcagaaatcctggcgtatacaatcgacctgggcgacacttcaatcaccgtcggaaacactacaatgcacgtcatgaaggacctgctcccggaaactacttaccggatccgaatccaggctatcaacgagattggagctggtccattctcccagtttattaaggccaagaccagacccctcccaccacttcccccacgcctggagtgtgcagcagcgggcccgcagtcgctcaagctgaagtggggagattcaaacagtaaaactcacgcagcagaggatatagtctatacccttcaattagaggatagaaataagcggtttatatcaatctaccgaggccccagccacacatacaaggtccaaaggctaactgaatttacgtgctactcatttcggattcaggccgctagtgaagctggagagggtccgttcagcgagacctacaccttctccacaacgaagtctgtgcccccaaccatcaaagcaccaagggtgactcaactcgaaggcaacagttgtgagattctctgggaaacagtacccagcatgaaaggcgaccctgtgaattacatcctccaggtcttggtcgggagagagtcagagtataagcaggtatacaagggcgaagaagccactttccagatatctggcctgcagaccaacacagactaccgcttccgggtatgcgcctgtaggcggtgtctggacacatcacaggagctgtcgggcgccttctctccatccgcggcttttgtgttgcagcgctcagaggtgatgcttacgggagatatgggatctctggatgatcccaagatgaagtcaatgatgccaaccgatgaacaatttgccgctatcattgtgctcggctttgccactctgtctattctttttgccttcattctgcagtattttctgatgaagtag

SEQ ID NO: 50267 - DNA, 3615 bp, Artificial Sequence
  derived and/or modified sequence
atgtatgttactatgatgatgactgaccagattccattagaactgccccctctcttgaacggggaagtggctatgatgccacatttagttaacggggacgcagcccagcaggtcatcctggttcaagtcaacccaggggagacatttacaatcagggccgaggacggcactctacagtgcattcagggtccggctgaggtccctatgatgtcaccaaacggttccataccacccattcacgtgccccctggctatataagtcaagtcattgaggacagcacgggtgttagaagggttgttgtaacgccacaaagcccggaatgctatccccctagttatccctcagccatgtcgcctacccatcaccttcctccatacttaacacaccatcctcacttcatccacaactctcacacagcatactacccacccgttaccgggccaggagacatgccacctcagtttttcccacaacatcatctcccacataccatctacggtgagcaggaaattatcccattttatggcatgagtacttatatcactcgggaggaccagtattcaaagcccccacataagaagctcaaggacaggcagatcgaccgccagaatcggttaaattccccaccaagttcgatctataagagcagttgcaccacagtgtataacggatacggaaaggggcacagtgggggtagtggcggtgggggatccggaagtggaccagggattaagaaaacggaacggagagccaggtcgtccccgaagtctaacgactctgacttgcaagaatatgagctggaagtgaagagggttcaagacattctaagtggtatcgaaaagccccaggtcagcaacatccaggccagagcagtggtgctctcctgggcacctcccgttggcttgtcctgcggcccacattccggcctgagttttccctactcttatgaagttgccctgtctgacaagggtagggatggtaagtacaagattatctactccggcgaagagttggagtgtaatctgaaggatctgaggcccgcaactgactatcatgtgcgagtgtacgccatgtataattctgtaaagggctcctgcagcgagcctgtgtcatttacaacccatagctgtgcccctgaatgtccattccctcctaagctcgcccatagatccaagtcaagcctgacactgcaatggaaggctcctatcgataacggatccaagattacaaattacctcctcgaatgggatgaaggcaagcgtaattcaggctttcgccaatgcttttttggtagtcagaagcattgcaaactcacaaagctttgcccggctatgggttatacatttagattggccgcacggaatgacatcggcacatctggatactctcaggaagtggtgtgctacacattgggaaatatcccccagatgcccagtgcaccccgtttagtaagagctggcattacttgggtgactcttcagtggtctaaacccgagggatgcagtcctgaggaggtcattacttatacccttgagatacaggaggatgagaatgacaatctattccatccaaagtacactggggaggacttgacttgcaccgtcaagaaccttaagaggagcacacaatacaagttccgactcacagctagcaatactgagggcaagtcgtgcccttcagaagttctggtttgtacaacctcccctgaccggcctgggccacccaccaggccactcgttaagggccctgtgaccagccacgggttctcagtcaaatgggacccccctaaagataacgggggaagcgagatcctgaagtatctcctggagatcacagacggtaacagcgaggcaaatcaatgggaagtggcgtattcaggatctgcaactgagtatacattcacacacctgaaacccggtaccctatacaagctgcgagcttgctgtatctcaacaggcggacactcacagtgctctgaaagcctgccggtgcggactctctctattgcccctggccaatgtaggccccctcgtgtgctgggcaggcccaaacacaaagaggtccatctcgaatgggatgttccagccagtgagtctggatgcgaagtgagtgagtacagcgtcgagatgaccgaaccagaggacgtagcttctgaagtatatcatggtcccgaactcgagtgtactgtgggtaatcttctgcctggaaccgtgtatcgcttccgtgtgcgtgcacttaacgacggaggatatgggccatatagcgacgtgagcgagattactactgccgcaggtccacccggacagtgcaaggcgccttgcatctcctgtacgcctgacggttgtgtgctggtgggatgggagagtcccgattcctctggtgccgacataagtgagtaccgcctggagtggggagaggatgaggagagtctggaattaatctatcacggcacagatacaagatttgagatacgagacctattgcccgcagctcagtattgttgccgcctgcaggccttcaaccaggcgggtgccggaccctattctgagttggtcctttgccaaacacctgcatctgcgcctgatccggtatccacactttgtgtgctggaggaagagccgctggatgcataccctgactcaccctcagcgtgcctagtcctgaattgggaagaaccctgcaataatggttccgaaattctggcttatacaatcgacctcggagacacgagcattacagttggcaacacaaccatgcatgtgatgaaggaccttctgcccgaaacaacgtacaggatccggatccaggccataaatgaaataggtgcaggccctttctcccagtttattaaggcaaagacccgaccgctgccacccttaccccctcggcttgagtgtgccgctgccggacctcagagcttgaagttgaaatggggagactccaatagcaaaactcacgctgctgaagacatcgtgtatacattgcaactggaagaccggaataagcggttcatatcaatctatcgtggaccttcccatacttacaaagtgcagaggcttaccgaatttacctgttactccttccggatccaggccgcatcagaagccggtgagggcccattttctgagacctacacctttagcacgactaaaagcgttcctccgaccatcaaggctccacgcgtaacgcagctggagggcaactcttgcgagatcctgtgggaaactgtaccttcaatgaaaggcgacccggtgaactacattcttcaggttcttgtgggtcgggaatcagaatataagcaagtctacaagggggaggaagcgaccttccagatttccggcttgcagactaatacggattatcgcttcagggtgtgcgcgtgcaggaggtgcctggatactagccaagagctgtccggagctttctccccatctgccgcatttgttcttcagagatcagaggtgatgttgactggagatatggggtctctggacgatccaaagatgaagagcatgatgcccaccgacgagcagttcgcagcgatcatagtcctgggcttcgcaacattgtctatcctcttcgcatttatcctccaatatttcttgatgaaatag

SEQ ID NO: 50268 - DNA, 216 bp, Artificial Sequence
  derived and/or modified sequence
atgtatgtcacaatgatgatgaccgatcagattccactggagctgcctccattactgaacggggaggtcgcaatgatgcctcaccttgtcaatggagatgcggctcaacaggtgatcctggtgcaggtcaacccaggcgaaacctttactatccgcgctgaggatggaacattacagtgtatccaggaagtcaacgtaaaacggcactgcctgtag

SEQ ID NO: 50269 - DNA, 3615 bp, Artificial Sequence
  derived and/or modified sequence
atgtacgtgacaatgatgatgacagatcaaattcccctagaactccctccactgctgaacggcgaggtggcaatgatgccccacttagtgaatggggatgccgctcagcaggttatcctggtccaggttaacccaggcgagactttcacaatccgcgcagaagacggaacattgcagtgcattcagggacccgctgaagtgcctatgatgagccccaatgggtcaataccacctatccacgtaccacctgggtatatcagtcaggtgatcgaggatagcactggcgtgcggagagtggttgtaacaccacaatctccggaatgttatccccctagctaccccagcgctatgagcccaacacatcatctgcctccctacctgacccaccatccccactttatccataattcccacacagcttactacccgccagtgactggccctggcgatatgccaccccaattcttcccccaacaccaccttccacacactatttatggagaacaggagatcatacctttctatggtatgtcaacttacatcacccgcgaggatcagtactctaaacctcctcataagaaactcaaagatcggcaaatagatcgccagaatcggctcaacagcccgccttccagtatctacaagtccagctgcacaacggtatacaacggttatggaaagggacacagtggcggaagcggagggggtggttccggctccggaccaggaatcaagaagacagaaaggcgggcaaggtcttcccccaaatcaaatgacagcgatctgcaggagtatgagctggaggtcaagagagttcaggacatcctatcagggattgaaaagccacaggtgagcaatattcaagcgagggccgtggtccttagttgggctcctccagttggtctgtcatgcgggccacacagtggactcagctttccttattcttatgaggtagctctctctgacaagggccgagacgggaaatataaaattatctatagcggtgaggaacttgagtgtaacttaaaggatctgcgaccagccaccgattatcacgttcgcgtctatgccatgtataactccgtgaaaggaagctgcagtgaaccagtgtctttcaccacccacagctgcgcaccagaatgcccctttccccctaagttggcccatcgctctaagtcgtctctgaccttacagtggaaagcacccatcgacaacgggtccaagatcacgaactacttactcgaatgggacgaggggaaacgtaactcggggttccggcagtgctttttcggctctcagaaacattgtaagctaactaagctctgcccggctatgggctacactttccgactcgcggcacgaaacgatatcgggacctccggctactcccaagaagtagtatgctatacgttgggcaatataccgcaaatgccatcagcgcctagactggtgcgtgctggcataacatgggttaccctgcagtggtccaaacccgagggatgctcaccagaggaggtgattacctatacactggagattcaggaggacgagaacgataaccttttccatccaaagtacactggggaggaccttacttgtaccgtgaagaatctgaagcgctccacacagtacaagtttcggctgaccgcctctaatactgagggcaaatcgtgcccctctgaagttttggtatgtactacctcccctgaccgtcctgggcctcctacacggccattagtcaaaggccctgtgacttcacacggcttctcggtgaaatgggatcctccaaaagacaacgggggttccgaaatcttaaagtatctgcttgaaattactgacggcaattctgaggccaaccagtgggaggttgcttactccggatctgcgactgagtatacttttacccatctgaagccagggacattgtataaactgagggcctgctgcatcagtacaggtggacattcacagtgttccgaaagtctgccagtcaggaccttgtccatcgcccctggacagtgtcggcctccaagagtccttggcaggcctaaacacaaagaggtgcatcttgaatgggacgtgccagcctcagaaagcgggtgcgaggtcagcgaatattcagtggagatgacagagccagaggatgtggcctccgaggtgtatcacggaccagaattagaatgtaccgttgggaacttgttgcccggaaccgtgtaccggtttcgcgtgcgtgcactgaatgacggtggctatggcccttactccgacgtcagcgagatcacgaccgccgctggacccccaggccagtgtaaggctccatgtattagttgtacccccgatggttgtgtgttagtgggatgggaatcacctgatagcagcggcgctgacatctccgagtacaggctggaatggggagaagacgaggagtccttggagctcatataccacggtacagacacacggttcgagatcagggacctgctgcctgccgctcagtactgttgtagacttcaagccttcaatcaggccggtgccggtccctactccgagctagtcctgtgtcagacacccgcatcagcacccgaccctgtcagcaccctgtgcgttctggaggaggaaccactcgatgcttatcctgacagtccttctgcttgtctcgtcctaaactgggaggagccttgcaacaacgggagtgagatcctggcatacacaattgacctgggagatacaagcatcacagtgggaaatacaactatgcacgtcatgaaggatctgctccctgagacaacgtatcgtatccgcattcaggctatcaatgagatcggagctggcccattcagccagtttatcaaagctaaaacccgccctctgccaccattgcccccacgccttgagtgtgccgctgcaggaccgcagagcttgaaactcaagtggggagactcaaactctaagacccatgctgccgaagacatcgtctacactctccagctagaagatcggaacaagcggttcatctcgatttataggggcccatctcacacttataaggtccagaggttgacagagtttacttgctactcgtttaggattcaagccgcatccgaggccggtgaaggccctttctctgagacatatacgttttcaaccacgaagtcagtccctcccactattaaagcgccacgcgtgactcagctggagggcaatagttgtgaaatcttgtgggaaaccgtgccaagtatgaaaggcgacccggtgaattacattctacaggtcctcgttggacgtgagagtgagtacaagcaggtgtacaagggagaagaggccactttccagatttccggactccagactaatacggactaccgctttcgtgtgtgtgcttgtcgacgctgcttagacacgtcccaggaattgtccggcgcattcagcccctccgctgcttttgtgctgcagcggagtgaagtaatgctaaccggcgatatgggcagtctggacgatcccaagatgaagagtatgatgcccaccgacgagcaatttgccgctataattgtgctgggttttgcaacactttctattctgttcgcatttatactgcagtactttttgatgaaatag

SEQ ID NO: 50270 - DNA, 3615 bp, Artificial Sequence
  derived and/or modified sequence
atgtacgtgaccatgatgatgactgatcagatcccgttggaactgccacctctgttaaatggcgaggttgcaatgatgccccacttagttaacggtgacgctgcccagcaggtgattttagtccaggtgaacccaggcgagactttcacgatccgcgctgaggacggcacgctccaatgcattcaggggccagcggaggtgcccatgatgtctccaaacggtagtattccccctattcatgtgcctcccggttacatcagccaggtgatcgaagatagcacaggtgtaagacgtgtcgtagtgaccccccaaagcccggagtgctaccctcccagctacccctctgctatgagcccaacacaccacctgcctccttacctgacccatcacccccacttcatccataattcccacaccgcttactacccaccggttacgggacctggcgatatgccccctcagtttttcccccagcatcatctgccacacaccatctacggagagcaagaaattatacctttttacgggatgagcacctacattacccgtgaggatcagtattcaaagccgcctcacaaaaagttgaaggaccggcaaatagaccgtcagaaccggcttaacagtcctccgtcctctatatacaaaagctcttgcactacagtctataacggatatggcaaagggcacagcggaggctccggcggaggtggcagcggaagtggcccagggataaaaaagacggagcggagggccaggtcttcaccaaagtccaacgatagcgacctacaagagtacgagctggaagtcaaacgggtgcaggatattctgtccggaatcgaaaagccccaggtgagcaacattcaagcacgagccgttgttctgtcctgggccccacctgttggcctcagctgtgggccacacagcggtctctccttcccctattcatatgaagtggcactcagcgacaagggacgggatggcaagtacaagatcatttactctggggaagagctcgaatgtaacctaaaggatctccgacctgcaaccgactaccatgtgcgcgtatacgccatgtacaacagtgtgaaaggttcttgttccgaacctgtgtcatttaccacacacagttgtgctcccgagtgtccgttcccgcctaaactggcacaccgctcaaagagctccctgactctccaatggaaggccccaatcgacaacgggagcaagatcactaactacttgctcgaatgggacgaagggaagaggaactcaggatttcgtcaatgtttctttgggagccagaaacattgtaaattgaccaagctgtgtcctgccatggggtatactttcagacttgcagctagaaacgatattggtacatcaggctacagtcaagaggtcgtgtgttacacattagggaatatcccacagatgcctagtgcacccaggctcgttcgagccggtatcacgtgggtcactctgcagtggagcaagcccgaaggttgctcgcccgaggaggtgattacttacacgttagagattcaggaggatgaaaacgacaatttatttcacccaaagtatacaggagaagacctgacttgcactgtcaagaacctgaaacgaagcacgcagtacaaatttaggttgacagcgtccaatactgagggcaagagctgcccgagcgaggtgctcgtgtgcactacatcccctgaccggccaggaccccctactagacctctggtcaaagggcctgtaactagccacgggttttctgtcaagtgggacccacccaaagacaatgggggttctgaaattttaaagtatttattggagatcacagacggaaactcagaggctaatcagtgggaagtggcatactcagggtccgccacagagtatacatttacacaccttaaaccaggcactctatataagctgagagcctgttgcatttccaccggcggacactcccagtgctcagagtcgttgccggtccgcacgctgagcatcgccccaggtcagtgtagaccaccacgcgttctcggtcgaccgaagcacaaggaagtgcacctggaatgggacgtccctgcgagtgagtcaggatgtgaagtgtccgagtacagcgtcgagatgactgagcctgaagatgtcgcatccgaagtttatcatgggccagagctggagtgtacggtggggaacctgttacctggaacggtgtacagattcagagtgcgcgctttgaacgacggtggttacgggccttattcagatgtgtctgagataacaactgctgctggcccaccaggccagtgtaaggccccatgtattagttgcacccctgacggttgcgtattagtggggtgggaatctcccgattcaagtggagcggatatctcagaatatcggctcgagtggggagaagacgaagaatctctggaactgatttatcacgggactgacacaagattcgagatcagggatcttctgccggcagcacaatactgctgtcggctccaggccttcaatcaggccggagctggcccttatagcgaactggttctgtgccagacgcccgcatccgcccctgacccagtgagcacattgtgtgtcctcgaggaagagcctcttgacgcctaccctgacagtccgagtgcttgccttgtgttaaactgggaagagccatgtaacaatggatctgagatcttggcgtatacgatcgacctcggcgacacaagcatcactgtggggaatacaaccatgcacgtaatgaaggacttactccccgaaacaacataccgtatcaggatacaggccattaatgaaatcggagccggacccttcagtcagtttattaaggccaagacccgtcccttaccacccctccctcctagattggagtgcgcagccgctggccctcagtccctgaagctgaaatggggcgatagcaactctaaaacgcacgcggctgaagacattgtatatactcttcagctggaagacagaaacaaacggtttatatccatctaccgcggaccttctcacacttataaagttcagaggctgaccgagtttacctgctactcctttaggattcaggctgcgtcggaggccggtgagggcccattctcagagacctacacctttagcaccacaaagtctgtgccgccaaccattaaggcgccacgagtaactcaacttgagggaaattcttgcgagatcctctgggagaccgtgcccagtatgaaaggggacccagtgaactacatcctgcaggtgttagtggggagagaatctgagtataaacaggtgtacaagggtgaggaggctacatttcagatctctggactccagacaaatactgactatcgattccgagtgtgtgcgtgcaggaggtgtttagacaccagccaggaactatctggcgctttttcgccttcagctgcttttgtcctgcagagatctgaggtgatgttaacgggcgatatggggtcacttgacgaccctaagatgaaatcaatgatgcccacagacgagcagtttgccgctattatcgtgttgggtttcgccaccttgtctattttgttcgcgtttattctgcagtatttcctgatgaaatag

SEQ ID NO: 50271 - DNA, 3615 bp, Artificial Sequence
  derived and/or modified sequence
atgtacgtgaccatgatgatgaccgaccagatccccctggagctgccccccctgctgaacggcgaggtggccatgatgccccacctggtgaacggcgacgccgcccagcaggtgatcctggtgcaggtgaaccccggcgagaccttcaccatcagagccgaggacggcaccctgcagtgcatccagggccccgccgaggtgcccatgatgagccccaacggcagcatcccccccatccacgtgccccccggctacatcagccaggtgatcgaggacagcaccggcgtgagaagagtggtggtgaccccccagagccccgagtgctacccccccagctaccccagcgccatgagccccacccaccacctgcccccctacctgacccaccacccccacttcatccacaacagccacaccgcctactacccccccgtgaccggccccggcgacatgcccccccagttcttcccccagcaccacctgccccacaccatctacggcgagcaggagatcatccccttctacggcatgagcacctacatcaccagagaggaccagtacagcaagcccccccacaagaagctgaaggacagacagatcgacagacagaacagactgaacagcccccccagcagcatctacaagagcagctgcaccaccgtgtacaacggctacggcaagggccacagcggcggcagcggcggcggcggcagcggcagcggccccggcatcaagaagaccgagagaagagccagaagcagccccaagagcaacgacagcgacctgcaggagtacgagctggaggtgaagagagtgcaggacatcctgagcggcatcgagaagccccaggtgagcaacatccaggccagagccgtggtgctgagctgggccccccccgtgggcctgagctgcggcccccacagcggcctgagcttcccctacagctacgaggtggccctgagcgacaagggcagagacggcaagtacaagatcatctacagcggcgaggagctggagtgcaacctgaaggacctgagacccgccaccgactaccacgtgagagtgtacgccatgtacaacagcgtgaagggcagctgcagcgagcccgtgagcttcaccacccacagctgcgcccccgagtgccccttcccccccaagctggcccacagaagcaagagcagcctgaccctgcagtggaaggcccccatcgacaacggcagcaagatcaccaactacctgctggagtgggacgagggcaagagaaacagcggcttcagacagtgcttcttcggcagccagaagcactgcaagctgaccaagctgtgccccgccatgggctacaccttcagactggccgccagaaacgacatcggcaccagcggctacagccaggaggtggtgtgctacaccctgggcaacatcccccagatgcccagcgcccccagactggtgagagccggcatcacctgggtgaccctgcagtggagcaagcccgagggctgcagccccgaggaggtgatcacctacaccctggagatccaggaggacgagaacgacaacctgttccaccccaagtacaccggcgaggacctgacctgcaccgtgaagaacctgaagagaagcacccagtacaagttcagactgaccgccagcaacaccgagggcaagagctgccccagcgaggtgctggtgtgcaccaccagccccgacagacccggcccccccaccagacccctggtgaagggccccgtgaccagccacggcttcagcgtgaagtgggacccccccaaggacaacggcggcagcgagatcctgaagtacctgctggagatcaccgacggcaacagcgaggccaaccagtgggaggtggcctacagcggcagcgccaccgagtacaccttcacccacctgaagcccggcaccctgtacaagctgagagcctgctgcatcagcaccggcggccacagccagtgcagcgagagcctgcccgtgagaaccctgagcatcgcccccggccagtgcagaccccccagagtgctgggcagacccaagcacaaggaggtgcacctggagtgggacgtgcccgccagcgagagcggctgcgaggtgagcgagtacagcgtggagatgaccgagcccgaggacgtggccagcgaggtgtaccacggccccgagctggagtgcaccgtgggcaacctgctgcccggcaccgtgtacagattcagagtgagagccctgaacgacggcggctacggcccctacagcgacgtgagcgagatcaccaccgccgccggcccccccggccagtgcaaggccccctgcatcagctgcacccccgacggctgcgtgctggtgggctgggagagccccgacagcagcggcgccgacatcagcgagtacagactggagtggggcgaggacgaggagagcctggagctgatctaccacggcaccgacaccagattcgagatcagagacctgctgcccgccgcccagtactgctgcagactgcaggccttcaaccaggccggcgccggcccctacagcgagctggtgctgtgccagacccccgccagcgcccccgaccccgtgagcaccctgtgcgtgctggaggaggagcccctggacgcctaccccgacagccccagcgcctgcctggtgctgaactgggaggagccctgcaacaacggcagcgagatcctggcctacaccatcgacctgggcgacaccagcatcaccgtgggcaacaccaccatgcacgtgatgaaggacctgctgcccgagaccacctacagaatcagaatccaggccatcaacgagatcggcgccggccccttcagccagttcatcaaggccaagaccagacccctgccccccctgccccccagactggagtgcgccgccgccggcccccagagcctgaagctgaagtggggcgacagcaacagcaagacccacgccgccgaggacatcgtgtacaccctgcagctggaggacagaaacaagagattcatcagcatctacagaggccccagccacacctacaaggtgcagagactgaccgagttcacctgctacagcttcagaatccaggccgccagcgaggccggcgagggccccttcagcgagacctacaccttcagcaccaccaagagcgtgccccccaccatcaaggcccccagagtgacccagctggagggcaacagctgcgagatcctgtgggagaccgtgcccagcatgaagggcgaccccgtgaactacatcctgcaggtgctggtgggcagagagagcgagtacaagcaggtgtacaagggcgaggaggccaccttccagatcagcggcctgcagaccaacaccgactacagattcagagtgtgcgcctgcagaagatgcctggacaccagccaggagctgagcggcgccttcagccccagcgccgccttcgtgctgcagagaagcgaggtgatgctgaccggcgacatgggcagcctggacgaccccaagatgaagagcatgatgcccaccgacgagcagttcgccgccatcatcgtgctgggcttcgccaccctgagcatcctgttcgccttcatcctgcagtacttcctgatgaagtag

SEQ ID NO: 50272 - DNA, 216 bp, Artificial Sequence
  derived and/or modified sequence
atgtacgtgaccatgatgatgaccgaccagatccccctggagctgccccccctgctgaacggcgaggtggccatgatgccccacctggtgaacggcgacgccgcccagcaggtgatcctggtgcaggtgaaccccggcgagaccttcaccatcagagccgaggacggcaccctgcagtgcatccaggaggtgaacgtgaagagacactgcctgtag

SEQ ID NO: 50273 - protein, 317 aa, Artificial Sequence
  derived and/or modified sequence
MASVIPASNRSMRSDRNTYVGKRFVHVKNPYLDLMDEDILYHLDLGTKTHNLPAMFGDVKFVCVGGSPNRMKAFALFMHKELGFEEAEEDIKDICAGTDRYCMYKTGPVLAISHGMGIPSISIMLHELIKLLHHARCCDVTIIRIGTSGGIGIAPGTVVITDIAVDSFFKPRFEQVILDNIVTRSTELDKELSEELFNCSKEIPNFPTLVGHTMCTYDFYEGQGRLDGALCSFSREKKLDYLKRAFKAGVRNIEMESTVFAAMCGLCGLKAAVVCVTLLDRLDCDQINLPHDVLVEYQQRPQLLISNFIRRRLGLCD

SEQ ID NO: 50274 - protein, 374 aa, Artificial Sequence
  derived and/or modified sequence
MLAPGCELDPDQEVVRTRPEDVPASPSTSTMIVSVLRPPSHASCTACGTVTFHIVERMASVIPASNRSMRSDRNTYVGKRFVHVKNPYLDLMDEDILYHLDLGTKTHNLPAMFGDVKFVCVGGSPNRMKAFALFMHKELGFEEAEEDIKDICAGTDRYCMYKTGPVLAISHGMGIPSISIMLHELIKLLHHARCCDVTIIRIGTSGGIGIAPGTVVITDIAVDSFFKPRFEQVILDNIVTRSTELDKELSEELFNCSKEIPNFPTLVGHTMCTYDFYEGQGRLDGALCSFSREKKLDYLKRAFKAGVRNIEMESTVFAAMCGLCGLKAAVVCVTLLDRLDCDQINLPHDVLVEYQQRPQLLISNFIRRRLGLCD

SEQ ID NO: 50275 - DNA, 1125 bp, Artificial Sequence
  derived and/or modified sequence
atgctggcccccggctgcgagctggaccccgaccaggaggtggtgagaaccagacccgaggacgtgcccgccagccccagcaccagcaccatgatcgtgagcgtgctgagaccccccagccacgccagctgcaccgcctgcggcaccgtgaccttccacatcgtggagagaatggccagcgtgatccccgccagcaacagaagcatgagaagcgacagaaacacctacgtgggcaagagattcgtgcacgtgaagaacccctacctggacctgatggacgaggacatcctgtaccacctggacctgggcaccaagacccacaacctgcccgccatgttcggcgacgtgaagttcgtgtgcgtgggcggcagccccaacagaatgaaggccttcgccctgttcatgcacaaggagctgggcttcgaggaggccgaggaggacatcaaggacatctgcgccggcaccgacagatactgcatgtacaagaccggccccgtgctggccatcagccacggcatgggcatccccagcatcagcatcatgctgcacgagctgatcaagctgctgcaccacgccagatgctgcgacgtgaccatcatcagaatcggcaccagcggcggcatcggcatcgcccccggcaccgtggtgatcaccgacatcgccgtggacagcttcttcaagcccagattcgagcaggtgatcctggacaacatcgtgaccagaagcaccgagctggacaaggagctgagcgaggagctgttcaactgcagcaaggagatccccaacttccccaccctggtgggccacaccatgtgcacctacgacttctacgagggccagggcagactggacggcgccctgtgcagcttcagcagagagaagaagctggactacctgaagagagccttcaaggccggcgtgagaaacatcgagatggagagcaccgtgttcgccgccatgtgcggcctgtgcggcctgaaggccgccgtggtgtgcgtgaccctgctggacagactggactgcgaccagatcaacctgccccacgacgtgctggtggagtaccagcagagaccccagctgctgatcagcaacttcatcagaagaagactgggcctgtgcgactag

SEQ ID NO: 50276 - DNA, 2224 bp, Artificial Sequence
  derived and/or modified sequence
tatttgataggaaaatttaaaatgctaaaggaaaaattttcttagcaatttcacaggaaaacctaagttttaagagaggttatcattctgactgggaactgaactattatgactaggtctataatttaataacaagtcacaatatctctctttcttgacatcaatttaaggtgacttttcacatagtagagagaatggcttcagttatacctgcctccaataggtccatgagatctgacaggaatacatatgttggaaaaaggtttgttcacgttaaaaatccttacttggatttgatggatgaagacattctctatcacttggatttgggaacaaaaacacacaacctaccagcaatgtttggagatgtaaagtttgtctgtgtcggtgggagccccaacagaatgaaagcatttgcactgtttatgcacaaggagctcgggtttgaggaagctgaagaagacataaaagacatctgtgctgggacagacagatactgtatgtacaaaaccgggcctgtgctcgccatcagtcacggcatgggcatcccctccatttctattatgcttcatgaactcatcaaattactccaccatgcacggtgctgcgatgtcaccattattagaatcggtacatcagggggaatagggattgcaccagggactgttgtaataacggatatagctgtagactccttctttaagccccggtttgaacaggtcattttggacaacattgtcacccgaagtactgaactggacaaagaactgtctgaagaactgttcaactgtagcaaagaaatccccaacttcccaaccctcgttggacatacaatgtgtacctatgatttttatgaaggccaaggccgactagatggagcactgtgctccttttccagagaaaaaaagttagactacttgaagagagcatttaaagctggtgtcaggaatattgaaatggaatctacagtgtttgcagctatgtgtggactctgtggtctaaaagctgctgtggtctgtgtgacacttctcgacagactcgactgtgatcagatcaacttgcctcatgatgtcctggtggagtaccagcaacggcctcagctcctaatctccaacttcatcagacggcggcttggactttgtgactagacgtcctaactgggcagcccaaccctcccctgcaagtttgtagctcaagttgtaatgtgaaagtcatattttatttgtggcatttttatatagttctcatccacatgctaaatggaaagactttatgaaatccttctctcttaaaaaggaatttattgtaaaagaatactcacactaaattaaattcaaatttcattttagaataagttaactaaatcagtctaataattaaaattttaaaactcctggattatgacatttggagtttcatatgcagcattaattaagctcacatcaaaatagaccagccatttgcacatagttaccagtcactctgtttctgaaaccaatccagaaattcatgttagaacattgtcaggcacttctaggtattggacaagtgacagaaactgatcatccatattcaaaatatttacagaaaaaagtgtcagtgaaatgtaggtctatatggaaaagttaccattaggaaaatatggccatactgcttttttacccctgcactatttcagtgcaccacagaataggattcgagatttacatatgcctgtttgtgattttatctcagaatataacaactctggattacattttcctctcaactgaaaaccctcagtaatgcaaagaaaggccttcctttttcttcagaatcacaagtgactaaattgccttctagccattttttcttgtaaaaaaagtgttttgaggaggctgtattttttattccatttcaatattaaccaaataggctgagaaattcatagcaattgaattaagacttgagttcaagatgttaaaggaatccttttgtatgacttgtccagaccggcctattgccctacccgtttgattctctgggaggcatggtgctcctcctggctgcacatgctctctgtgaactgatcgcatcttgggttcttctcaatttgacatacttgggagtcggaatgactggatgggggatgggtagaggatgactggcacacttgtatagtatgtaatgttgtgtacatattatttatatggttgtggctcaaataaagtttaattccaacaca

SEQ ID NO: 50277 - DNA, 1125 bp, Artificial Sequence
  derived and/or modified sequence
atgcttgccccggggtgcgaacttgatcccgaccaggaagtggtccgtacgcggccagaggatgtacccgctagtccttctactagtaccatgatcgtcagcgtcttaaggcctccctcacacgcatcctgcactgcctgcgggactgtgacctttcatatagtcgagcgtatggcgagcgtcataccggctagcaataggtctatgcgatccgaccgtaacacttatgtcgggaagagatttgtacacgtgaagaacccctatcttgacttaatggacgaagatatcctgtatcacctcgacctaggaactaagactcataatttgccagctatgttcggagacgtcaaattcgtttgcgtgggggggagtcctaatcggatgaaagcgtttgctctctttatgcacaaggagttgggattcgaagaagcagaagaagatattaaagatatttgcgcagggactgacagatattgtatgtacaaaacagggcccgttctggctatctctcacggaatggggataccctctatcagtatcatgcttcacgagctcatcaagctgctgcaccatgcaaggtgctgtgacgtcaccatcattcgtattggcacatccggaggtatcggaattgccccaggtaccgttgtgattactgacattgccgttgatagcttcttcaagccaagattcgagcaggtgattttggacaacattgtcacacggtccaccgaattggacaaggaattgtcggaggagttatttaattgtagtaaggaaattccaaatttccccacgcttgtagggcacacaatgtgtacatatgatttctatgaaggccagggcagacttgacggcgcgctgtgttccttcagtagggaaaaaaagctggattacttgaagagggccttcaaggcaggagttcgaaacatcgaaatggagagcaccgtgtttgctgcaatgtgcggcctctgtggtctgaaagcggcagtggtatgcgttacgctactcgataggctcgactgcgatcaaataaatctcccacatgacgtactggtggagtaccagcagaggccccagcttctgatcagcaattttattaggaggcgcctgggcctctgcgattag

SEQ ID NO: 50278 - DNA, 1125 bp, Artificial Sequence
  derived and/or modified sequence
atgctggcccctggctgtgagctggaccctgaccaggaggtggtgaggaccaggccagaagatgtgcctgccagccccagcaccagcaccatgattgtgtctgtgctgcggccccccagccacgccagctgcacagcctgtggcaccgtgaccttccacatcgtggagaggatggccagcgtcatcccagccagcaacagatccatgagaagtgacaggaacacctacgtgggcaagagatttgtgcacgtgaagaacccctacctggacctgatggatgaggacatcctgtaccacctggacctgggcaccaagacccacaacctgcctgccatgtttggagatgtgaagtttgtgtgtgtgggcggcagccccaacaggatgaaggcctttgccctcttcatgcacaaggagctgggctttgaggaggccgaggaggacatcaaggacatctgtgccggcacagaccgctactgcatgtacaagacaggccctgtgctggccatcagccacggcatgggcatccccagcatcagcatcatgctgcacgagctgatcaagctgctgcaccacgcccgctgctgtgatgtgaccatcatccgcatcggcaccagcggcggcatcggcatcgcccctggcaccgtggtgatcacagacattgctgtggacagcttcttcaagcccaggtttgagcaggtgatcctggacaacatcgtgaccaggagcacagagctggacaaggagctgtctgaggagctgttcaactgcagcaaggagatccccaacttccccaccctggtgggccacaccatgtgcacctatgacttctatgagggccagggccgcctggatggagccctgtgcagcttcagccgggagaagaagctggactacctgaagagggccttcaaggccggcgtgaggaacatcgagatggagagcacagtgtttgctgccatgtgtggcctgtgtggcctgaaggctgctgtggtgtgtgtgaccctgctggaccggctggactgtgaccagatcaacctgccccatgatgtgctggtggagtaccagcagaggccccagctgctgatcagcaacttcatcagaagaaggctgggcctgtgtgactag

SEQ ID NO: 50279 - DNA, 1125 bp, Artificial Sequence
  derived and/or modified sequence
atgctggcccccggctgcgagctggaccccgaccaggaggtggtgcgtactcgtcccgaggatgttccagcctccccatcaacctccacaatgatcgtgtctgtgctccgcccccctagtcacgcctcttgtactgcctgtgggaccgtgacattccacattgtggagaggatggcctcagtgatccctgctagcaaccgcagtatgagatctgaccgcaatacttacgtgggtaagaggtttgttcatgtgaagaatccatacctggacctcatggacgaggacatcttgtaccatctagatctgggtactaaaactcacaacctccctgcgatgttcggggatgttaaatttgtctgtgtgggaggatcccccaacaggatgaaagcatttgcactgtttatgcacaaggagcttggatttgaagaggccgaagaggacattaaggatatttgtgctggaaccgataggtactgcatgtacaaaactggtccagtactcgccatcagtcacgggatgggtatcccttctataagtatcatgctccacgaactgataaagcttttgcaccacgcccgatgttgtgacgtcacaatcatccggattggcacgtccggtggtatcggaatcgctcccggtactgtcgtcattactgatattgccgtggactcattcttcaagccgcggtttgagcaggtgattctggataatatcgtcactcggagcacggaactagacaaggagctgtcagaggaactgtttaattgtagcaaagaaatccccaacttcccaactctagtcggccacacaatgtgtacctatgacttttacgagggacaaggcaggctggacggcgccctctgtagcttcagtcgcgaaaaaaagctggactacctcaagagagcatttaaagccggagtgaggaacattgaaatggagtcaaccgtgttcgccgccatgtgtggtctgtgtggcctgaaagccgcagtggtgtgtgttaccctgctcgatcggctggattgtgatcaaatcaatctgccccatgacgtgttggtcgaataccagcagcgcccacaattattgatctcgaactttatcaggcgcaggctaggactatgcgattag

SEQ ID NO: 50280 - DNA, 2221 bp, Artificial Sequence
  derived and/or modified sequence
gggacttcaccagtgctgccatgctggccccaggctgtgagttggacccagaccaagaagtggtgaggacaaggcctgaagatgtgcctgcttccccttcaacttccaccatgattgtaagtgtcctgaggcctcccagccatgcttcctgtacagcctgtggaactgtgacttttcacatagtagagagaatggcttcagttatacctgcctccaataggtccatgagatctgacaggaatacatatgttggaaaaaggtttgttcacgttaaaaatccttacttggatttgatggatgaagacattctctatcacttggatttgggaacaaaaacacacaacctaccagcaatgtttggagatgtaaagtttgtctgtgtcggtgggagccccaacagaatgaaagcatttgcactgtttatgcacaaggagctcgggtttgaggaagctgaagaagacataaaagacatctgtgctgggacagacagatactgtatgtacaaaaccgggcctgtgctcgccatcagtcacggcatgggcatcccctccatttctattatgcttcatgaactcatcaaattactccaccatgcacggtgctgcgatgtcaccattattagaatcggtacatcagggggaatagggattgcaccagggactgttgtaataacggatatagctgtagactccttctttaagccccggtttgaacaggtcattttggacaacattgtcacccgaagtactgaactggacaaagaactgtctgaagaactgttcaactgtagcaaagaaatccccaacttcccaaccctcgttggacatacaatgtgtacctatgatttttatgaaggccaaggccgactagatggagcactgtgctccttttccagagaaaaaaagttagactacttgaagagagcatttaaagctggtgtcaggaatattgaaatggaatctacagtgtttgcagctatgtgtggactctgtggtctaaaagctgctgtggtctgtgtgacacttctcgacagactcgactgtgatcagatcaacttgcctcatgatgtcctggtggagtaccagcaacggcctcagctcctaatctccaacttcatcagacggcggcttggactttgtgactagacgtcctaactgggcagcccaaccctcccctgcaagtttgtagctcaagttgtaatgtgaaagtcatattttatttgtggcatttttatatagttctcatccacatgctaaatggaaagactttatgaaatccttctctcttaaaaaggaatttattgtaaaagaatactcacactaaattaaattcaaatttcattttagaataagttaactaaatcagtctaataattaaaattttaaaactcctggattatgacatttggagtttcatatgcagcattaattaagctcacatcaaaatagaccagccatttgcacatagttaccagtcactctgtttctgaaaccaatccagaaattcatgttagaacattgtcaggcacttctaggtattggacaagtgacagaaactgatcatccatattcaaaatatttacagaaaaaagtgtcagtgaaatgtaggtctatatggaaaagttaccattaggaaaatatggccatactgcttttttacccctgcactatttcagtgcaccacagaataggattcgagatttacatatgcctgtttgtgattttatctcagaatataacaactctggattacattttcctctcaactgaaaaccctcagtaatgcaaagaaaggccttcctttttcttcagaatcacaagtgactaaattgccttctagccattttttcttgtaaaaaaagtgttttgaggaggctgtattttttattccatttcaatattaaccaaataggctgagaaattcatagcaattgaattaagacttgagttcaagatgttaaaggaatccttttgtatgacttgtccagaccggcctattgccctacccgtttgattctctgggaggcatggtgctcctcctggctgcacatgctctctgtgaactgatcgcatcttgggttcttctcaatttgacatacttgggagtcggaatgactggatgggggatgggtagaggatgactggcacacttgtatagtatgtaatgttgtgtacatattatttatatggttgtggctcaaataaagtttaattccaacaca

SEQ ID NO: 50281 - DNA, 1125 bp, Artificial Sequence
  derived and/or modified sequence
atgttggccccagggtgtgaactcgacccagatcaagaggtcgtcagaacccgccctgaggatgttcctgcgtcaccttcaacatcgaccatgattgtgtccgttctgcgtccgccttctcacgctagttgcacagcatgtggaaccgtaactttccacattgtcgagcgcatggcaagcgtgattcccgcaagcaatcggagtatgaggagtgaccgcaatacttacgtggggaagagatttgttcacgtcaagaacccttatctggatctcatggacgaagatatcctttatcacctggatcttgggacaaaaacacataacctgcccgcaatgtttggggatgtcaagtttgtttgtgtggggggtagtccaaatagaatgaaagcattcgctttgttcatgcacaaagagcttggttttgaagaggcggaggaggacatcaaagatatatgtgccggtaccgatcggtattgcatgtataaaactggcccagtgctggcaatctcccacggcatgggaattccttctatctccattatgctgcacgagttaattaagctgctccaccatgcgcgttgctgtgacgtgacaatcatccgtatcggcactagcggaggaatcggtatcgctccgggaacagtcgtaattacagatattgcagtagatagtttctttaagccaagatttgagcaggtgattcttgataacatagtgacgagaagcactgagttagataaggagctttccgaagagctgttcaactgttctaaggaaattcctaattttcccacactcgtcggccacacaatgtgcacctatgacttttacgagggtcaaggacgtttggatggggcactctgctccttcagtcgcgagaagaagctcgattacctgaaacgagcgttcaaggcgggtgtaagaaacattgagatggaatcgacagtgttcgctgctatgtgcggcctatgtggtctcaaggcagcagtcgtgtgcgtgaccctcctcgataggttggattgtgaccagatcaatctgccgcatgacgtactcgtggagtaccaacagagaccccagctcctgataagcaattttattcggcgacggctggggctgtgcgactag

SEQ ID NO: 50282 - protein, 492 aa, Artificial Sequence
  derived and/or modified sequence
MALNSGSPPAIGPYYENHGYQPENPYPAQPTVVPTVYEVHPAQYYPSPVPQYAPRVLTQASNPVVCTQPKSPSGTVCTSKTKKALCITLTLGTFLVGAALAAGLLWKFMGSKCSNSGIECDSSGTCINPSNWCDGVSHCPGGEDENRCVRLYGPNFILQVYSSQRKSWHPVCQDDWNENYGRAACRDMGYKNNFYSSQGIVDDSGSTSFMKLNTSAGNVDIYKKLYHSDACSSKAVVSLRCIACGVNLNSSRQSRIVGGESALPGAWPWQVSLHVQNVHVCGGSIITPEWIVTAAHCVEKPLNNPWHWTAFAGILRQSFMFYGAGYQVEKVISHPNYDSKTKNNDIALMKLQKPLTFNDLVKPVCLPNPGMMLQPEQLCWISGWGATEEKGKTSEVLNAAKVLLIETQRCNSRYVYDNLITPAMICAGFLQGNVDSCQGDSGGPLVTSKNNIWWLIGDTSWGSGCAKAYRPGVYGNVMVFTDWIYRQMRADG

SEQ ID NO: 50283 - protein, 529 aa, Artificial Sequence
  derived and/or modified sequence
MPPAPPGGESGCEERGAAGHIEHSRYLSLLDAVDNSKMALNSGSPPAIGPYYENHGYQPENPYPAQPTVVPTVYEVHPAQYYPSPVPQYAPRVLTQASNPVVCTQPKSPSGTVCTSKTKKALCITLTLGTFLVGAALAAGLLWKFMGSKCSNSGIECDSSGTCINPSNWCDGVSHCPGGEDENRCVRLYGPNFILQVYSSQRKSWHPVCQDDWNENYGRAACRDMGYKNNFYSSQGIVDDSGSTSFMKLNTSAGNVDIYKKLYHSDACSSKAVVSLRCIACGVNLNSSRQSRIVGGESALPGAWPWQVSLHVQNVHVCGGSIITPEWIVTAAHCVEKPLNNPWHWTAFAGILRQSFMFYGAGYQVEKVISHPNYDSKTKNNDIALMKLQKPLTFNDLVKPVCLPNPGMMLQPEQLCWISGWGATEEKGKTSEVLNAAKVLLIETQRCNSRYVYDNLITPAMICAGFLQGNVDSCQGDSGGPLVTSKNNIWWLIGDTSWGSGCAKAYRPGVYGNVMVFTDWIYRQMRADG

SEQ ID NO: 50284 - protein, 489 aa, Artificial Sequence
  derived and/or modified sequence
MALNSGSPPAIGPYYENHGYQPENPYPAQPTVVPTVYEVHPAQYYPSPVPQYAPRVLTQASNPVVCTQPKSPSGTVCTSKTKKALCITLTLGTFLVGAALAAGLLWKFMGSKCSNSGIECDSSGTCINPSNWCDGVSHCPGGEDENRCVRLYGPNFILQVYSSQRKSWHPVCQDDWNENYGRAACRDMGYKNNFYSSQGIVDDSGSTSFMKLNTSAGNVDIYKKLYHSDACSSKAVVSLRCIACGVNLNSSRQSRIVGGESALPGAWPWQVSLHVQNVHVCGGSIITPEWIVTAAHCVEKPLNNPWHWTAFAGILRQSFMFYGAGYQVEKVISHPNYDSKTKNNDIALMKLQKPLTFNDLVKPVCLPNPGMMLQPEQLCWISGWGATEEKGKTSEVLNAAKVLLIETQRCNSRYVYDNLITPAMICAGFLQGNVDSCQGDSGGPLVTSKNNIWWLIGDTSWGSGCAKAYRPGVYGNVMVFTDWIYRQMR

SEQ ID NO: 50285 - DNA, 1590 bp, Artificial Sequence
  derived and/or modified sequence
atgccccccgccccccccggcggcgagagcggctgcgaggagagaggcgccgccggccacatcgagcacagcagatacctgagcctgctggacgccgtggacaacagcaagatggccctgaacagcggcagcccccccgccatcggcccctactacgagaaccacggctaccagcccgagaacccctaccccgcccagcccaccgtggtgcccaccgtgtacgaggtgcaccccgcccagtactaccccagccccgtgccccagtacgcccccagagtgctgacccaggccagcaaccccgtggtgtgcacccagcccaagagccccagcggcaccgtgtgcaccagcaagaccaagaaggccctgtgcatcaccctgaccctgggcaccttcctggtgggcgccgccctggccgccggcctgctgtggaagttcatgggcagcaagtgcagcaacagcggcatcgagtgcgacagcagcggcacctgcatcaaccccagcaactggtgcgacggcgtgagccactgccccggcggcgaggacgagaacagatgcgtgagactgtacggccccaacttcatcctgcaggtgtacagcagccagagaaagagctggcaccccgtgtgccaggacgactggaacgagaactacggcagagccgcctgcagagacatgggctacaagaacaacttctacagcagccagggcatcgtggacgacagcggcagcaccagcttcatgaagctgaacaccagcgccggcaacgtggacatctacaagaagctgtaccacagcgacgcctgcagcagcaaggccgtggtgagcctgagatgcatcgcctgcggcgtgaacctgaacagcagcagacagagcagaatcgtgggcggcgagagcgccctgcccggcgcctggccctggcaggtgagcctgcacgtgcagaacgtgcacgtgtgcggcggcagcatcatcacccccgagtggatcgtgaccgccgcccactgcgtggagaagcccctgaacaacccctggcactggaccgccttcgccggcatcctgagacagagcttcatgttctacggcgccggctaccaggtggagaaggtgatcagccaccccaactacgacagcaagaccaagaacaacgacatcgccctgatgaagctgcagaagcccctgaccttcaacgacctggtgaagcccgtgtgcctgcccaaccccggcatgatgctgcagcccgagcagctgtgctggatcagcggctggggcgccaccgaggagaagggcaagaccagcgaggtgctgaacgccgccaaggtgctgctgatcgagacccagagatgcaacagcagatacgtgtacgacaacctgatcacccccgccatgatctgcgccggcttcctgcagggcaacgtggacagctgccagggcgacagcggcggccccctggtgaccagcaagaacaacatctggtggctgatcggcgacaccagctggggcagcggctgcgccaaggcctacagacccggcgtgtacggcaacgtgatggtgttcaccgactggatctacagacagatgagagccgacggctag

SEQ ID NO: 50286 - DNA, 1590 bp, Artificial Sequence
  derived and/or modified sequence
atgcccccggcccccccagggggcgagagtggctgcgaggagaggggggccgctgggcatatcgagcactccaggtacctgtcactgctggacgccgtcgacaacagtaagatggcactgaattcaggctctccacccgccattggaccatattatgagaatcacggctaccagccagagaatccctatccagctcagcctacagtcgttcctaccgtctacgaggtacatcccgcacagtactaccccagccccgtcccgcagtatgcgcctcgggttctgacgcaagcatccaacccggtggtctgtactcaacccaaatctcccagcggcactgtatgcacgagcaagacaaagaaagccctttgtatcacactgaccctgggtaccttcctggtgggggcagcacttgccgcgggactgctgtggaagtttatgggcagcaagtgctcaaatagtgggatagagtgcgattcttctggaacatgtatcaatccgagcaattggtgcgacggggtttctcactgccctggtggagaggacgaaaaccgatgtgtgaggctgtacggaccaaattttatattgcaggtttatagttctcagcggaagtcctggcatccggtgtgccaggacgactggaatgaaaattatggaagagcagcctgtcgtgatatgggatataaaaataatttttattctagccagggaatcgtggacgattctggctcaacgtcctttatgaaactaaatacctcagctggcaacgtggacatatacaagaaactgtatcatagtgatgcttgtagctctaaagcagtggtgtccctcaggtgtatagcgtgtggagttaacctgaattcttctaggcaatctagaatcgtcggtggggaatcggcgttgcctggcgcttggccttggcaggtctctctgcatgtacagaatgtgcatgtgtgtggaggctccatcataacccctgagtggattgttactgcagcccattgcgtggagaaacccctgaataacccgtggcattggactgcttttgcggggattctgcggcagagctttatgttttacggtgccggttaccaagttgaaaaagtgatatctcaccccaattacgactcgaagacaaagaacaatgatatcgcactgatgaaacttcaaaaacccctcaccttcaacgaccttgtaaaacccgtatgcctcccgaatcctgggatgatgctccagcctgagcagctctgctggatttccgggtggggtgcaaccgaagaaaagggcaaaacatctgaggtcctgaacgctgccaaggtgctgctgattgagacacagagatgcaactctagatatgtctacgataatttaatcacacccgctatgatttgtgcaggttttctgcagggaaacgtggattcctgccagggagattcgggcggccctttggttacctctaaaaacaacatctggtggctcattggcgacaccagctggggatccggctgcgctaaagcctatcgccccggtgtgtacggaaatgtgatggtatttacagattggatttacagacagatgcgggctgatggatag

SEQ ID NO: 50287 - DNA, 1590 bp, Artificial Sequence
  derived and/or modified sequence
atgcccccagcccctcctggaggagagagcggctgtgaggagagaggagctgctggccacatcgagcacagccgctacctgagcctgctggatgctgtggacaacagcaagatggccctgaacagcggcagccccccagccatcggcccctactatgaaaatcatggctaccagcctgagaacccctacccagcccagcccaccgtggtgcccaccgtgtatgaggtgcacccagcccagtactaccccagccctgtgccccagtatgccccccgggtgctgacccaggccagcaaccctgtggtgtgcacccagcccaagagccccagcggcaccgtgtgcaccagcaagaccaagaaggccctgtgcatcaccctgaccctgggcaccttcctggtgggcgccgccctggccgccggcctgctgtggaagttcatgggcagcaagtgcagcaacagcggcattgaatgtgacagcagcggcacctgcatcaaccccagcaactggtgtgatggagtgagccactgccctggaggagaagatgagaacagatgtgtgcggctgtatggccccaacttcatcctgcaggtgtacagcagccagaggaagtcctggcaccctgtgtgccaggatgactggaatgaaaattatggccgggccgcctgccgggacatgggctacaagaacaacttctacagcagccagggcatcgtggatgattctggcagcaccagcttcatgaagctgaacaccagcgctggaaatgtggacatctacaagaagctgtaccacagtgatgcctgcagcagcaaggctgtggtgtccctgcgctgcatcgcctgtggggtgaacctgaacagcagccggcagagcagaattgtgggcggggagagcgccctgcccggggcctggccctggcaggtgtccctgcacgtgcagaatgtgcacgtgtgtggcggcagcatcatcaccccagagtggatcgtgacagctgcccactgtgtggagaagcccctgaacaacccctggcactggacagcctttgctggcatcctgcggcagagcttcatgttttatggagctggctaccaggtggagaaggtgatcagccaccccaactatgacagcaagaccaagaacaatgacatcgccctgatgaagctgcagaagcccctgaccttcaatgacctggtgaagcctgtgtgcctgcccaaccctggcatgatgctgcagcctgagcagctgtgctggatcagcggctggggcgccacagaggagaagggcaagaccagcgaggtgctgaatgctgccaaggtgctgctgattgagacccagcgctgcaacagccgctacgtgtatgacaacctgatcaccccagccatgatctgtgccggcttcctgcagggcaatgtggacagctgccagggcgacagcggcggccccctggtgaccagcaagaacaacatctggtggctgattggagacacctcctggggcagcggctgtgccaaggcctacagacctggggtgtatggaaatgtgatggtgttcacagactggatctaccggcagatgagagcagatggatag

SEQ ID NO: 50288 - DNA, 1590 bp, Artificial Sequence
  derived and/or modified sequence
atgccccccgccccccccggcggcgagagcggctgcgaggagcggggcgcagcaggacatattgagcatagtaggtacttgtccctgctggacgccgtcgataacagtaaaatggcacttaactcaggctcccctcccgcaattgggccttattatgagaatcacggctaccagcccgaaaatccgtatccggcacaaccaacagtggtaccaacggtgtatgaggttcaccctgcccagtattatccatcccctgtcccacaatacgccccacgggttttgacccaggctagcaatccggtggtctgcacccagcccaagtcaccttccggtacagtgtgtacatcaaaaaccaagaaagctctgtgcattactcttaccctgggcacctttctggtgggcgccgctctcgcggccggcctgctctggaagttcatgggttccaaatgctctaatagtggcattgaatgcgacagtagtgggacttgtatcaatcccagcaattggtgcgatggggtctcccattgccccgggggcgaagacgagaatcggtgtgtacgcctgtatggtcctaatttcatcctccaagtctacagtagtcagaggaagagttggcaccctgtgtgtcaggatgactggaacgagaattatgggcgggcagcatgccgcgatatgggctacaaaaataacttttattcctctcaaggcatcgtggacgatagcgggtctacgagcttcatgaaactcaatacttcagccgggaatgtggacatctacaaaaaattgtaccatagtgacgcgtgcagtagtaaggcagtggtgtcactgcggtgtatcgcctgtggggttaatttaaactcaagccgccaaagccggattgtaggaggggagagcgcattgcccggggcctggccatggcaggtaagcctgcatgttcagaacgtgcatgtgtgcgggggtagcattatcacccccgagtggattgttactgctgcccactgcgtggagaagccccttaacaatccttggcactggacagccttcgccggaatacttagacagtcctttatgttctacggtgctgggtaccaagtggaaaaggtgatctcacaccccaattatgactccaagactaagaacaacgacattgcacttatgaaactgcagaagcccctgacattcaacgatctagtaaaacctgtctgcctcccaaaccccggcatgatgttgcagcccgagcagctgtgctggattagtggctggggggcaaccgaggaaaagggcaaaacctccgaagtgctgaacgctgccaaagtgctgctgattgagacccagcggtgtaatagtcggtatgtgtatgacaacctgattacgccggcaatgatctgtgccggatttctccagggtaatgtcgattcatgccagggcgattccggcggcccactggtaactagtaagaacaacatttggtggcttattggagacacctcttgggggtctgggtgtgccaaggcataccgccccggagtttatgggaacgtaatggtcttcaccgattggatctatcgacagatgagagccgacggctag

SEQ ID NO: 50289 - DNA, 1590 bp, Artificial Sequence
  derived and/or modified sequence
atgcctcctgcaccccctggaggggagtccggctgtgaagaaagaggtgccgctgggcatatcgaacacagtcggtatctttccttattggacgccgtagataattctaaaatggctctgaacagcggcagtcctcctgccatcggtccttactacgagaatcatgggtaccagcctgaaaacccttacccagcccaaccaacggtcgtacctacggtgtacgaggtgcaccccgcacagtactatcctagtcctgtcccgcaatacgctccaagagtccttacgcaggcttctaatcccgttgtgtgtacccagccaaagtcaccatcgggaaccgtctgcactagcaaaaccaaaaaggccctgtgcatcacactaacactgggtacatttctcgtgggggcagcgctggccgcaggcttactgtggaagtttatgggtagcaagtgcagcaattctggcatagagtgcgattcatcaggtacatgtattaacccttcaaattggtgtgacggagtcagtcactgccccggaggagaagatgagaatcggtgcgtacgcctctacggcccaaatttcattctccaggtgtacagcagccagaggaagagttggcatcctgtctgccaagatgattggaacgaaaattatggaagggcagcttgccgtgacatggggtacaagaataacttttacagcagtcaaggcatagtagacgactcagggtcaacctccttcatgaaactgaacaccagcgccggaaatgttgatatctataagaaattgtatcattccgacgcgtgttccagcaaggcagttgtgtccctccgctgtatagcctgcggggtgaatctgaactcctcgcggcagtcccgcatcgtgggtggagagagcgctctccctggtgcttggccttggcaagttagtctgcatgtgcagaatgtgcacgtctgtggaggaagcatcatcacgccagaatggatcgttactgcagctcactgcgtggaaaagcccctgaataatccttggcattggacggcttttgctggtatcttgagacagagttttatgttctacggggcaggctatcaagtggagaaagtcatttcccaccccaactacgactcaaaaacaaaaaataacgacattgctttgatgaagctgcagaaaccgctgactttcaacgatcttgtcaaaccagtgtgcttgccgaatcccggaatgatgctgcagccggaacagctgtgctggatcagtgggtggggggcaacggaggagaagggcaaaacctcggaggtgctgaatgcagccaaggtcctcctcattgagacacagagatgtaacagtcgatatgtttacgataacctaattacgccagccatgatctgcgccggatttctccaggggaatgtcgactcatgccaaggtgacagcgggggacctctggtgacaagcaagaataacatctggtggctgataggcgatacatcctgggggtcaggctgtgcaaaagcgtatcggccaggggtttatggcaacgtaatggtgttcacggactggatctataggcagatgcgggctgatggctag

SEQ ID NO: 50290 - DNA, 3205 bp, Artificial Sequence
  derived and/or modified sequence
cgagtaggcgcgagctaagcaggaggcggaggcggaggcggagggcgaggggcggggagcgccgcctggagcgcggcaggtcatattgaacattccagatacctatcattactcgatgctgttgataacagcaagatggctttgaactcagggtcaccaccagctattggaccttactatgaaaaccatggataccaaccggaaaacccctatcccgcacagcccactgtggtccccactgtctacgaggtgcatccggctcagtactacccgtcccccgtgccccagtacgccccgagggtcctgacgcaggcttccaaccccgtcgtctgcacgcagcccaaatccccatccgggacagtgtgcacctcaaagactaagaaagcactgtgcatcaccttgaccctggggaccttcctcgtgggagctgcgctggccgctggcctactctggaagttcatgggcagcaagtgctccaactctgggatagagtgcgactcctcaggtacctgcatcaacccctctaactggtgtgatggcgtgtcacactgccccggcggggaggacgagaatcggtgtgttcgcctctacggaccaaacttcatccttcaggtgtactcatctcagaggaagtcctggcaccctgtgtgccaagacgactggaacgagaactacgggcgggcggcctgcagggacatgggctataagaataatttttactctagccaaggaatagtggatgacagcggatccaccagctttatgaaactgaacacaagtgccggcaatgtcgatatctataaaaaactgtaccacagtgatgcctgttcttcaaaagcagtggtttctttacgctgtatagcctgcggggtcaacttgaactcaagccgccagagcaggattgtgggcggcgagagcgcgctcccgggggcctggccctggcaggtcagcctgcacgtccagaacgtccacgtgtgcggaggctccatcatcacccccgagtggatcgtgacagccgcccactgcgtggaaaaacctcttaacaatccatggcattggacggcatttgcggggattttgagacaatctttcatgttctatggagccggataccaagtagaaaaagtgatttctcatccaaattatgactccaagaccaagaacaatgacattgcgctgatgaagctgcagaagcctctgactttcaacgacctagtgaaaccagtgtgtctgcccaacccaggcatgatgctgcagccagaacagctctgctggatttccgggtggggggccaccgaggagaaagggaagacctcagaagtgctgaacgctgccaaggtgcttctcattgagacacagagatgcaacagcagatatgtctatgacaacctgatcacaccagccatgatctgtgccggcttcctgcaggggaacgtcgattcttgccagggtgacagtggagggcctctggtcacttcgaagaacaatatctggtggctgataggggatacaagctggggttctggctgtgccaaagcttacagaccaggagtgtacgggaatgtgatggtattcacggactggatttatcgacaaatgagggcagacggctaatccacatggtcttcgtccttgacgtcgttttacaagaaaacaatggggctggttttgcttccccgtgcatgatttactcttagagatgattcagaggtcacttcatttttattaaacagtgaacttgtctggctttggcactctctgccattctgtgcaggctgcagtggctcccctgcccagcctgctctccctaaccccttgtccgcaaggggtgatggccggctggttgtgggcactggcggtcaagtgtggaggagaggggtggaggctgccccattgagatcttcctgctgagtcctttccaggggccaattttggatgagcatggagctgtcacctctcagctgctggatgacttgagatgaaaaaggagagacatggaaagggagacagccaggtggcacctgcagcggctgccctctggggccacttggtagtgtccccagcctacctctccacaaggggattttgctgatgggttcttagagccttagcagccctggatggtggccagaaataaagggaccagcccttcatgggtggtgacgtggtagtcacttgtaaggggaacagaaacatttttgttcttatggggtgagaatatagacagtgcccttggtgcgagggaagcaattgaaaaggaacttgccctgagcactcctggtgcaggtctccacctgcacattgggtggggctcctgggagggagactcagccttcctcctcatcctccctgaccctgctcctagcaccctggagagtgcacatgccccttggtcctggcagggcgccaagtctggcaccatgttggcctcttcaggcctgctagtcactggaaattgaggtccatgggggaaatcaaggatgctcagtttaaggtacactgtttccatgttatgtttctacacattgctacctcagtgctcctggaaacttagcttttgatgtctccaagtagtccaccttcatttaactctttgaaactgtatcatctttgccaagtaagagtggtggcctatttcagctgctttgacaaaatgactggctcctgacttaacgttctataaatgaatgtgctgaagcaaagtgcccatggtggcggcgaagaagagaaagatgtgttttgttttggactctctgtggtcccttccaatgctgtgggtttccaaccaggggaagggtcccttttgcattgccaagtgccataaccatgagcactactctaccatggttctgcctcctggccaagcaggctggtttgcaagaatgaaatgaatgattctacagctaggacttaaccttgaaatggaaagtcatgcaatcccatttgcaggatctgtctgtgcacatgcctctgtagagagcagcattcccagggaccttggaaacagttggcactgtaaggtgcttgctccccaagacacatcctaaaaggtgttgtaatggtgaaaacgtcttccttctttattgccccttcttatttatgtgaacaactgtttgtctttttttgtatcttttttaaactgtaaagttcaattgtgaaaatgaatatcatgcaaataaattatgcaatttttttttcaaagtaa

SEQ ID NO: 50291 - DNA, 3240 bp, Artificial Sequence
  derived and/or modified sequence
accagggtcccggctcggggtccgggctggggaggggaacctgggcgcctgggacccgccgatgccccctgccccgcccggaggtgaaagcgggtgtgaggagcgcggcgcggcaggtcatattgaacattccagatacctatcattactcgatgctgttgataacagcaagatggctttgaactcagggtcaccaccagctattggaccttactatgaaaaccatggataccaaccggaaaacccctatcccgcacagcccactgtggtccccactgtctacgaggtgcatccggctcagtactacccgtcccccgtgccccagtacgccccgagggtcctgacgcaggcttccaaccccgtcgtctgcacgcagcccaaatccccatccgggacagtgtgcacctcaaagactaagaaagcactgtgcatcaccttgaccctggggaccttcctcgtgggagctgcgctggccgctggcctactctggaagttcatgggcagcaagtgctccaactctgggatagagtgcgactcctcaggtacctgcatcaacccctctaactggtgtgatggcgtgtcacactgccccggcggggaggacgagaatcggtgtgttcgcctctacggaccaaacttcatccttcaggtgtactcatctcagaggaagtcctggcaccctgtgtgccaagacgactggaacgagaactacgggcgggcggcctgcagggacatgggctataagaataatttttactctagccaaggaatagtggatgacagcggatccaccagctttatgaaactgaacacaagtgccggcaatgtcgatatctataaaaaactgtaccacagtgatgcctgttcttcaaaagcagtggtttctttacgctgtatagcctgcggggtcaacttgaactcaagccgccagagcaggattgtgggcggcgagagcgcgctcccgggggcctggccctggcaggtcagcctgcacgtccagaacgtccacgtgtgcggaggctccatcatcacccccgagtggatcgtgacagccgcccactgcgtggaaaaacctcttaacaatccatggcattggacggcatttgcggggattttgagacaatctttcatgttctatggagccggataccaagtagaaaaagtgatttctcatccaaattatgactccaagaccaagaacaatgacattgcgctgatgaagctgcagaagcctctgactttcaacgacctagtgaaaccagtgtgtctgcccaacccaggcatgatgctgcagccagaacagctctgctggatttccgggtggggggccaccgaggagaaagggaagacctcagaagtgctgaacgctgccaaggtgcttctcattgagacacagagatgcaacagcagatatgtctatgacaacctgatcacaccagccatgatctgtgccggcttcctgcaggggaacgtcgattcttgccagggtgacagtggagggcctctggtcacttcgaagaacaatatctggtggctgataggggatacaagctggggttctggctgtgccaaagcttacagaccaggagtgtacgggaatgtgatggtattcacggactggatttatcgacaaatgagggcagacggctaatccacatggtcttcgtccttgacgtcgttttacaagaaaacaatggggctggttttgcttccccgtgcatgatttactcttagagatgattcagaggtcacttcatttttattaaacagtgaacttgtctggctttggcactctctgccattctgtgcaggctgcagtggctcccctgcccagcctgctctccctaaccccttgtccgcaaggggtgatggccggctggttgtgggcactggcggtcaagtgtggaggagaggggtggaggctgccccattgagatcttcctgctgagtcctttccaggggccaattttggatgagcatggagctgtcacctctcagctgctggatgacttgagatgaaaaaggagagacatggaaagggagacagccaggtggcacctgcagcggctgccctctggggccacttggtagtgtccccagcctacctctccacaaggggattttgctgatgggttcttagagccttagcagccctggatggtggccagaaataaagggaccagcccttcatgggtggtgacgtggtagtcacttgtaaggggaacagaaacatttttgttcttatggggtgagaatatagacagtgcccttggtgcgagggaagcaattgaaaaggaacttgccctgagcactcctggtgcaggtctccacctgcacattgggtggggctcctgggagggagactcagccttcctcctcatcctccctgaccctgctcctagcaccctggagagtgcacatgccccttggtcctggcagggcgccaagtctggcaccatgttggcctcttcaggcctgctagtcactggaaattgaggtccatgggggaaatcaaggatgctcagtttaaggtacactgtttccatgttatgtttctacacattgctacctcagtgctcctggaaacttagcttttgatgtctccaagtagtccaccttcatttaactctttgaaactgtatcatctttgccaagtaagagtggtggcctatttcagctgctttgacaaaatgactggctcctgacttaacgttctataaatgaatgtgctgaagcaaagtgcccatggtggcggcgaagaagagaaagatgtgttttgttttggactctctgtggtcccttccaatgctgtgggtttccaaccaggggaagggtcccttttgcattgccaagtgccataaccatgagcactactctaccatggttctgcctcctggccaagcaggctggtttgcaagaatgaaatgaatgattctacagctaggacttaaccttgaaatggaaagtcatgcaatcccatttgcaggatctgtctgtgcacatgcctctgtagagagcagcattcccagggaccttggaaacagttggcactgtaaggtgcttgctccccaagacacatcctaaaaggtgttgtaatggtgaaaacgtcttccttctttattgccccttcttatttatgtgaacaactgtttgtctttttttgtatcttttttaaactgtaaagttcaattgtgaaaatgaatatcatgcaaataaattatgcaatttttttttcaaagt

SEQ ID NO: 50292 - DNA, 1901 bp, Artificial Sequence
  derived and/or modified sequence
agcccaccagaggcaaaaagaggacagtctcacggtccccaagcccagagaccactgggaggggagcaagtggggtctggaccaccgaccttagcttcacctcaacccccaagaacacctgccccgttggaggcagactggagctggctgtggattttatttctcaggagaaggaggtgggagctggagagagtgacccgtgcatctttccagcttttccttggccacctgggtggcatgggagctgggagtcagagttctgctgagctgtaggaccaaaggccactggctccgctgcacctgcggactgagacacccacctgctgagtgagacccagcctctgcgtgcttaggggtcccctgctacagggcattgaggtcatattgaacattccagatacctatcattactcgatgctgttgataacagcaagatggctttgaactcagggtcaccaccagctattggaccttactatgaaaaccatggataccaaccggaaaacccctatcccgcacagcccactgtggtccccactgtctacgaggtgcatccggctcagtactacccgtcccccgtgccccagtacgccccgagggtcctgacgcaggcttccaaccccgtcgtctgcacgcagcccaaatccccatccgggacagtgtgcacctcaaagactaagaaagcactgtgcatcaccttgaccctggggaccttcctcgtgggagctgcgctggccgctggcctactctggaagttcatgggcagcaagtgctccaactctgggatagagtgcgactcctcaggtacctgcatcaacccctctaactggtgtgatggcgtgtcacactgccccggcggggaggacgagaatcggtgtgttcgcctctacggaccaaacttcatccttcaggtgtactcatctcagaggaagtcctggcaccctgtgtgccaagacgactggaacgagaactacgggcgggcggcctgcagggacatgggctataagaataatttttactctagccaaggaatagtggatgacagcggatccaccagctttatgaaactgaacacaagtgccggcaatgtcgatatctataaaaaactgtaccacagtgatgcctgttcttcaaaagcagtggtttctttacgctgtatagcctgcggggtcaacttgaactcaagccgccagagcaggattgtgggcggcgagagcgcgctcccgggggcctggccctggcaggtcagcctgcacgtccagaacgtccacgtgtgcggaggctccatcatcacccccgagtggatcgtgacagccgcccactgcgtggaaaaacctcttaacaatccatggcattggacggcatttgcggggattttgagacaatctttcatgttctatggagccggataccaagtagaaaaagtgatttctcatccaaattatgactccaagaccaagaacaatgacattgcgctgatgaagctgcagaagcctctgactttcaacgacctagtgaaaccagtgtgtctgcccaacccaggcatgatgctgcagccagaacagctctgctggatttccgggtggggggccaccgaggagaaagggaagacctcagaagtgctgaacgctgccaaggtgcttctcattgagacacagagatgcaacagcagatatgtctatgacaacctgatcacaccagccatgatctgtgccggcttcctgcaggggaacgtcgattcttgccagggtgacagtggagggcctctggtcacttcgaagaacaatatctggtggctgataggggatacaagctggggttctggctgtgccaaagcttacagaccaggagtgtacgggaatgtgatggtattcacggactggatttatcgacaaatgagg

SEQ ID NO: 50293 - DNA, 454 bp, Artificial Sequence
  derived and/or modified sequence
ctggctcctgagctgctgctgtgaagggaggacctggtgggctaggtaaccgggagctcccccagaaagtcactggaggttgctcaggacttccccacctttactgagtgcttttgaagaagtaggacctgccctgctccgctacagaactactggacaggtcatattgaacattccagatacctatcattactcgatgctgttgataacagcaagatggctttgaactcagggtcaccaccagctattggaccttactatgaaaaccatggataccaaccggaaaacccctatcccgcacagcccactgtggtccccactgtctacgaggtgcatccggctcagtactacccgtcccccgtgccccagtacgccccgagggtcctgacgcaggcttccaaccccgtcgtctgcacgcagcccaaatccccatccgggacagtgtgcacctcaa

SEQ ID NO: 50294 - DNA, 1701 bp, Artificial Sequence
  derived and/or modified sequence
gtgaaagcgggtgtgaggagcgcggcgcggcaggtcatattgaacattccagatacctatcattactcgatgctgttgataacagcaagatggctttgaactcagggtcaccaccagctattggaccttactatgaaaaccatggataccaaccggaaaacccctatcccgcacagcccactgtggtccccactgtctacgaggtgcatccggctcagtactacccgtcccccgtgccccagtacgccccgagggtcctgacgcaggcttccaaccccgtcgtctgcacgcagcccaaatccccatccgggacagtgtgcacctcaaagactaagaaagcactgtgcatcaccttgaccctggggaccttcctcgtgggagctgcgctggccgctggcctactctggaagttcatgggcagcaagtgctccaactctgggatagagtgcgactcctcaggtacctgcatcaacccctctaactggtgtgatggcgtgtcacactgccccggcggggaggacgagaatcggtgtgttcgcctctacggaccaaacttcatccttcaggtgtactcatctcagaggaagtcctggcaccctgtgtgccaagacgactggaacgagaactacgggcgggcggcctgcagggacatgggctataagaataatttttactctagccaaggaatagtggatgacagcggatccaccagctttatgaaactgaacacaagtgccggcaatgtcgatatctataaaaaactgtaccacagtgatgcctgttcttcaaaagcagtggtttctttacgctgtatagcctgcggggtcaacttgaactcaagccgccagagcaggattgtgggcggcgagagcgcgctcccgggggcctggccctggcaggtcagcctgcacgtccagaacgtccacgtgtgcggaggctccatcatcacccccgagtggatcgtgacagccgcccactgcgtggaaaaacctcttaacaatccatggcattggacggcatttgcggggattttgagacaatctttcatgttctatggagccggataccaagtagaaaaagtgatttctcatccaaattatgactccaagaccaagaacaatgacattgcgctgatgaagctgcagaagcctctgactttcaacgacctagtgaaaccagtgtgtctgcccaacccaggcatgatgctgcagccagaacagctctgctggatttccgggtggggggccaccgaggagaaagggaagacctcagaagtgctgaacgctgccaaggtgcttctcattgagacacagagatgcaacagcagatatgtctatgacaacctgatcacaccagccatgatctgtgccggcttcctgcaggggaacgtcgattcttgccagggtgacagtggagggcctctggtcacttcgaagaacaatatctggtggctgataggggatacaagctggggttctggctgtgccaaagcttacagaccaggagtgtacgggaatgtgatggtattcacggactggatttatcgacaaatgagggcagacggctaatccacatggtcttcgtccttgacgtcgttttacaagaaaacaatggggctggttttgcttccccgtgcatgatttactcttagagatgattcagaggtcacttcatttttattaaacagtgaacttgtctggc

SEQ ID NO: 50295 - protein, 402 aa, Artificial Sequence
  derived and/or modified sequence
MRLPRRAALGLLPLLLLLPPAPEAAKKPTPCHRCRGLVDKFNQGMVDTAKKNFGGGNTAWEEKTLSKYESSEIRLLEILEGLCESSDFECNQMLEAQEEHLEAWWLQLKSEYPDLFEWFCVKTLKVCCSPGTYGPDCLACQGGSQRPCSGNGHCSGDGSRQGDGSCRCHMGYQGPLCTDCMDGYFSSLRNETHSICTVRTGLSDSYPPCCLSLGCWRGVGHAWIRGRNTHTQPGYSSRVWIAAFSPACDESCKTCSGLTNRDCGECEVGWVLDEGACVDVDECAAEPPPCSAAQFCKNANGSYTCEECDSSCVGCTGEGPGNCKECISGYAREHGQCADVDECSLAEKTCVRKNENCYNTPGSYVCVCPDGFEETEDACVPPAEAEATEGESPTQLPSREDL

SEQ ID NO: 50296 - DNA, 1577 bp, Artificial Sequence
  derived and/or modified sequence
gggcctcgccggcgccgtcaagtagcctgggggacaggccggcgcggctgggagcgggtgggcggccgggaggccggagcagcacggccgcaggacctggagctccggctgcgtcttcccgcagcgctacccgccatgcgcctgccgcgccgggccgcgctggggctcctgccgcttctgctgctgctgccgcccgcgccggaggccgccaagaagccgacgccctgccaccggtgccgggggctggtggacaagtttaaccaggggatggtggacaccgcaaagaagaactttggcggcgggaacacggcttgggaggaaaagacgctgtccaagtacgagtccagcgagattcgcctgctggagatcctggaggggctgtgcgagagcagcgacttcgaatgcaatcagatgctagaggcgcaggaggagcacctggaggcctggtggctgcagctgaagagcgaatatcctgacttattcgagtggttttgtgtgaagacactgaaagtgtgctgctctccaggaacctacggtcccgactgtctcgcatgccagggcggatcccagaggccctgcagcgggaatggccactgcagcggagatgggagcagacagggcgacgggtcctgccggtgccacatggggtaccagggcccgctgtgcactgactgcatggacggctacttcagctcgctccggaacgagacccacagcatctgcacagtcaggaccggcctctccgattcttacccgccttgctgtctgtctcttggatgttggcgtggcgtgggccacgcatggatccgtggccggaacacgcacacccagccaggctacagctccagagtatggatagctgccttctctccagcctgtgacgagtcctgcaagacgtgctcgggcctgaccaacagagactgcggcgagtgtgaagtgggctgggtgctggacgagggcgcctgtgtggatgtggacgagtgtgcggccgagccgcctccctgcagcgctgcgcagttctgtaagaacgccaacggctcctacacgtgcgaagagtgtgactccagctgtgtgggctgcacaggggaaggcccaggaaactgtaaagagtgtatctctggctacgcgagggagcacggacagtgtgcagatgtggacgagtgctcactagcagaaaaaacctgtgtgaggaaaaacgaaaactgctacaatactccagggagctacgtctgtgtgtgtcctgacggcttcgaagaaacggaagatgcctgtgtgccgccggcagaggctgaagccacagaaggagaaagcccgacacagctgccctcccgcgaagacctgtaatgtgccggacttaccctttaaattattcagaaggatgtcccgtggaaaatgtggccctgaggatgccgtctcctgcagtggacagcggcggggagaggctgcctgctctctaacggttgattctcatttgtcccttaaacagctgcatttcttggttgttcttaaacagacttgtatattttgatacagttctttgtaataaaattgaccattgtaggtaatcaggaggagaa

SEQ ID NO: 50297 - DNA, 1209 bp, Artificial Sequence
  derived and/or modified sequence
atgagactccctagaagagccgcactggggttgctgcccttgctgctcctactccccccagctcccgaggctgccaaaaaacctactccctgtcacagatgtcgcggtcttgtagacaagtttaaccagggtatggtcgacacagccaagaaaaacttcggcggtggaaatactgcgtgggaggagaagactctgtcaaagtacgagagctcagagatccgtctgttagaaatcctcgagggcctctgtgaaagttccgattttgagtgtaaccagatgttagaggctcaggaggagcacctggaagcatggtggctgcaactcaaatccgaataccccgacctttttgaatggttttgcgttaaaactcttaaggtatgctgcagccccggaacctacgggccagattgtttagcctgtcagggcggatcccaacgaccatgcagcggaaatgggcactgcagcggggatggttccagacagggggacgggagttgcaggtgccacatgggctaccaggggcctctgtgcaccgactgcatggacggttactttagctctttgcggaatgagacacattccatctgtactgtcaggaccggactttcggattcttatcccccatgctgcctgtcactcggatgctggcggggtgtggggcacgcctggattcgcggaagaaacactcacacacagccagggtattctagccgggtgtggatcgctgctttcagccccgcatgtgacgagagttgcaaaacttgtagcggccttacaaaccgagattgtggcgagtgcgaggtcggctgggtgctggacgaaggagcctgcgtggacgtggacgaatgcgctgccgagcctccaccttgttctgcggctcaattttgtaaaaatgccaacggaagttatacttgcgaagagtgtgatagcagctgcgtggggtgtactggggagggtcccggaaattgcaaggagtgtatcagcggatacgcaagagagcacggccaatgtgccgacgtagatgaatgtagcttggccgagaaaacttgcgttaggaagaatgagaactgttacaacacccctggttcatatgtctgcgtgtgtcccgatgggttcgaagaaaccgaggatgcgtgtgtgcccccagccgaagcggaggccaccgaaggagagtctccgacccagctccctagtcgggaagacctctag

SEQ ID NO: 50298 - DNA, 1209 bp, Artificial Sequence
  derived and/or modified sequence
atgcgattgccacggcgggcagcactgggcctgctccccttgttactcctgctcccacctgctccagaagctgcaaagaaaccaactccctgtcacagatgccggggtctcgtggacaaattcaatcaaggcatggtggatactgcgaaaaaaaatttcggcggtgggaatactgcgtgggaggagaaaacccttagtaagtacgagagctccgaaatacgcctgcttgaaattctggaggggctttgtgagtcttctgatttcgagtgtaaccagatgcttgaggcacaggaggagcatctggaggcctggtggttgcagctgaagtcagagtaccctgacctattcgagtggttttgtgtgaaaactttaaaagtatgctgctctcctggaacttacggtcctgactgtcttgcatgccagggcggatcgcaaagaccttgctccgggaacggccattgtagcggggatggatcaagacagggggatggatcttgccggtgccacatggggtaccagggccctctctgcaccgattgcatggacggttatttttcttcactgcgtaacgagacccacagcatatgcacggtgcgcacaggactgagcgattcctatcctccatgttgcctatctctgggatgctggaggggggtcggtcacgcttggatccgagggaggaacacccatactcagcccggttacagctctcgagtctggatagccgcattttctccagcttgtgacgaaagttgtaaaacctgtagtgggttgacgaatagggattgcggtgagtgtgaagtgggatgggtgcttgacgaaggtgcctgtgtagatgtcgatgagtgcgctgcagagccacccccgtgctcagctgcccaattttgtaaaaacgccaacggctcatacacctgcgaggaatgtgattcgtcctgcgtgggatgcacaggggaagggcctggcaattgtaaggaatgcatctctggctatgcccgcgaacacggccaatgtgcggacgtagatgagtgcagtctagcggagaagacgtgtgtcagaaagaatgaaaattgttacaacacacctgggtcatacgtgtgcgtgtgccctgatggtttcgaagaaaccgaagacgcctgcgtaccacccgcagaggctgaagccacagagggggagtctcccacccagttgccctctcgagaggatttgtag

SEQ ID NO: 50299 - DNA, 1209 bp, Artificial Sequence
  derived and/or modified sequence
atgaggcttcccagacgcgcggctctgggactgctgcccctattgctcctactgccgccagcaccggaagccgctaaaaaacccacaccatgtcacaggtgccggggcctagttgacaagttcaaccagggtatggtcgacactgcgaaaaagaactttggcggagggaacaccgcttgggaggagaagacactctctaaatacgaatcatccgaaattagactccttgaaatactggaaggcctctgtgaatccagcgatttcgagtgcaatcagatgctcgaggcacaagaagagcatttagaggcttggtggctgcaactgaagtccgagtatcccgatctcttcgaatggttttgtgtgaagaccttgaaagtgtgctgctccccaggaacgtacggacctgattgcctggcctgccaagggggttctcagcggccatgttctggtaacggccattgttctggggatggaagtcgtcaaggagacggatcctgccgctgccacatgggctaccagggccccctttgtactgactgtatggacggatacttctcttccttacgcaacgaaacgcactctatttgtacggtgagaactggattgagtgacagttaccccccatgttgcttgtccctaggatgctggagaggagtaggacacgcttggattagaggccgcaacacacacacacaaccagggtattcttccagagtgtggatcgcagctttttcaccggcctgcgacgagagttgcaagacatgcagcggactgactaatcgagactgcggagagtgtgaggtgggctgggtgttggatgaaggcgcttgcgtggacgttgacgagtgtgcagcagaaccaccaccctgtagtgctgcccagttctgtaagaatgctaatggatcctatacctgtgaagaatgtgattcctcctgtgtaggatgtaccggagaagggccaggaaattgcaaagagtgtattagcgggtatgcgcgcgagcacggccagtgtgctgacgtggatgagtgtagcctggcggaaaaaacctgtgtgagaaagaatgaaaattgctataacaccccggggagctacgtatgtgtatgtccagatggctttgaggaaaccgaagatgcctgcgtaccgcccgccgaggccgaagcaaccgagggtgaatcccctactcagctgccctcaagagaggatttatag

SEQ ID NO: 50300 - DNA, 1209 bp, Artificial Sequence
  derived and/or modified sequence
atgagactgcccagaagagccgccctgggcctgctgcccctgctgctgctgctgccccccgcccccgaggccgccaagaagcccaccccctgccacagatgcagaggcctggtggacaagttcaaccagggcatggtggacaccgccaagaagaacttcggcggcggcaacaccgcctgggaggagaagaccctgagcaagtacgagagcagcgagatcagactgctggagatcctggagggcctgtgcgagagcagcgacttcgagtgcaaccagatgctggaggcccaggaggagcacctggaggcctggtggctgcagctgaagagcgagtaccccgacctgttcgagtggttctgcgtgaagaccctgaaggtgtgctgcagccccggcacctacggccccgactgcctggcctgccagggcggcagccagagaccctgcagcggcaacggccactgcagcggcgacggcagcagacagggcgacggcagctgcagatgccacatgggctaccagggccccctgtgcaccgactgcatggacggctacttcagcagcctgagaaacgagacccacagcatctgcaccgtgagaaccggcctgagcgacagctaccccccctgctgcctgagcctgggctgctggagaggcgtgggccacgcctggatcagaggcagaaacacccacacccagcccggctacagcagcagagtgtggatcgccgccttcagccccgcctgcgacgagagctgcaagacctgcagcggcctgaccaacagagactgcggcgagtgcgaggtgggctgggtgctggacgagggcgcctgcgtggacgtggacgagtgcgccgccgagccccccccctgcagcgccgcccagttctgcaagaacgccaacggcagctacacctgcgaggagtgcgacagcagctgcgtgggctgcaccggcgagggccccggcaactgcaaggagtgcatcagcggctacgccagagagcacggccagtgcgccgacgtggacgagtgcagcctggccgagaagacctgcgtgagaaagaacgagaactgctacaacacccccggcagctacgtgtgcgtgtgccccgacggcttcgaggagaccgaggacgcctgcgtgccccccgccgaggccgaggccaccgagggcgagagccccacccagctgcccagcagagaggacctgtag

SEQ ID NO: 50301 - DNA, 1209 bp, Artificial Sequence
  derived and/or modified sequence
atgagattacctcggagagcggccctgggcctgctcccactgctgttattgctcccacctgctccagaagctgctaaaaagcctaccccatgccaccgctgcagggggttagtggacaagtttaaccaggggatggttgacacagccaagaagaatttcggcgggggcaatacggcatgggaggagaagaccctgtcgaaatacgaatcctccgagatcaggctgctggaaatcctagagggactgtgtgagagttctgacttcgagtgcaatcagatgctcgaggcacaggaggagcatttagaagcttggtggctgcagttgaagtctgagtatcccgatctgtttgagtggttctgcgtaaagaccctcaaggtgtgctgttctcccggaacgtacggcccggattgtttggcatgccaaggtgggtcacagcgcccgtgttccggcaatggtcattgttctggggacggcagcaggcagggagacggatcatgtcgctgccacatgggctatcagggacccctgtgtactgactgcatggatggctattttagttccctgcgaaacgaaacacattctatatgcaccgtgaggacgggtctaagtgactcctacccgccttgctgcctatctcttggttgctggagaggggtgggacacgcttggatccggggacgcaatacacatactcagcccggctacagctcaagagtttggatcgctgccttcagtccggcctgcgacgagtcctgcaagacatgctccggactaactaaccgggactgtggagagtgtgaggttggttgggtgcttgatgagggtgcctgtgtagacgtggacgagtgtgcagccgagccacctccctgtagtgctgcgcagttctgcaagaacgcgaatgggtcctatacatgcgaagagtgcgactctagctgtgtgggctgcactggagagggaccgggaaattgtaaagagtgcatttccggctatgcaagggagcacggtcagtgcgccgatgtggacgagtgctccttggccgaaaaaacatgtgtgcggaagaatgagaactgctataataccccgggtagctatgtttgtgtgtgccctgatggattcgaagagactgaggacgcatgcgtgccccccgctgaagccgaggccactgaaggggagagtccaacccaactgccttcccgcgaagatttatag

SEQ ID NO: 50302 - DNA, 1209 bp, Artificial Sequence
  derived and/or modified sequence
atgaggctgcccaggagagctgccctgggcctgctgcccctgctgctgctgctgcccccagcccctgaggccgccaagaagcccaccccctgccaccgctgccggggcctggtggacaagttcaaccagggcatggtggacacagccaagaagaactttggaggcggcaacacagcctgggaggagaagaccctgagcaaatatgagagcagcgagatccggctgctggagatcctggagggcctgtgtgagagcagtgactttgagtgcaaccagatgctggaggcccaggaggagcacctggaggcctggtggctgcagctgaagtctgagtacccagacctgtttgagtggttctgtgtgaagaccctgaaggtgtgctgcagccctggcacctacggccctgactgcctggcctgccagggcggcagccagaggccctgcagcggaaatggccactgcagcggagatggcagccggcagggagatggcagctgccgctgccacatgggctaccagggccccctgtgcacagactgcatggatggctacttcagcagcctgagaaatgagacccacagcatctgcaccgtgaggacaggcctgagtgacagctacccaccctgctgcctgagcctgggctgctggaggggcgtgggccacgcctggatccggggcaggaacacccacacccagcccggctacagcagccgggtgtggattgctgccttcagccctgcctgtgatgagagctgcaagacctgcagcggcctgaccaacagagactgtggagaatgtgaggtgggctgggtgctggatgaaggagcctgtgtggatgtggatgaatgtgccgctgagcccccaccctgcagcgctgcccagttctgcaagaatgccaacggcagctacacctgtgaagaatgtgacagcagctgtgtgggctgcaccggggagggccctggcaactgcaaggagtgcatcagcggctacgcccgggagcacggccagtgtgctgatgtggatgagtgcagcctggccgagaagacctgtgtgaggaagaatgaaaactgctacaacaccccaggcagctatgtgtgtgtgtgcccagatggctttgaggagacagaagatgcctgtgtgcccccagctgaggccgaggccacagaaggagagagccccacccagctgcccagccgggaggacctgtag

SEQ ID NO: 50303 - DNA, 1209 bp, Artificial Sequence
  derived and/or modified sequence
atgcggctgccccggcgggccgccctgggcctgctgcccctgctgctattactgccaccagctcccgaggcggccaagaagcccacaccttgccatcgctgccgcgggctagtggacaagttcaatcaaggtatggtggacacagccaaaaaaaatttcggaggtggaaacacagcctgggaagagaaaactctctctaaatacgaaagctccgaaattcgcttgttagagattctggagggtttatgcgagtccagtgattttgagtgcaaccaaatgctagaggcccaagaagaacatctcgaggcttggtggcttcaacttaaaagtgagtatcccgacctcttcgagtggttctgcgtcaaaacactcaaggtgtgttgtagtccagggacctatggccctgactgcctcgcatgccaagggggatcccaaaggccctgctctggaaacggacactgtagcggtgatggaagcaggcaaggagacggctcatgccgatgtcatatgggataccaaggcccactctgtacagactgtatggacggatacttcagttccctgcgcaacgagacacattcaatatgtactgtcaggacagggttgtcagacagctatcctccgtgctgcctgtcgctcggatgctggaggggagtaggacacgcatggatccgaggaagaaatactcatacacaacctggttatagctctcgggtgtggattgccgcttttagccctgcgtgtgatgagagctgcaagacttgctctggactcacaaatcgagactgtggcgagtgtgaagtaggttgggtgcttgacgagggtgcttgcgtcgatgttgacgagtgcgctgccgagcctccaccttgttctgctgctcagttctgtaaaaatgccaatggaagttatacatgcgaagaatgtgatagctcatgcgtaggatgtactggagaagggcctgggaactgcaaagaatgcatctccggatacgcaagagagcatgggcagtgtgcagacgtggacgagtgcagccttgctgagaagacatgcgttcgcaagaacgagaactgttacaatacgcccggaagctatgtgtgcgtttgcccagatggcttcgaagaaaccgaagatgcctgtgtgccaccagccgaggcagaggccaccgagggagagagcccaactcaactccctagccgggaagacctgtag

SEQ ID NO: 50304 - RNA, 1209 nt, Artificial Sequence
  derived and/or modified sequence
augcgauugccacggcgggcagcacugggccugcuccccuuguuacuccugcucccaccugcuccagaagcugcaaagaaaccaacucccugucacagaugccggggucucguggacaaauucaaucaaggcaugguggauacugcgaaaaaaaauuucggcggugggaauacugcgugggaggagaaaacccuuaguaaguacgagagcuccgaaauacgccugcuugaaauucuggaggggcuuugugagucuucugauuucgaguguaaccagaugcuugaggcacaggaggagcaucuggaggccuggugguugcagcugaagucagaguacccugaccuauucgagugguuuugugugaaaacuuuaaaaguaugcugcucuccuggaacuuacgguccugacugucuugcaugccagggcggaucgcaaagaccuugcuccgggaacggccauuguagcggggauggaucaagacagggggauggaucuugccggugccacaugggguaccagggcccucucugcaccgauugcauggacgguuauuuuucuucacugcguaacgagacccacagcauaugcacggugcgcacaggacugagcgauuccuauccuccauguugccuaucucugggaugcuggaggggggucggucacgcuuggauccgagggaggaacacccauacucagcccgguuacagcucucgagucuggauagccgcauuuucuccagcuugugacgaaaguuguaaaaccuguaguggguugacgaauagggauugcggugagugugaagugggaugggugcuugacgaaggugccuguguagaugucgaugagugcgcugcagagccacccccgugcucagcugcccaauuuuguaaaaacgccaacggcucauacaccugcgaggaaugugauucguccugcgugggaugcacaggggaagggccuggcaauuguaaggaaugcaucucuggcuaugcccgcgaacacggccaaugugcggacguagaugagugcagucuagcggagaagacgugugucagaaagaaugaaaauuguuacaacacaccugggucauacgugugcgugugcccugaugguuucgaagaaaccgaagacgccugcguaccacccgcagaggcugaagccacagagggggagucucccacccaguugcccucucgagaggauuuguag

SEQ ID NO: 50305 - RNA, 1209 nt, Artificial Sequence
  derived and/or modified sequence
augaggcuucccagacgcgcggcucugggacugcugccccuauugcuccuacugccgccagcaccggaagccgcuaaaaaacccacaccaugucacaggugccggggccuaguugacaaguucaaccaggguauggucgacacugcgaaaaagaacuuuggcggagggaacaccgcuugggaggagaagacacucucuaaauacgaaucauccgaaauuagacuccuugaaauacuggaaggccucugugaauccagcgauuucgagugcaaucagaugcucgaggcacaagaagagcauuuagaggcuugguggcugcaacugaaguccgaguaucccgaucucuucgaaugguuuugugugaagaccuugaaagugugcugcuccccaggaacguacggaccugauugccuggccugccaaggggguucucagcggccauguucugguaacggccauuguucuggggauggaagucgucaaggagacggauccugccgcugccacaugggcuaccagggcccccuuuguacugacuguauggacggauacuucucuuccuuacgcaacgaaacgcacucuauuuguacggugagaacuggauugagugacaguuaccccccauguugcuugucccuaggaugcuggagaggaguaggacacgcuuggauuagaggccgcaacacacacacacaaccaggguauucuuccagaguguggaucgcagcuuuuucaccggccugcgacgagaguugcaagacaugcagcggacugacuaaucgagacugcggagagugugaggugggcuggguguuggaugaaggcgcuugcguggacguugacgagugugcagcagaaccaccacccuguagugcugcccaguucuguaagaaugcuaauggauccuauaccugugaagaaugugauuccuccuguguaggauguaccggagaagggccaggaaauugcaaagaguguauuagcggguaugcgcgcgagcacggccagugugcugacguggaugaguguagccuggcggaaaaaaccugugugagaaagaaugaaaauugcuauaacaccccggggagcuacguauguguauguccagauggcuuugaggaaaccgaagaugccugcguaccgcccgccgaggccgaagcaaccgagggugaauccccuacucagcugcccucaagagaggauuuauag

SEQ ID NO: 50306 - protein, 322 aa, Artificial Sequence
  derived and/or modified sequence
MPSAGLCSCWGGRVLPLLLAYVCYLLLGATIFQLLERQAEAQSRDQFQLEKLRFLENYTCLDQWAMEQFVQVIMEAWVKGVNPKGNSTNPSNWDFGSSFFFAGTVVTTIGYGNLAPSTEAGQVFCVFYALLGIPLNVIFLNHLGTGLRAHLAAIERWEDRPRRSQVLQVLGLALFLTLGTLVILIFPPMVFSHVEGWSFSEGFYFAFITLSTIGFGDYVVGHPLNFITPSGLLPSQEPFQTPHGKPESQQIPGSFQKVSSMNVWPLSGMHSPGLAFPLPDCNIPDQERFRPLHPGAWKFWPLPLPSSNSKWAPMWLGSSAQV

SEQ ID NO: 50307 - DNA, 969 bp, Artificial Sequence
  derived and/or modified sequence
atgccctccgctggcttatgctcatgctgggggggcagggtgctaccactcctcctagcttacgtatgctaccttctccttggtgcaaccatatttcaactcctggagcgacaggctgaggcacaatcacgcgatcagtttcagctggagaaattacggttcttggagaactatacctgtttggaccaatgggctatggagcaattcgtgcaggttatcatggaagcctgggtcaaaggggtgaaccccaaggggaactccacaaacccatcaaactgggactttggaagctcctttttctttgcgggtactgtcgtgactactatcggctacggaaacttggcccccagcacggaggctggacaggtattctgtgtattttacgccttgctgggaattcctctgaacgtcatattcctgaatcacctgggtaccgggttacgagcccacctcgctgctatcgagcgttgggaggatcggcctaggaggagtcaggtcctacaggtgctgggcctcgccctgttccttacccttggaacactagttatactaatcttcccacccatggtttttagccacgtagaaggttggagtttctcagagggtttctattttgcttttatcaccctgagtacgattggatttggcgactacgttgtgggacaccctctgaactttattactccaagcggcctcctgccctcacaggagccgtttcagacacctcacggaaagcctgaatcccaacagattcccggtagcttccagaaggttagctcgatgaacgtttggcctctgtccggcatgcatagtcctggcctcgcgttcccattgccggactgtaacatcccagatcaggagaggttccgccccctccatcccggtgcatggaagttttggccgctgccacttccaagctcaaattcaaagtgggctcctatgtggctcgggtcatccgcccaggtctag

SEQ ID NO: 50308 - DNA, 969 bp, Artificial Sequence
  derived and/or modified sequence
atgcccagcgctggcctgtgcagctgctggggcggccgggtgctgcccctgctgctggcctacgtgtgctacctgctgctgggcgccaccatcttccagctgctggagcggcaggccgaggcccagagccgggaccagttccagctggagaagctgcgcttcctggagaactacacctgcctggaccagtgggccatggagcagtttgtgcaggtgatcatggaggcctgggtgaagggcgtgaaccccaagggcaacagcaccaaccccagcaactgggactttggcagcagcttcttctttgctggcaccgtggtgaccaccatcggctacggcaacctggcccccagcacagaggccggccaggtgttctgtgtgttctacgccctgctgggcatccccctgaatgtcatcttcctgaaccacctgggcaccggcctgcgggcccacctggccgccatcgagcgctgggaggaccggccccggcgcagccaggtgctgcaggtgctgggcctggccctcttcctgaccctgggcaccctggtgatcctgatcttcccccccatggtgttcagccacgtggagggctggagcttcagcgagggcttctactttgccttcatcaccctgagcaccatcggctttggagactatgtggtgggccaccccctgaacttcatcacccccagcggcctgctgcccagccaggagcccttccagacccctcatggcaagccagagagccagcagatccctggcagcttccagaaggtgtcctccatgaatgtgtggcccctgagcggcatgcacagccctggcctggccttccccctgcctgactgcaacatcccagaccaggagcgcttccggcccctgcaccctggggcctggaagttctggcccctgcccctgcccagcagcaacagcaagtgggcccccatgtggctgggcagcagcgcccaggtgtag

SEQ ID NO: 50309 - DNA, 969 bp, Artificial Sequence
  derived and/or modified sequence
atgcccagcgccggcctgtgcagctgctggggcggccgggtgctgcccttgctgctggcgtacgtctgctatctgctgctcggagccacaattttccagctgttggagagacaggccgaagcccagagccgagaccagtttcaattggagaagctgcggtttctcgaaaattatacctgcctagatcagtgggcaatggaacaatttgttcaggtgatcatggaagcctgggtcaaaggtgtcaaccccaaaggaaacagcaccaacccgagcaattgggactttggatctagctttttctttgcgggcaccgtggtgaccactatcggttacggaaacctggccccgtctaccgaagccggacaggtgttctgcgtgttctacgccctactgggcatcccactgaacgtgatcttcttgaaccatttagggacagggctgcgcgctcatctggcggcaatagaacgttgggaggatcgccctcggagaagtcaggtgctgcaggtgctgggcctcgccctattcctcaccttgggcacccttgtgattctcatttttcccccaatggtgtttagccacgtggaggggtggtcctttagtgaaggcttctattttgcctttattaccctttccactattggtttcggtgattacgtggtcgggcatcctctcaatttcataaccccttccggcctgctcccctcccaagagcctttccagacgccacacggaaaaccggagtcacaacaaattcccggctcatttcaaaaggtgtcatcaatgaatgtgtggccccttagcggaatgcactctcccgggttagcgttccctctaccagattgtaatatacctgaccaggaacggtttaggccattgcaccccggagcttggaagttttggcccctgccacttccaagctctaactccaagtgggcgcccatgtggctggggagctctgcgcaggtttag

SEQ ID NO: 50310 - DNA, 1272 bp, Artificial Sequence
  derived and/or modified sequence
atgcccagtgctgggctctgcagctgctggggtggccgggtgctgcccctgctgctggcctatgtctgctacctgctgctcggtgccactatcttccagctgctagagaggcaggcggaggctcagtccagggaccagtttcagttggagaagctgcgcttcctggagaactacacctgcctggaccagtgggccatggagcagtttgtgcaggtcatcatggaagcctgggtgaaaggtgtgaaccccaaaggcaactctaccaaccccagcaactgggactttggcagcagtttcttctttgcaggcacagtcgtcactaccataggatatgggaacctggcacccagcacagaggcaggtcaggtcttctgtgtcttctatgccctgttgggcatcccgcttaacgtgatcttcctcaaccacctgggcacagggctgcgtgcccatctggccgccattgaaagatgggaggaccgtcccaggcgctcccaggtactgcaagtcctgggcctggctctgttcctgaccctggggacgctggtcattctcatcttcccacccatggtcttcagccatgtggagggctggagcttcagcgagggcttctactttgctttcatcactctcagcaccattggctttggggactatgttgttggccacccccttaacttcatcactccctctgggctcctgccttctcaagagcctttccaaacaccccatgggaagccagagagccagcagatcccaggatccttccagaaagtgagctccatgaacgtctggcctctctcaggaatgcattctccaggtctggcctttcccctgccagactgcaacatccctgaccaggagagatttagaccactccatcccggggcctggaaattttggcctttgcctctcccatcatccaacagcaagtgggctcctatgtggctgggttcctctgcacaggtctgaggcaaggctgtggagccaaggcggctccaggcaggagacccaggagaggctctacagcagcaagaggagtccaagtcacaccccaggacttccccatatccaagaaaggactgggaagctgaggacccacggactcttcacacagcctagacgcttcctccactccaggtagagggatttcgggggccttctcagaagcaaggagtggacaagcctcttggttaaggctcctcttacctcccaagctcatggacaagtggcaatcagctggggtccctcttttggggtacaaaggaaaggaca

SEQ ID NO: 50311 - DNA, 969 bp, Artificial Sequence
  derived and/or modified sequence
atgccatccgccggactttgcagctgctgggggggaagagtcctgcccctcctgctcgcctatgtctgttacctactcctgggagcaaccatttttcagctcctggagcggcaggctgaggcccaaagcagggatcaattccagttggagaaacttcgctttctagaaaactacacttgccttgatcaatgggctatggagcagtttgtgcaggtgattatggaggcctgggtgaagggagttaaccctaaaggcaactctaccaatccaagtaattgggatttcgggtctagcttcttttttgccggaactgtggtgacaacaattggctatggcaacctggccccttccactgaggccggtcaggtgttctgcgtcttttacgccctccttggcataccactcaacgtgatcttcctcaatcaccttggcaccggtttgcgcgcacacctcgcggctatcgaacggtgggaagaccgtcccaggagatcccaggtactgcaggtattgggattagctctgtttctgactctggggacgctggtgatcctcatcttccccccaatggtgttcagccacgtggagggatggagcttctcagaaggcttttactttgcctttattactctctcaactatcgggttcggagattatgtggtaggccacccgcttaatttcattacacctagcggcctgctgcccagccaggagcccttccaaaccccacacggcaagcccgagtcccagcagatccctgggagttttcagaaggtgtctagcatgaatgtctggcccctgagtggaatgcattctccaggcctggctttccctcttcccgattgcaatatccctgaccaggaacggttcaggcctcttcacccgggagcatggaagttttggcctcttccactgccaagcagtaatagtaaatgggccccaatgtggcttggaagttcagcgcaggtctag

SEQ ID NO: 50312 - DNA, 969 bp, Artificial Sequence
  derived and/or modified sequence
atgcccagcgccggcctgtgcagctgctggggcggcagagtgctgcccctgctgctggcctacgtgtgctacctgctgctgggcgccaccatcttccagctgctggagagacaggccgaggcccagagcagagaccagttccagctggagaagctgagattcctggagaactacacctgcctggaccagtgggccatggagcagttcgtgcaggtgatcatggaggcctgggtgaagggcgtgaaccccaagggcaacagcaccaaccccagcaactgggacttcggcagcagcttcttcttcgccggcaccgtggtgaccaccatcggctacggcaacctggcccccagcaccgaggccggccaggtgttctgcgtgttctacgccctgctgggcatccccctgaacgtgatcttcctgaaccacctgggcaccggcctgagagcccacctggccgccatcgagagatgggaggacagacccagaagaagccaggtgctgcaggtgctgggcctggccctgttcctgaccctgggcaccctggtgatcctgatcttcccccccatggtgttcagccacgtggagggctggagcttcagcgagggcttctacttcgccttcatcaccctgagcaccatcggcttcggcgactacgtggtgggccaccccctgaacttcatcacccccagcggcctgctgcccagccaggagcccttccagaccccccacggcaagcccgagagccagcagatccccggcagcttccagaaggtgagcagcatgaacgtgtggcccctgagcggcatgcacagccccggcctggccttccccctgcccgactgcaacatccccgaccaggagagattcagacccctgcaccccggcgcctggaagttctggcccctgcccctgcccagcagcaacagcaagtgggcccccatgtggctgggcagcagcgcccaggtgtag

SEQ ID NO: 50313 - protein, 294 aa, Artificial Sequence
  derived and/or modified sequence
MPSAGLCSCWGGRVLPLLLAYVCYLLLGATIFQLLERQAEAQSRDQFQLEKLRFLENYTCLDQWAMEQFVQVIMEAWVKGVNPKGNSTNPSNWDFGSSFFFAGTVVTTIGYGNLAPSTEAGQVFCVFYALLGIPLNVIFLNHLGTGLRAHLAAIERWEDRPRRSQVLQVLGLALFLTLGTLVILIFPPMVFSHVEGWSFSEGFYFAFITLSTIGFGDYVVGTDPSKHYISVYRSLAAIWILLGLAWLALILPLGPLLLHRCCQLWLLSRGLGVKDGAASDPSGLPRPQKIPISA

SEQ ID NO: 50314 - DNA, 885 bp, Artificial Sequence
  derived and/or modified sequence
atgccttcagccggtctttgctcctgctggggaggccgggtcttgcctctgctgctggcttacgtgtgttacttgttgttgggtgcaacgattttccagctgctggagcgacaggccgaagcacagtcccgggatcagtttcaactggagaagctccggtttttggaaaactatacttgcctcgaccagtgggcaatggagcagtttgtgcaagtaataatggaggcctgggtgaagggagtgaatccaaaaggaaattctaccaacccaagcaattgggattttggaagctcctttttctttgccggaactgttgtgacgactatcggttatggaaatttagcaccatcaactgaggcaggccaggttttctgtgttttttatgccctgctggggataccactgaacgtcatattcttaaaccatttaggcacaggcctgcgcgcccacctggctgccatcgaacgctgggaagatcgccccagaaggtcacaggtacttcaagtcctcgggctggcgctctttctcaccctggggaccctcgtaattctcatctttccccctatggtgttctcacacgtggaggggtggagtttctctgaggggttctactttgctttcattaccctcagcactatcgggtttggggattacgtggtgggcactgaccctagtaaacactatatttcggtgtacaggtctctagcagctatttggatcttattgggattggcatggttggcgttaatcctccccctgggccctttactcctgcaccggtgctgccagctgtggctcctctcgagaggccttggagttaaggatggcgcggcttcagacccgagcggcctgccccggccacagaaaattcccatctccgcatag

SEQ ID NO: 50315 - DNA, 885 bp, Artificial Sequence
  derived and/or modified sequence
atgcccagcgctggcctgtgcagctgctggggcggccgggtgctgcccctgctgctggcctacgtgtgctacctgctgctgggcgccaccatcttccagctgctggagcggcaggccgaggcccagagccgggaccagttccagctggagaagctgcgcttcctggagaactacacctgcctggaccagtgggccatggagcagtttgtgcaggtgatcatggaggcctgggtgaagggcgtgaaccccaagggcaacagcaccaaccccagcaactgggactttggcagcagcttcttctttgctggcaccgtggtgaccaccatcggctacggcaacctggcccccagcacagaggccggccaggtgttctgtgtgttctacgccctgctgggcatccccctgaatgtcatcttcctgaaccacctgggcaccggcctgcgggcccacctggccgccatcgagcgctgggaggaccggccccggcgcagccaggtgctgcaggtgctgggcctggccctcttcctgaccctgggcaccctggtgatcctgatcttcccccccatggtgttcagccacgtggagggctggagcttcagcgagggcttctactttgccttcatcaccctgagcaccatcggctttggagactatgtggtgggcacagaccccagcaagcactacatctctgtgtaccgcagcctggccgccatctggatcctgctgggcctggcctggctggccctgatcctgcccctgggccccctgctgctgcaccgctgctgccagctgtggctgctgagccggggcctgggcgtgaaggatggagctgccagtgaccccagcggcctgccccggccccagaagatccccatcagcgcctag

SEQ ID NO: 50316 - DNA, 885 bp, Artificial Sequence
  derived and/or modified sequence
atgcccagcgccggcctgtgcagctgctggggcggccgggtgctgccccttttgttagcctatgtgtgctacctcctcctgggagctacaatctttcagctactggagcggcaagctgaggctcaaagccgggaccagtttcagctcgagaaactcaggtttctggagaattacacctgtctggaccagtgggccatggagcaattcgttcaggtgattatggaagcctgggttaaaggcgtgaatcctaaaggtaatagcacaaacccgtctaactgggatttcggcagctcctttttttttgcggggactgtagtgaccactattggctacggcaacctggcaccttccacagaggctgggcaagtattctgcgtcttttacgccctgttgggcatccctctgaatgttatctttctcaatcatcttgggaccggtttaagggcgcaccttgcggcgatagagcgctgggaagaccggccacgaagatcccaggtccttcaggttctgggactggccttattcctcacccttggaacgctggtgatcctgatcttccctcctatggttttttcacatgtggaaggatggtctttctccgagggattctacttcgccttcattactctgagcactattgggttcggcgactacgtagttggtacagatcctagtaaacattatatcagcgtgtacagatcccttgcagcgatatggatcctgctaggcctggcgtggttagctctgatattgcctctcgggcccctgttgctgcacagatgttgccagctatggctcctgagtcggggcctaggtgtgaaagatggcgccgcttctgacccaagcggactgcctcgcccacaaaagatccccatctccgcatag

SEQ ID NO: 50317 - DNA, 981 bp, Artificial Sequence
  derived and/or modified sequence
tctcccccatagccagccccacggccctggcagggtcctggccacagcatgcccagtgctgggctctgcagctgctggggtggccgggtgctgcccctgctgctggcctatgtctgctacctgctgctcggtgccactatcttccagctgctagagaggcaggcggaggctcagtccagggaccagtttcagttggagaagctgcgcttcctggagaactacacctgcctggaccagtgggccatggagcagtttgtgcaggtcatcatggaagcctgggtgaaaggtgtgaaccccaaaggcaactctaccaaccccagcaactgggactttggcagcagtttcttctttgcaggcacagtcgtcactaccataggatatgggaacctggcacccagcacagaggcaggtcaggtcttctgtgtcttctatgccctgttgggcatcccgcttaacgtgatcttcctcaaccacctgggcacagggctgcgtgcccatctggccgccattgaaagatgggaggaccgtcccaggcgctcccaggtactgcaagtcctgggcctggctctgttcctgaccctggggacgctggtcattctcatcttcccacccatggtcttcagccatgtggagggctggagcttcagcgagggcttctactttgctttcatcactctcagcaccattggctttggggactatgttgttggcacagaccccagcaagcattatatctcagtgtatcggagcctggcagccatctggatcctcctgggcctggcgtggctggcgctgatcctcccactgggccccctgcttctgcacagatgctgccagctctggctgctcagtaggggcctcggcgtcaaggatggggcagcctctgaccccagtgggctccccaggcctcagaagatccccatctctgcatgaggcccccggggggggcccagaaacccctttcatcctccccagtcccac

SEQ ID NO: 50318 - DNA, 885 bp, Artificial Sequence
  derived and/or modified sequence
atgccttcagccggattgtgcagctgctggggaggccgtgtccttccattactcttggcctacgtgtgctacctgctactgggggcaacaatctttcagttgctggagcgtcaggccgaagcccagagcagagaccaatttcaattggaaaaattgaggtttctggagaactatacctgcctggaccagtgggccatggaacagttcgtgcaggtgatcatggaggcctgggtgaagggagtgaatccgaaagggaatagcaccaacccgtcaaactgggacttcggaagctccttcttctttgctggcacagtggtgaccactatcggatacggcaacctggcgcctagcacggaggccggtcaggtgttctgcgttttttacgccctcttggggatcccactcaacgtaattttcctgaatcatttgggtactggccttagagctcatctcgccgctattgaacgctgggaagatcgacccaggcgaagtcaggttctccaagtgttggggctggccctctttctcaccttgggtacactcgtcatcctgatcttcccccctatggtgttctcgcacgtcgaggggtggtcgttttcggaagggttttatttcgcctttattacactgtcaacaatcgggtttggggactatgtagttggaaccgacccgagcaaacattacatttcagtttatcggtctttggccgcaatctggatcctgcttggcctagcctggttggcactgattctgcccctcggccctttgttattacatcgatgctgccagctttggctcctgagccgaggcctcggcgttaaggacggggcagctagtgaccccagtggactcccgcgtccccagaagataccgatttctgcgtag

SEQ ID NO: 50319 - DNA, 885 bp, Artificial Sequence
  derived and/or modified sequence
atgcccagcgccggcctgtgcagctgctggggcggcagagtgctgcccctgctgctggcctacgtgtgctacctgctgctgggcgccaccatcttccagctgctggagagacaggccgaggcccagagcagagaccagttccagctggagaagctgagattcctggagaactacacctgcctggaccagtgggccatggagcagttcgtgcaggtgatcatggaggcctgggtgaagggcgtgaaccccaagggcaacagcaccaaccccagcaactgggacttcggcagcagcttcttcttcgccggcaccgtggtgaccaccatcggctacggcaacctggcccccagcaccgaggccggccaggtgttctgcgtgttctacgccctgctgggcatccccctgaacgtgatcttcctgaaccacctgggcaccggcctgagagcccacctggccgccatcgagagatgggaggacagacccagaagaagccaggtgctgcaggtgctgggcctggccctgttcctgaccctgggcaccctggtgatcctgatcttcccccccatggtgttcagccacgtggagggctggagcttcagcgagggcttctacttcgccttcatcaccctgagcaccatcggcttcggcgactacgtggtgggcaccgaccccagcaagcactacatcagcgtgtacagaagcctggccgccatctggatcctgctgggcctggcctggctggccctgatcctgcccctgggccccctgctgctgcacagatgctgccagctgtggctgctgagcagaggcctgggcgtgaaggacggcgccgccagcgaccccagcggcctgcccagaccccagaagatccccatcagcgcctag

SEQ ID NO: 50320 - protein, 262 aa, Artificial Sequence
  derived and/or modified sequence
MPSAGLCSCWGGRVLPLLLAYVCYLLLGATIFQLLERQAEAQSRDQFQLEKLRFLENYTCLDQWAMEQFVQVIMEAWVKGVNPKGNSTNPSNWDFGSSFFFAGTVVTTIGYGNLAPSTEAGQVFCVFYALLGIPLNVIFLNHLGTGLRAHLAAIERWEDRPRRSQVLQVLGLALFLTLGTLVILIFPPMVFSHVEGWSFSEGFYFAFITLSTIGFGDYVVGLRQGCGAKAAPGRRPRRGSTAARGVQVTPQDFPISKKGLGS

SEQ ID NO: 50321 - protein, 197 aa, Artificial Sequence
  derived and/or modified sequence
MEQFVQVIMEAWVKGVNPKGNSTNPSNWDFGSSFFFAGTVVTTIGYGNLAPSTEAGQVFCVFYALLGIPLNVIFLNHLGTGLRAHLAAIERWEDRPRRSQVLQVLGLALFLTLGTLVILIFPPMVFSHVEGWSFSEGFYFAFITLSTIGFGDYVVGLRQGCGAKAAPGRRPRRGSTAARGVQVTPQDFPISKKGLGS

SEQ ID NO: 50322 - DNA, 789 bp, Artificial Sequence
  derived and/or modified sequence
atgccatcggccggactgtgcagttgttggggcgggcgtgttctccccctcctgctggcctacgtctgttacctcctcctgggtgcaactatcttccagctcttagagcgccaggccgaggcccagagccgcgaccagtttcaattggaaaaactacggttcctggagaactacacttgtttagaccagtgggcgatggaacagtttgtacaggtaattatggaggcctgggtgaagggggtcaatccaaaagggaattctactaatccctcgaactgggattttggttcaagtttcttttttgcaggtaccgtggtaaccacaatcgggtacggtaacctggctccctctactgaagccggccaggttttttgtgtgttctacgcacttcttggaatacccctgaatgtcatattcctcaatcacctcggaacaggactccgggcccacctagcggcaattgaacgatgggaggaccggccacgtaggagtcaggtcctccaggtgctgggcctggcccttttcctgaccttaggtaccctggttatcttgatcttcccaccaatggtcttttcacatgttgaagggtggtcattcagcgagggattctattttgccttcattactttgagcacaatcggcttcggagactacgtggtgggtctgaggcaggggtgcggcgccaaagccgcccctggccgtcggccacgcaggggcagcactgcagcacgaggggtccaggtcaccccccaggactttcccatctcgaagaagggtctgggatcatag

SEQ ID NO: 50323 - DNA, 789 bp, Artificial Sequence
  derived and/or modified sequence
atgcccagcgctggcctgtgcagctgctggggcggccgggtgctgcccctgctgctggcctacgtgtgctacctgctgctgggcgccaccatcttccagctgctggagcggcaggccgaggcccagagccgggaccagttccagctggagaagctgcgcttcctggagaactacacctgcctggaccagtgggccatggagcagtttgtgcaggtgatcatggaggcctgggtgaagggcgtgaaccccaagggcaacagcaccaaccccagcaactgggactttggcagcagcttcttctttgctggcaccgtggtgaccaccatcggctacggcaacctggcccccagcacagaggccggccaggtgttctgtgtgttctacgccctgctgggcatccccctgaatgtcatcttcctgaaccacctgggcaccggcctgcgggcccacctggccgccatcgagcgctgggaggaccggccccggcgcagccaggtgctgcaggtgctgggcctggccctcttcctgaccctgggcaccctggtgatcctgatcttcccccccatggtgttcagccacgtggagggctggagcttcagcgagggcttctactttgccttcatcaccctgagcaccatcggctttggagactatgtggtgggcctgcggcagggctgtggggccaaggccgcccctggccggcggccccggcggggcagcacagctgcccggggcgtgcaggtgaccccccaggacttccccatcagcaagaagggcctgggcagctag

SEQ ID NO: 50324 - DNA, 789 bp, Artificial Sequence
  derived and/or modified sequence
atgcccagcgccggcctgtgcagctgctggggcggccgggtgctgccactactgctcgcctatgtgtgttatctactgctgggcgctaccattttccagctgttggaaaggcaggctgaagcgcagtcaagggaccagtttcaactggagaagctgcggtttctggaaaactacacctgcctggaccaatgggcaatggagcaatttgtgcaagtgatcatggaggcctgggtaaaaggcgtcaatcctaaggggaactcaaccaaccccagcaactgggactttggctcaagctttttttttgccggcacagtggtgaccaccatcgggtatggcaacctggcaccaagcacagaagctgggcaagtcttctgcgtattttacgcactgcttgggatcccattgaacgtcattttcctcaatcacctgggaaccgggctccgcgcacacctggctgccatcgagcggtgggaagataggcccagaagatctcaagttctccaggttctgggccttgctttgttcctgacactggggaccctcgttatcctgatatttcctcctatggtgttctcccacgtggaaggctggagctttagtgagggcttttatttcgctttcatcacactcagtacaatcggattcggagactatgtcgtcgggctgcgccaaggatgtggagcgaaggccgcgcctgggcgcaggccacgtcgaggctctaccgccgcacgcggagtgcaggtgactccacaggactttccgatcagcaagaaaggactgggttcctag

SEQ ID NO: 50325 - DNA, 789 bp, Artificial Sequence
  derived and/or modified sequence
atgcccagtgctgggctctgcagctgctggggtggccgggtgctgcccctgctgctggcctatgtctgctacctgctgctcggtgccactatcttccagctgctagagaggcaggcggaggctcagtccagggaccagtttcagttggagaagctgcgcttcctggagaactacacctgcctggaccagtgggccatggagcagtttgtgcaggtcatcatggaagcctgggtgaaaggtgtgaaccccaaaggcaactctaccaaccccagcaactgggactttggcagcagtttcttctttgcaggcacagtcgtcactaccataggatatgggaacctggcacccagcacagaggcaggtcaggtcttctgtgtcttctatgccctgttgggcatcccgcttaacgtgatcttcctcaaccacctgggcacagggctgcgtgcccatctggccgccattgaaagatgggaggaccgtcccaggcgctcccaggtactgcaagtcctgggcctggctctgttcctgaccctggggacgctggtcattctcatcttcccacccatggtcttcagccatgtggagggctggagcttcagcgagggcttctactttgctttcatcactctcagcaccattggctttggggactatgttgttggtctgaggcaaggctgtggagccaaggcggctccaggcaggagacccaggagaggctctacagcagcaagaggagtccaagtcacaccccaggacttccccatatccaagaaaggactgggaagctga

SEQ ID NO: 50326 - DNA, 889 bp, Artificial Sequence
  derived and/or modified sequence
cagccttcaagggtgaagacgctgggggcggccgagagagcccactggggcctggacagagtgagcacacctatccgatttagcccagaaacatctatccaacttggagacagagagagagacatgaagcactcaggagaacctgctgctagagaggcaggcggaggctcagtccagggaccagtttcagttggagaagctgcgcttcctggagaactacacctgcctggaccagtgggccatggagcagtttgtgcaggtcatcatggaagcctgggtgaaaggtgtgaaccccaaaggcaactctaccaaccccagcaactgggactttggcagcagtttcttctttgcaggcacagtcgtcactaccataggatatgggaacctggcacccagcacagaggcaggtcaggtcttctgtgtcttctatgccctgttgggcatcccgcttaacgtgatcttcctcaaccacctgggcacagggctgcgtgcccatctggccgccattgaaagatgggaggaccgtcccaggcgctcccaggtactgcaagtcctgggcctggctctgttcctgaccctggggacgctggtcattctcatcttcccacccatggtcttcagccatgtggagggctggagcttcagcgagggcttctactttgctttcatcactctcagcaccattggctttggggactatgttgttggtctgaggcaaggctgtggagccaaggcggctccaggcaggagacccaggagaggctctacagcagcaagaggagtccaagtcacaccccaggacttccccatatccaagaaaggactgggaagctgaggacccacggactcttcacacagcctagacgcttcctccactccaggtagaggg

SEQ ID NO: 50327 - DNA, 789 bp, Artificial Sequence
  derived and/or modified sequence
atgccatccgctggactgtgcagttgctggggcggtagagttctgccacttctgcttgcatatgtatgctatctgctgctgggtgctacgatattccagctcttagaacgacaagccgaggctcagtctagggatcagtttcagctggaaaaactcaggttcctcgagaactatacctgcttggatcaatgggcgatggagcagtttgtccaggtgatcatggaggcgtgggtgaaaggggtcaaccccaaaggtaactctaccaatccgtctaactgggatttcggctcctccttttttttcgctggtacagtagtgaccaccatcggctatggtaacttggcgccatcaacggaggccggacaggtgttttgtgtattttacgccctcctgggaattccactcaacgtaatttttctgaaccacctgggaacggggctaagagcccatcttgctgcaatagaacggtgggaagacagacccagaaggtcacaggtgttgcaggtgttgggcctagccctgtttctcactctgggtaccctcgtcatcttgatattcccccctatggttttttcccacgtggagggctggagcttctccgagggattctacttcgcttttatcactctcagcactattggttttggcgattatgtcgtgggactcaggcaagggtgtggggcaaaagccgcacctggaaggaggcctcggagagggagcactgctgcccgtggagtgcaggtgacgcctcaggattttcccatcagcaagaaggggctcggcagttag

SEQ ID NO: 50328 - DNA, 789 bp, Artificial Sequence
  derived and/or modified sequence
atgcccagcgccggcctgtgcagctgctggggcggcagagtgctgcccctgctgctggcctacgtgtgctacctgctgctgggcgccaccatcttccagctgctggagagacaggccgaggcccagagcagagaccagttccagctggagaagctgagattcctggagaactacacctgcctggaccagtgggccatggagcagttcgtgcaggtgatcatggaggcctgggtgaagggcgtgaaccccaagggcaacagcaccaaccccagcaactgggacttcggcagcagcttcttcttcgccggcaccgtggtgaccaccatcggctacggcaacctggcccccagcaccgaggccggccaggtgttctgcgtgttctacgccctgctgggcatccccctgaacgtgatcttcctgaaccacctgggcaccggcctgagagcccacctggccgccatcgagagatgggaggacagacccagaagaagccaggtgctgcaggtgctgggcctggccctgttcctgaccctgggcaccctggtgatcctgatcttcccccccatggtgttcagccacgtggagggctggagcttcagcgagggcttctacttcgccttcatcaccctgagcaccatcggcttcggcgactacgtggtgggcctgagacagggctgcggcgccaaggccgcccccggcagaagacccagaagaggcagcaccgccgccagaggcgtgcaggtgaccccccaggacttccccatcagcaagaagggcctgggcagctag

SEQ ID NO: 50329 - protein, 187 aa, Artificial Sequence
  derived and/or modified sequence
MAYSTVQRVALASGLVLALSLLLPKAFLSRGKRQEPPPTPEGYPEETYPIYDLSDCIKRRQETILVDYPDPKELSAEEIAERMGMIEEEESDHLGWESLPTDPRAQEDNSVTSCDPKPETCSCCFHEDEDPAVLAENAGFSADSYPEQEETTKEEWSQDFKDEGLGISTDKAYTGSMLRKRNPQGLE

SEQ ID NO: 50330 - DNA, 564 bp, Artificial Sequence
  derived and/or modified sequence
atggcctacagcaccgtgcagagagtggccctggccagcggcctggtgctggccctgagcctgctgctgcccaaggccttcctgagcagaggcaagagacaggagcccccccccacccccgagggctaccccgaggagacctaccccatctacgacctgagcgactgcatcaagagaagacaggagaccatcctggtggactaccccgaccccaaggagctgagcgccgaggagatcgccgagagaatgggcatgatcgaggaggaggagagcgaccacctgggctgggagagcctgcccaccgaccccagagcccaggaggacaacagcgtgaccagctgcgaccccaagcccgagacctgcagctgctgcttccacgaggacgaggaccccgccgtgctggccgagaacgccggcttcagcgccgacagctaccccgagcaggaggagaccaccaaggaggagtggagccaggacttcaaggacgagggcctgggcatcagcaccgacaaggcctacaccggcagcatgctgagaaagagaaacccccagggcctggagtag

SEQ ID NO: 50331 - DNA, 564 bp, Artificial Sequence
  derived and/or modified sequence
atggcttatagcactgtccagcgcgtggcgcttgcctcagggcttgttctagccctgagcttgctgcttccaaaggctttcttatctagaggcaagcggcaagaaccaccacctacccccgaaggctatccagaggaaacttaccctatttatgatttatccgactgtatcaagcgtcgacaggagactatcctcgtggattaccctgatcccaaagaactgagtgcagaggaaatcgctgagaggatgggcatgatcgaggaggaagagtctgatcacctcgggtgggagagtctgcccaccgaccctcgagcccaagaggataactccgtgaccagctgcgaccccaagccagaaacttgctcatgctgttttcatgaggatgaggaccccgctgttctggccgaaaacgcaggatttagtgctgacagctaccctgaacaggaggagacgaccaaggaggaatggagtcaggatttcaaagacgaggggctgggtatatctaccgacaaggcgtacacaggctccatgctcagaaagcgaaatccccagggcctggaatag

SEQ ID NO: 50332 - DNA, 564 bp, Artificial Sequence
  derived and/or modified sequence
atggcctacagcacagtgcagagggtggccctggccagcggcctggtgctggccctgagcctgctgctgcccaaggccttcctgagccggggcaagaggcaggagcccccacccaccccagagggctacccagaggagacctaccccatctatgacctgagtgactgcatcaagaggcggcaggagaccatcctggtggactacccagaccccaaggagctgtctgctgaggagattgctgagaggatgggcatgattgaggaggaggagagtgaccacctgggctgggagagcctgcccacagacccccgggcccaggaggacaacagcgtgaccagctgtgaccccaagccagagacctgcagctgctgcttccatgaagatgaagatcctgctgtgctggccgagaatgccggcttctctgctgacagctacccagagcaggaggagaccaccaaggaggagtggagccaggacttcaaggatgagggcctgggcatcagcacagacaaggcctacacaggctccatgctgaggaagaggaacccccagggcctggagtag

SEQ ID NO: 50333 - DNA, 564 bp, Artificial Sequence
  derived and/or modified sequence
atggcctacagcaccgtgcagcgggtggccctggccagcggcctggtcttagcgctgagcctcctgcttccaaaagcatttctgtctcgaggcaaacggcaggaacctcctccgacccctgaagggtatccggaggaaacatatcccatttacgacctttctgactgcataaagagaagacaggagacgatccttgtagattatcccgaccccaaggagctgtctgctgaagagatagctgagcggatgggtatgattgaagaggaggaaagtgaccacctgggttgggagtcactgcccaccgaccctcgcgcccaggaagataactcagtgacatcctgcgaccccaagccagagacatgctcatgctgttttcatgaggatgaagaccccgcggtgttggcagaaaatgccggattttcagccgattcataccctgagcaggaagagaccaccaaagaggagtggagtcaggactttaaggatgaaggcctgggcataagtaccgacaaggcttataccggttctatgttgaggaaacgaaacccgcagggtttggaatag

SEQ ID NO: 50334 - DNA, 564 bp, Artificial Sequence
  derived and/or modified sequence
atggcctactctacagtgcaacgagttgccctggcctccgggctggtcctggctttgagccttctgcttcctaaagctttcctaagtcggggaaaacgtcaagagccccctcctactcccgagggctatccagaggagacatatcctatatatgacttatctgattgtataaagaggcggcaggaaaccattcttgtcgattaccccgatccgaaggagctgagtgccgaagagatagccgaacggatgggaatgatcgaagaagaagagtcagaccacctcgggtgggaaagtctgcctaccgatcctcgcgcacaggaggataactcggtcacctcttgcgaccccaagcccgagacatgctcttgttgctttcatgaggatgaggatcctgccgtgctagccgagaatgccggtttctccgctgacagctatccagagcaggaagagactacaaaagaagaatggtcccaggatttcaaggatgagggcctgggcatttccaccgataaagcctacacgggctccatgcttagaaagcgcaacccgcaggggctcgagtag

SEQ ID NO: 50335 - DNA, 5223 bp, Artificial Sequence
  derived and/or modified sequence
ggttccggttccggttccggctggcgtctgcacctgcgaccaccgtgagcagtcatggcgtactccacagtgcagagagtcgctctggcttctgggcttgtcctggctctgtcgctgctgctgcccaaggccttcctgtcccgcgggaagcggcaggagccgccgccgacacctgaaggttaccctgaagagacttacccaatttatgacctttcagactgtatcaagcgtaggcaagaaacaatcttggtggattaccctgacccaaaagaactttctgctgaagaaatagctgaaagaatgggaatgatagaagaggaagaatcagatcatttgggttgggaaagtctgcccactgaccccagagcccaggaagataattctgttacctcgtgtgatccaaagccagaaacatgttcctgctgttttcatgaagacgaggatcctgctgtcttggcagagaatgctggattcagtgcagatagctaccctgagcaagaggaaaccaccaaagaagagtggtcccaagactttaaagatgaagggttgggcatcagcaccgataaagcatatacaggcagcatgctgaggaagcgtaacccccagggtttagagtgaaaacagccagtctgaagtatccattactcaagtcccaaggtgacctctctctcctcagatttccttcttggccctgtgccctgcactttcttcactgtgttcaagtgtcatagctatcaggccactatcatggatatcatgtatccttcctggtgctcacacacctgtcaccttgtaaaacacggacattagtgtgaacacaggacagcttcgctctttctcttcctgcctttcctctatcagagaagttgatccattaagtaattatgtttggtctattgtaattacagatgggaccactcaggggcaaaggtctgactcttcctggtaggtgtaacagatagttcacctgtgaacgaacatcagcttacagatgatgaggacttaaggttgcaagaatgaagatttcagactccaagatcccttattctttgggccttgagcaggttagtagtcccctggtgagaagagaacattttgtttgtggggctaatgggcccagaggagggtaagactctgctgtctaagctgaagcctcttcctcgcagcgagggtcttcctaggaacattgatgctgcctcagacatcctcttttctccagagtagggaagactcccactgatctgagaatgagcccagaggcttgtttggggactgttttactctgatactacctggatatctagcttcctttacccctgttctgcttaacagaactgccaagcccagaagtacctttgcactcctggttttcagtggacagaggaagctttagatagagactttagaccctgccctgcagagtcaagacttgaggccattgaagctgcaggaagccctgcccagggatggtcctgccatgaggaggctgcaaccctataagagggctcaagattgtgaattctgctcctgccatgaggagctcagaaggccaggaagccagcaataggggagagaatctgtgtgcttatggacagtccttacctaaagctgtttctgaatgttgcaccctttgagaaatttcttctcagaaccataaattgaaacaaatgaggactgatcttgtatacaaagtgccaactcaagagggaagttggagtatgtctgttgcagagaaccaatatagcagtgcccaggggtagagaccatgtgttccatactcggatatttgggtctttttgagagagctggggaaagtagcagcaactagattaagactgggaggattttgaccaaactaaaggccttttctccttactgcatctgacgtgtgtcttcttgagacaagatagcacccatgaattacatcatgaggtatgcgtgaattcagtttacatgtaagacctgagagttcgaagagggcacattcccaaagacattcccagtcatgaaatgtagaagactggaaaattaagacattatgtaaaggtagatatggcttttagagttacattatgcttggcatgaataaggtgccaggaaaacagtttaaaattatacatcagcatacagactgctgttagaaggtatgggatcatattaagataatctgtcagctactactaggcatttattgttaattgagttacagaaagtcattcaagactgagtttatagaaagcatattgcatctatctctgtgtagaacatttgattcacattgtgaagaatgcagtttaaaatatactgaatgcaatctagatgtattgtacacgaaaggtgaaaaataacaggtgctctttactgtttagataaattgttttctgtgttatttcccttcgttcactgtgaggggttgattcatgaggagagccctgggttcctggctcaggtttacttttggccttaggataggattcccttattagagataaatactgctgttctcttctagctcattcattcatttagcagtcaattgctcagtgccaggtgctaggaacagaggctcaatctctaccctcagaaaactcagtgtgacgagagagagcctgacagataaaatgaactatgaccctgtaagagggctcaggatcgtgaatcctgcaggcagagaaacatgagccataatctgtccctgcattttctagctgtggaatcttgggtcagctccttaactggtctgagctttggcttcagggtagtaaagggaggggtattaaaggtcctggttaaatgaaatcatcagtgtgtgtaaaacagcattggttctagctcatacatgataaccactcattaagtggtaattatgtttttattataagggctatgctgtaattcagacatgggcccaaaactacaggaaagataaattgtttttgctaaagtattgccaagaaacttcacagtttcttgggaggtgggccttgaggcatgcaaagaacttcttcaggtaggcaaagaagagaggacactcttggcagaaagagttgttgaaaaaagcagtagggtgtgaaaatacatggatgttcaagtattttggtgaggctgttatgtaaagtgttgttggtctttggggaaaattggcttatggaaattcctgccagaagtactaagcccttatggtggttcttcctgccctagctcttggttggtttatatataaggaatatatttgtgtatttatatatcagacatttggatgtacctttcagttatttaggatttagaaaattctttttggattttccagaattattttatccttcggggatgacagttatatgtgtatatacaacccaggatgacaaaatcatgggtccggtttttgttgccagggctgctgtctcttttcttgcggtcttcatttctcacgagggtgctgggaacttgatcagtcccctggccttttggcactgtggcagagtacacaagtcatacctttatggacagttagctcacaaaacaactgcataatctgggatcactcttggtaaatcaggtgggtggtgcagccaggagatcccctttcctggtcacaacaggagcacaaagaaaccattatctccatgactagctccagaagctgggcccagggagtcgtgatgaggagtggaggtgtatttggcctgtagaatcaacggcctttgagaaccatacaatgcaccttatatggcttgggtgatcaaataacttaaggtccaaattcaaacactttggaaaaagggagctttaatataattatgccaaggtgataggcataaactaagactgtcctggacgtagggtcacccctgtctatagccatttaagatttttgaacctgatgactaaacaaacaaaaccctctttcctttttagaatatcctgtatgcgctatttcccaccagaggcagaggccacaggagataggccatggttcaggtaggaaatgctcttggtcacatcagaactctagatctgggggaataaacaaacccgaattattaccacactctcaaagttctcttcaatctggactatttgtattccaaagaaaaatttagtgctttagctattcagcaatattgagaaaaaacatgaacacatttatgactttgccttgaccattgacttttctaaaatgtgcttccttttcctttatttccctttttttatacaaagaaaatagcccaaatttctcctcttaggtcattccttaacctctcagagaaccagtttccccatgaattgggaataatgctctatttacagggctgtttggattaaataagatgctgtttataaagtgtctgtgccagggcaaagcatgtggtaggtgcttggtgacagcatgatccctgtcaccactctgtcaagtccagtgttgctgagatgtcacacctgacaccctctaaggctaccctgattgccaggagtggcccagggcccttctgcagtctccgggtgcctttagttataacctcttgtctgggtcagaccattagctttcatgtctgcttctagctacaactgtagcctcccttccttttgccttcaaatctgccacagctgcccggcaacaaaaaaagattcctaagcatctcgaggtcctgtttaaatgggttagggtccaagcaagccctgagacatcaagtggttgggtcttttatacctttttcatctctacagccctgttctcttcctaaggccaggcccacaggggatactgaggaaccaccagccccttcaggcggcacagcagaccctgaagagaactgctctaacttaagtaccttctgacttcaccatttttccagcctctgggtgtggttctgatgaaccttaaacttgaaaggcacaggccagaggaaggacagtgttgacccacatgtcattggtgaggttatgatctctttgctattatcacctacttacccacctgaggctcctaggaaacaatgaatgaaaggtatagaaaaaaattaggaagtaaacagggcttttttcccctttatgaaaaaagtacacagaagtgttgaaacgattcaagtttaatttgttgatatatgtgtgtacttagacaaacactaaattctacaacatacataatgtcaacatgggaaaataccaagtttgtcattgcacataccaataaataaatacatttgctccagaataccaaag

SEQ ID NO: 50336 - protein, 453 aa, Artificial Sequence
  derived and/or modified sequence
MAARCSTRWLLVVVGTPRLPAISGRGARPPREGVVGAWLSRKLSVPAFASSLTSCGPRALLTLRPGVSLTGTKHNPFICTASFHTSAPLAKEDYYQILGVPRNASQKEIKKAYYQLAKKYHPDTNKDDPKAKEKFSQLAEAYEVLSDEVKRKQYDAYGSAGFDPGASGSQHSYWKGGPTVDPEELFRKIFGEFSSSSFGDFQTVFDQPQEYFMELTFNQAAKGVNKEFTVNIMDTCERCNGKGNEPGTKVQHCHYCGGSGMETINTGPFVMRSTCRRCGGRGSIIISPCVVCRGAGQAKQKKRVMIPVPAGVEDGQTVRMPVGKREIFITFRVQKSPVFRRDGADIHSDLFISIAQALLGGTARAQGLYETINVTIPPGTQTDQKIRMGGKGIPRINSYGYGDHYIHIKIRVPKRLTSRQQSLILSYAEDETDVEGTVNGVTLTSSGKRSTGN

SEQ ID NO: 50337 - DNA, 1362 bp, Artificial Sequence
  derived and/or modified sequence
atggctgcccgttgcagtacaaggtggctacttgtcgtcgtgggaaccccaaggctccctgcaatcagcggtaggggggcacgcccccctcgcgagggagttgttggggcgtggctctctcgcaaactgagcgtgccagccttcgcgtccagccttacatcctgcggtccaagagctcttctgacgctgagacccggtgtatccctgacggggaccaaacataacccatttatttgcacggcgtcttttcacacatcagctcccctcgcaaaggaggactactatcaaatcctgggggtaccccgaaacgcaagccaaaaagagatcaagaaagcctactaccagctcgctaaaaagtaccatccagatacgaataaagacgaccccaaggcaaaagagaaattctcccagcttgcggaagcctacgaagttctgtcagacgaagtcaaacgcaaacagtacgatgcatacggcagtgctggattcgacccaggagccagcggatctcagcacagttactggaagggcggaccaactgttgaccctgaagagctcttcagaaaaatctttggagaattcagcagttcctcctttggggactttcagacagtgttcgatcaaccccaagagtatttcatggaactgacattcaaccaggctgctaaaggcgtgaataaagagtttacagtgaatattatggatacctgcgaacggtgtaatggaaagggcaacgaaccgggcaccaaagttcaacactgtcattactgcggtggaagcggaatggagaccatcaacacaggacctttcgtgatgcggagtacgtgccgtcgctgcggaggccgagggtcaatcattatttccccatgtgttgtgtgcagaggcgccggccaggcgaaacagaagaagagggtgatgataccagtgcccgctggtgtcgaggatggacaaacggtccggatgcccgttgggaaacgggagatctttattaccttccgagtgcaaaagagccctgtatttcggagggatggtgccgacatccactctgacctgttcatctctatcgcccaggctcttctggggggcacagcgcgcgcccaaggactctacgaaactatcaatgtcacaattccacctggaactcagactgatcagaagatcaggatgggcggaaaagggattccgaggataaattcctatggctacggggaccactacattcacatcaagatacgagtccccaaaaggctgaccagcaggcagcagtccctgattctctcatacgccgaggacgaaacggatgtggaaggcacggtgaatggagtgactctgacctcttctgggaagcgttctactgggaattag

SEQ ID NO: 50338 - DNA, 1362 bp, Artificial Sequence
  derived and/or modified sequence
atggccgcccgctgcagcacccgctggctgctggtggtggtgggcaccccccggctgcctgccatcagcggccgcggggcccggcccccccgggagggcgtggtgggcgcctggctgagcaggaagctgtctgtgcctgcctttgccagcagcctgaccagctgtggcccccgggccctgctgaccctgcggcctggggtgtccctgaccggcaccaagcacaaccccttcatctgcacagccagcttccacaccagcgcccccctggccaaggaggactactaccagatcctgggcgtgcccagaaatgccagccagaaggagatcaagaaggcctactaccagctggccaagaagtaccacccagacaccaacaaggatgaccccaaggccaaggagaagttcagccagctggccgaggcctatgaggtgctgagtgatgaggtgaagaggaagcagtatgatgcctacggcagcgctggctttgaccccggggccagcggcagccagcacagctactggaagggcggccccaccgtggaccctgaggagctgttcaggaagatctttggagagttcagcagcagcagctttggagacttccagacagtgtttgaccagccccaggagtacttcatggagctgaccttcaaccaggccgccaagggcgtgaacaaggagttcaccgtgaacatcatggacacctgtgagcgctgcaatggaaaaggaaatgagcccggcaccaaggtgcagcactgccactactgcggcggcagcggcatggagaccatcaacacaggcccctttgtgatgaggagcacctgccgccgctgtggcggccggggcagcatcatcatcagcccctgtgtggtgtgcagaggagctggccaggccaagcagaagaagagggtgatgatccctgtgcctgctggggtggaggatggccagacagtgaggatgcctgtgggcaagcgggagatcttcatcaccttccgggtgcagaagagccctgtgttcagaagagatggagctgacatccacagcgacctcttcatcagcatcgcccaggccctgctgggcggcacagcccgggcccagggcctgtatgagaccatcaacgtgaccatccccccaggcacccagacagaccagaagatccgcatgggcggcaagggcatcccccgcatcaacagctatggctatggagaccactacatccacatcaagatccgggtgcccaagaggctgaccagccggcagcagagcctcatcctgtcctatgcagaagatgaaacagatgtggagggcaccgtgaatggagtgaccctgaccagcagcggcaagaggagcactggaaattag

SEQ ID NO: 50339 - DNA, 1362 bp, Artificial Sequence
  derived and/or modified sequence
atggccgcccggtgcagcacccggtggctgctggtggtggtgggcaccccccggttacccgctattagcggcagaggtgcacgacccccgcgggagggtgtcgttggcgcatggctcagtagaaagttgtctgtgccagcttttgccagctccctaacaagttgtgggcctagggcactgttgactttgaggccaggtgtgtctctgaccggcaccaaacacaatccttttatttgcacagcaagcttccacactagtgctcccttggcaaaggaggattactatcaaatactgggtgtgcctaggaatgcttcacagaaggagatcaagaaggcctactatcagctcgctaaaaaataccacccggacacgaacaaggatgatcctaaggccaaagagaagttctcccagcttgcagaggcctacgaggtgctcagcgacgaggtgaagcggaagcagtatgatgcctacggatctgccggcttcgatccgggagcttccggaagccagcactcctattggaaaggcggacctacagtcgatccagaagagctctttcggaagatctttggcgaattcagtagcagttctttcggtgattttcagactgtgtttgatcagccccaagaatacttcatggagcttacattcaaccaagcggctaagggcgtgaataaggaatttaccgtcaacattatggatacttgtgaaagatgtaatggaaaagggaatgagccagggacgaaagttcagcactgccattactgtggcggcagcggtatggagactataaacactggtccatttgttatgcgctccacttgcagaagatgcggaggtagggggagcatcattatatctccttgcgttgtgtgcaggggtgcaggtcaggccaagcagaagaagcgagtcatgattccagttccagccggagtggaggacgggcagaccgtgaggatgcccgtgggaaaacgagaaatttttatcacgtttagagtgcagaaatcccctgtattccggcgggacggtgctgacatccattcggacctttttatttcaattgcccaggccttactcggtggaactgctcgggcccagggactgtacgaaacaatcaacgtgaccatcccccccgggacccagactgatcagaagatccggatgggcgggaagggcattcccaggatcaactcctatggttatggcgaccactatatacatatcaagatcagagtgcccaagagactgacttcgcggcagcagtctctgattctgtcatacgctgaagatgagactgacgtcgaaggcacggtgaacggtgtgacactcacctctagtggcaagcggtcaacaggcaattag

SEQ ID NO: 50340 - DNA, 1362 bp, Artificial Sequence
  derived and/or modified sequence
atggcagcccgatgttcaactagatggctgctcgttgtggtcgggacacctaggctgcccgcaattagtgggagaggggctcggcctccaagagaaggtgtggtcggtgcctggctctctcgcaagctgtcggtccctgcttttgcgtctagcctgacctcttgcggaccccgagcgcttctgacacttcggcctggagtttccctgaccggaacaaaacacaatccctttatttgcaccgcaagtttccacacttccgcacccctggcgaaagaggattactaccaaattttgggcgttcctcggaatgcatctcagaaggagatcaagaaagcttactaccagctggctaagaagtaccacccggatactaacaaggacgatcccaaagccaaggagaaatttagccagctggctgaggcatacgaagttctttcagacgaggtgaaaagaaaacagtatgatgcgtacggctctgccggattcgaccctggagcttccggatcccaacatagctattggaaagggggtcccacagtggatccagaggaactgttccggaagatcttcggagaattcagctcaagctccttcggcgattttcagactgtcttcgatcaaccccaggaatactttatggagttgactttcaaccaagctgccaagggagtgaataaggagtttaccgtcaacataatggatacctgtgagcggtgtaacggtaagggaaatgagcccggaacaaaggtccagcattgtcactactgtggtggctccggtatggaaacaattaataccggccctttcgtgatgagatccacttgcagaaggtgcggtggtcggggtagtatcattataagcccttgtgttgtgtgccggggagcagggcaagccaagcagaagaaaagggtcatgatacccgtgccggcaggggtggaagacggacagaccgtaaggatgccagttggtaagagagagattttcattaccttccgggtgcagaagtcccctgtatttagaagggacggggcagacatccacagcgacctattcatcagcattgcccaggccttgttaggcggaactgcacgggcacagggcttatacgagactattaatgtgaccattcccccaggaacccagaccgatcagaaaatacgaatgggcggaaaaggcatccccagaattaattcttacggatacggggatcattacattcacatcaagatccgggttcccaagcggctcactagcaggcagcagtcgctgattttgagttacgctgaggacgagaccgatgtggagggcacagtgaatggggtcactctgaccagcagtggaaaacgcagcacaggcaattag

SEQ ID NO: 50341 - DNA, 1362 bp, Artificial Sequence
  derived and/or modified sequence
atggccgccagatgcagcaccagatggctgctggtggtggtgggcacccccagactgcccgccatcagcggcagaggcgccagaccccccagagagggcgtggtgggcgcctggctgagcagaaagctgagcgtgcccgccttcgccagcagcctgaccagctgcggccccagagccctgctgaccctgagacccggcgtgagcctgaccggcaccaagcacaaccccttcatctgcaccgccagcttccacaccagcgcccccctggccaaggaggactactaccagatcctgggcgtgcccagaaacgccagccagaaggagatcaagaaggcctactaccagctggccaagaagtaccaccccgacaccaacaaggacgaccccaaggccaaggagaagttcagccagctggccgaggcctacgaggtgctgagcgacgaggtgaagagaaagcagtacgacgcctacggcagcgccggcttcgaccccggcgccagcggcagccagcacagctactggaagggcggccccaccgtggaccccgaggagctgttcagaaagatcttcggcgagttcagcagcagcagcttcggcgacttccagaccgtgttcgaccagccccaggagtacttcatggagctgaccttcaaccaggccgccaagggcgtgaacaaggagttcaccgtgaacatcatggacacctgcgagagatgcaacggcaagggcaacgagcccggcaccaaggtgcagcactgccactactgcggcggcagcggcatggagaccatcaacaccggccccttcgtgatgagaagcacctgcagaagatgcggcggcagaggcagcatcatcatcagcccctgcgtggtgtgcagaggcgccggccaggccaagcagaagaagagagtgatgatccccgtgcccgccggcgtggaggacggccagaccgtgagaatgcccgtgggcaagagagagatcttcatcaccttcagagtgcagaagagccccgtgttcagaagagacggcgccgacatccacagcgacctgttcatcagcatcgcccaggccctgctgggcggcaccgccagagcccagggcctgtacgagaccatcaacgtgaccatcccccccggcacccagaccgaccagaagatcagaatgggcggcaagggcatccccagaatcaacagctacggctacggcgaccactacatccacatcaagatcagagtgcccaagagactgaccagcagacagcagagcctgatcctgagctacgccgaggacgagaccgacgtggagggcaccgtgaacggcgtgaccctgaccagcagcggcaagagaagcaccggcaactag

SEQ ID NO: 50342 - DNA, 2591 bp, Artificial Sequence
  derived and/or modified sequence
gcaggcgcagagtccccgggccaagatggctgcgcggtgctccacacgctggttgctggtggttgtggggaccccgcggctgccggctatatcgggtagaggggcccggccgcccagggagggcgtggtgggggcatggctgagccgcaagctgagcgtccccgcctttgcgtcttccctgacctcttgcggcccccgagcgctgctgacattgagacctggtgtcagccttacaggaacaaaacataaccctttcatttgtactgcctccttccacacgagtgcccctttggccaaagaagattattatcagatattaggagtgcctcgaaatgccagccagaaagagatcaagaaagcctattatcagcttgccaagaagtatcaccctgacacaaataaggatgatcccaaagccaaggagaagttctcccagctggcagaagcctatgaggttttgagtgatgaggtgaagaggaagcagtacgatgcctacggctctgcaggcttcgatcctggggccagcggctcccagcatagctactggaagggaggccccactgtggaccccgaggagctgttcaggaagatctttggcgagttctcatcctcttcatttggagatttccagaccgtgtttgatcagcctcaggaatacttcatggagttgacattcaatcaagctgcaaagggggtcaacaaggagttcaccgtgaacatcatggacacgtgtgagcgctgcaacggcaaggggaacgagcccggcaccaaggtgcagcattgccactactgtggcggctccggcatggaaaccatcaacacaggcccttttgtgatgcgttccacgtgtaggagatgtggtggccgcggctccatcatcatatcgccctgtgtggtctgcaggggagcaggacaagccaagcagaaaaagcgagtgatgatccctgtgcctgcaggagtcgaggatggccagaccgtgaggatgcctgtgggaaaaagggaaattttcattacgttcagggtgcagaaaagccctgtgttccggagggacggcgcagacatccactccgacctctttatttctatagctcaggctcttcttgggggtacagccagagcccagggcctgtacgagacgatcaacgtgacgatcccccctgggactcagacagaccagaagattcggatgggtgggaaaggcatcccccggattaacagctacggctacggagaccactacatccacatcaagatacgagttccaaagaggctaacgagccggcagcagagcctgatcctgagctacgccgaggacgagacagatgtggaggggacggtgaacggcgtcaccctcaccagctctggaaaaagatccactggaaactaggccgggaagcagcagcccctccaagggccagggcacctgggagacgggaggattccagaacagcagcactgagctcccacccgcagagcctctggacggccttggcaacagcaaaatcatgggacaacacctctctccacggaaaggtcacagtggacagcccgggcagtaggatgcagccccagaggctggtggcagtttcctgtccattggtaggtgacggcccctggctcaggcagagggagatggttagactcttgcagggctaaaactctaatttggaattgaatattgtggatatcttagttaaaggccatgcttacagcttagaaatgaagccttaagctgcatcaagttacgaagtgattaatttccttctcagcaaacctccgggaggttccagaatgagttcttcctgacaggttgtcttcactgggagcgtggggcccccaggccccaccagcaccgtcctcccctaatgaggggccctgccgaggcatcagctgctctgctcagttagtttttattcccggggtaccaagcagctgcacagtcggtgcctgggaggcacgtagaggcccagagagtccctgggggttctgctctgaccgtgtgggtggtgatccttgtcaggatgtacagtccttgctcccaccccatccgggatggccgcctgtccctgactattgagtcctgttgttgtaagccaggcatggagggctcctgcccttctgctgagccacagcccattgcagcactgtgctggccagacttcagctgccttgggaactgaagccctgccactgttgctagtcaggggcttggttctcccacttacactgttgacatctattttctgaagtgtgtttaaattattcagtgctaatcattgttttttcctttgtaaatgttgattcagaaaaggaaagcacaggctaagcagttgaaggttccccaccattcagtgagagcagaacccccattccccagcctctgctggtagcatgtcgcagtttccatgtgtttcaggatcttcgggctgtcgttagacaggttaatgaagaacacttctcaacagtttcctttttgttttcctttataattcactaaaataaagcatctattagtgtctgatttaggaatgtaaaatgattctgtattaatgtaaataagattatctattgcaaaaagatatttcaaacct

SEQ ID NO: 50343 - protein, 271 aa, Artificial Sequence
  derived and/or modified sequence
MYRPRARAAPEGRVRGCAVPSTVLLLLAYLAYLALGTGVFWTLEGRAAQDSSRSFQRDKWELLQNFTCLDRPALDSLIRDVVQAYKNGASLLSNTTSMGRWELVGSFFFSVSTITTIGYGNLSPNTMAARLFCIFFALVGIPLNLVVLNRLGHLMQQGVNHWASRLGGTWQDPDKARWLAGSGALLSGLLLFLLLPPLLFSHMEGWSYTEGFYFAFITLSTVGFGDYVIASCLISDTRKPNRDWQTLERTSKSSGGLLKYRFLAGHGGSHL

SEQ ID NO: 50344 - DNA, 816 bp, Artificial Sequence
  derived and/or modified sequence
atgtaccgccctagggcgcgggcagccccagaaggccgggtacggggctgcgccgtgccctccactgttttgctgctgctggcataccttgcttatcttgccctgggcaccggagtgttctggaccttggaaggcagagccgcccaagactcttccaggagctttcagcgggacaagtgggaactcttgcagaacttcacgtgtctggatagacccgctttagacagcttgatccgcgacgtggtgcaggcctacaaaaatggtgcgagcctgctatctaacaccacatcaatgggtcgttgggagctggtgggttcgttcttcttctcagtatctacgatcaccactatcggatacggaaacctctccccaaatactatggcagccaggctgttctgcatttttttcgcccttgttggcatccccctcaatttggtggtccttaatcgcctcggccatctgatgcagcagggcgttaaccactgggcctcaaggctgggcggcacttggcaggaccctgataaagctcggtggctcgcaggctccggagcccttctgtccggccttctcctgttcttgctgctgcctcctctgttgtttagccatatggaggggtggagctacactgaaggcttttactttgcattcatcaccctgtcgaccgtggggttcggagattatgtcattgcctcatgtctgattagtgacactagaaagccaaaccgcgattggcagacactagaaagaacatctaaatctagcggcggattgctgaagtatagatttttggctggtcatggtggctctcacctgtag

SEQ ID NO: 50345 - DNA, 816 bp, Artificial Sequence
  derived and/or modified sequence
atgtaccggccccgggcccgggccgcccctgagggccgggtgcggggctgtgctgtgcccagcacagtgctgctgctgctggcctacctggcctacctggccctgggcactggagtcttctggaccctggagggccgggccgcccaggacagcagccgctccttccagagggacaagtgggagctgctgcagaacttcacctgcctggacaggcctgccctggacagcctcatcagagatgtggtgcaggcctacaagaatggagccagcctgctgagcaacaccacctccatgggccgctgggagctggtgggcagcttcttcttctctgtgtccaccatcaccaccatcggctacggcaacctgagccccaacaccatggccgcccggctcttctgcatcttctttgccctggtgggcatccccctgaacctggtggtgctgaaccggctgggccacctgatgcagcagggcgtgaaccactgggccagccggctgggcggcacctggcaggaccctgacaaggcccgctggctggccggcagcggggccctgctgagcggcctgctgctcttcctgctgctgccccccctgctcttcagccacatggagggctggagctacacagagggcttctactttgccttcatcaccctgagcacagtgggctttggagactatgtgattgccagctgcctgatcagtgacaccaggaagcccaacagagactggcagaccctggagaggaccagcaagagcagcggcggcctgctgaagtaccgcttcctggccggccacggcggcagccacctgtag

SEQ ID NO: 50346 - DNA, 816 bp, Artificial Sequence
  derived and/or modified sequence
atgtaccggccccgggcccgggccgcccccgagggccgggtgcggggctgtgctgttccaagcactgtgctcctgttgttggcttacttggcttatttagcccttggaaccggagtcttttggactttggaaggtcgcgcagctcaggactcttctcgttcctttcagcgagataaatgggagcttctgcagaatttcacttgtctggaccgccccgccctagattctttgattcgcgatgtcgtccaggcgtacaagaatggagcctctctcctctccaacactacatctatgggaaggtgggagctggtgggatcatttttcttcagcgtgtccactatcactacaatcgggtacggaaacctgtctcccaacactatggcggctcgcctcttttgcattttcttcgctctcgttggaattccgctgaacttagtggtgctaaatcgcctggggcatctgatgcagcagggagttaaccactgggcgtcccggctgggtggcacatggcaagacccagataaggctcggtggttagccggcagtggcgcccttctaagtgggctgctgctgtttttactgttgccaccccttctgttctctcacatggaaggttggtcctataccgaaggtttttattttgcattcatcaccctgtccactgtggggttcggcgattacgtgatcgcctcttgcctcatcagtgatactagaaaacctaaccgggactggcagaccctcgagaggacctccaaatcctcggggggcctgttgaagtaccggtttctggctggccacggggggtctcatctgtag

SEQ ID NO: 50347 - DNA, 1706 bp, Artificial Sequence
  derived and/or modified sequence
attccccaacactcctcctccccggcgaaaccgggcaccagcaggcgtttgcgagaggagatacgagctggacgcctggcccttccctcccaccgggtcctagtccaccgctcccggcgccggctccccgcctctcccgctatgtaccgaccgcgagcccgggcggctcccgagggcagggtccggggctgcgcggtgcccagcaccgtgctcctgctgctcgcctacctggcttacctggcgctgggcaccggcgtgttctggacgctggagggccgcgcggcgcaggactccagccgcagcttccagcgcgacaagtgggagctgttgcagaacttcacgtgtctggaccgcccggcgctggactcgctgatccgggatgtcgtccaagcatacaaaaacggagccagcctcctcagcaacaccaccagcatggggcgctgggagctcgtgggctccttcttcttttctgtgtccaccatcaccaccattggctatggcaacctgagccccaacacgatggctgcccgcctcttctgcatcttctttgcccttgtggggatcccactcaacctcgtggtgctcaaccgactggggcatctcatgcagcagggagtaaaccactgggccagcaggctggggggcacctggcaggatcctgacaaggcgcggtggctggcgggctctggcgccctcctctcgggcctcctgctcttcctgctgctgccaccgctgctcttctcccacatggagggctggagctacacagagggcttctacttcgccttcatcaccctcagcaccgtgggcttcggcgactacgtgattgcaagctgcctcatttcagatacgagaaaaccaaacagagactggcaaacactagagcggacatcgaaatcctctgggggcttgttaaaatacagatttctggccgggcacggtggctcacacctgtaattctaacactttgggaggccgaggaatgaacccctcccagaggtacccactgtggtacaagaacatggtgtccctgtggatcctctttgggatggcatggctggccttgatcatcaaactcatcctctcccagctggagacgccagggagggtatgttcctgctgccaccacagctctaaggaagacttcaagtcccaaagctggagacagggacctgaccgggagccagagtcccactccccacagcaaggatgctatccagagggacccatgggaatcatacagcatctggaaccttctgctcacgctgcaggctgtggcaaggacagctagttatactccattctttggtcgtcgtcctcggtagcaagacccctgattttaagctttgcacatgtccacccaaactaaagactacattttccatccaccctagaggctgggtgcagctatatgattaattctgcccaatagggtatacagagacatgtcctgggtgacatgggatgtgactttcgggtgtcggggcagcatgcccttctcccccacttccttactttagcgggctgcaatgccgccgatatgatggctgggagctctggcagccatacggcaccatgaagtagcggcaatgtttgagcggcacaataagataggaagagtctggatctctgatgatcacagagccatcctaacaaacggaatatcacccgacctcctttatgtgagagagaaataaacatcttat

SEQ ID NO: 50348 - DNA, 816 bp, Artificial Sequence
  derived and/or modified sequence
atgtacaggcccagagccagggccgcacctgagggcagagtgcgaggctgtgcggtaccgagcaccgtgctgctgctgctggcatacttagcatacttagcgctgggtaccggcgtgttttggaccttggaaggcagggcggctcaggattcatctaggagcttccagagagacaaatgggaacttctccagaatttcacatgtctcgaccgccctgcactggattctctcatcagggatgtggtgcaggcctacaagaatggtgcaagtctattgtccaacactacctccatgggccgttgggaactcgtgggatccttctttttcagtgtttccaccatcactactatagggtatgggaacctgtcacccaatactatggccgctcgccttttctgcatctttttcgcactggtggggatccccttgaacttggttgtgctcaatcgcctgggacacttgatgcagcagggcgtcaatcactgggcatccaggctaggcggtacatggcaagacccggataaggcgaggtggctcgcgggaagcggagcattgctgagcggcctgctgctgtttttgttactgcctccccttctgtttagtcatatggaagggtggagctacaccgaggggttttacttcgctttcatcacgctttccacggtcggtttcggcgattacgttatcgcctcatgtctgatcagtgacacacgcaagccgaatagggattggcagaccctagagagaactagtaagtccagtgggggtctgctgaagtacaggttcctagccggacatggcggatcccacttgtag

SEQ ID NO: 50349 - DNA, 816 bp, Artificial Sequence
  derived and/or modified sequence
atgtacagacccagagccagagccgcccccgagggcagagtgagaggctgcgccgtgcccagcaccgtgctgctgctgctggcctacctggcctacctggccctgggcaccggcgtgttctggaccctggagggcagagccgcccaggacagcagcagaagcttccagagagacaagtgggagctgctgcagaacttcacctgcctggacagacccgccctggacagcctgatcagagacgtggtgcaggcctacaagaacggcgccagcctgctgagcaacaccaccagcatgggcagatgggagctggtgggcagcttcttcttcagcgtgagcaccatcaccaccatcggctacggcaacctgagccccaacaccatggccgccagactgttctgcatcttcttcgccctggtgggcatccccctgaacctggtggtgctgaacagactgggccacctgatgcagcagggcgtgaaccactgggccagcagactgggcggcacctggcaggaccccgacaaggccagatggctggccggcagcggcgccctgctgagcggcctgctgctgttcctgctgctgccccccctgctgttcagccacatggagggctggagctacaccgagggcttctacttcgccttcatcaccctgagcaccgtgggcttcggcgactacgtgatcgccagctgcctgatcagcgacaccagaaagcccaacagagactggcagaccctggagagaaccagcaagagcagcggcggcctgctgaagtacagattcctggccggccacggcggcagccacctgtag

SEQ ID NO: 50350 - protein, 460 aa, Artificial Sequence
  derived and/or modified sequence
MAPGRAVAGLLLLAAAGLGGVAEGPGLAFSEDVLSVFGANLSLSAAQLQHLLEQMGAASRVGVPEPGQLHFNQCLTAEEIFSLHGFSNATQITSSKFSVICPAVLQQLNFHPCEDRPKHKTRPSHSEVWGYGFLSVTIINLASLLGLILTPLIKKSYFPKILTFFVGLAIGTLFSNAIFQLIPEAFGFDPKVDSYVEKAVAVFGGFYLLFFFERMLKMLLKTYGQNGHTHFGNDNFGPQEKTHQPKALPAINGVTCYANPAVTEANGHIHFDNVSVVSLQDGKKEPSSCTCLKGPKLSEIGTIAWMITLCDALHNFIDGLAIGASCTLSLLQGLSTSIAILCEEFPHELGDFVILLNAGMSTRQALLFNFLSACSCYVGLAFGILVGNNFAPNIIFALAGGMFLYISLADMFPEMNDMLREKVTGRKTDFTFFMIQNAGMLTGFTAILLITLYAGEIELE

SEQ ID NO: 50351 - DNA, 1383 bp, Artificial Sequence
  derived and/or modified sequence
atggcccccggcagagccgtggccggcctgctgctgctggccgccgccggcctgggcggcgtggccgagggccccggcctggccttcagcgaggacgtgctgagcgtgttcggcgccaacctgagcctgagcgccgcccagctgcagcacctgctggagcagatgggcgccgccagcagagtgggcgtgcccgagcccggccagctgcacttcaaccagtgcctgaccgccgaggagatcttcagcctgcacggcttcagcaacgccacccagatcaccagcagcaagttcagcgtgatctgccccgccgtgctgcagcagctgaacttccacccctgcgaggacagacccaagcacaagaccagacccagccacagcgaggtgtggggctacggcttcctgagcgtgaccatcatcaacctggccagcctgctgggcctgatcctgacccccctgatcaagaagagctacttccccaagatcctgaccttcttcgtgggcctggccatcggcaccctgttcagcaacgccatcttccagctgatccccgaggccttcggcttcgaccccaaggtggacagctacgtggagaaggccgtggccgtgttcggcggcttctacctgctgttcttcttcgagagaatgctgaagatgctgctgaagacctacggccagaacggccacacccacttcggcaacgacaacttcggcccccaggagaagacccaccagcccaaggccctgcccgccatcaacggcgtgacctgctacgccaaccccgccgtgaccgaggccaacggccacatccacttcgacaacgtgagcgtggtgagcctgcaggacggcaagaaggagcccagcagctgcacctgcctgaagggccccaagctgagcgagatcggcaccatcgcctggatgatcaccctgtgcgacgccctgcacaacttcatcgacggcctggccatcggcgccagctgcaccctgagcctgctgcagggcctgagcaccagcatcgccatcctgtgcgaggagttcccccacgagctgggcgacttcgtgatcctgctgaacgccggcatgagcaccagacaggccctgctgttcaacttcctgagcgcctgcagctgctacgtgggcctggccttcggcatcctggtgggcaacaacttcgcccccaacatcatcttcgccctggccggcggcatgttcctgtacatcagcctggccgacatgttccccgagatgaacgacatgctgagagagaaggtgaccggcagaaagaccgacttcaccttcttcatgatccagaacgccggcatgctgaccggcttcaccgccatcctgctgatcaccctgtacgccggcgagatcgagctggagtag

SEQ ID NO: 50352 - DNA, 1383 bp, Artificial Sequence
  derived and/or modified sequence
atggctccagggagggcagtggcaggtttgctactactagccgcagcagggctcggcggagttgctgagggacccggtctggcgttctccgaagacgtgttgtctgtgtttggcgctaacttgtctctcagcgctgcgcagctgcaacacctattggaacagatgggggccgcctcgcgtgtgggtgtgcccgaacctggccaactgcattttaaccaatgcttaaccgctgaagagatcttcagtctgcatgggttcagtaacgcgacacaaattacttcttcaaaattctcagtcatctgcccggccgtcctgcagcagcttaacttccacccttgtgaggatcgccccaagcataaaaccagaccttcacactccgaagtatggggctatggcttcctgtccgtaaccatcattaacctggcatccctcctcggactcatattaactcccctgatcaaaaagtcttattttcccaagattctgacattctttgtagggttggccattggcacactgttttcaaatgccatctttcagctcattcctgaagcgtttggctttgacccaaaagtagattcatacgtggagaaggcggtggcagtgttcggcgggttttacttactgttttttttcgagagaatgctcaaaatgctgctgaaaacgtatggtcaaaacggccacacccacttcgggaacgacaatttcggtccccaggagaaaacacaccagccaaaagcccttcctgcaatcaatggggtaacgtgctacgccaacccagctgtgaccgaagctaatgggcacatacacttcgataacgtctccgtcgtctccttgcaggacggtaagaaagagcctagttcttgtacctgcttgaaaggtcctaaactgtcagaaattggtaccattgcctggatgatcaccctttgcgatgccttacacaatttcatcgatggtctggctattggggcttcatgcaccctttcattgcttcaggggttaagtacttcgattgccattctctgcgaggaatttccccacgaattgggagactttgtgatattactgaatgccgggatgtctacaaggcaggctcttttgttcaacttcctatccgcgtgctcatgctacgtgggtcttgccttcgggattctagttggcaacaacttcgctcccaacatcatctttgccctggccggcgggatgtttctttacatatcgctcgccgacatgtttcctgagatgaacgatatgttgcgcgaaaaggtgacaggtagaaagacagattttactttcttcatgatccaaaatgctggcatgctgaccggatttacagccatcctcctgattacattgtacgcaggtgagatagaactggagtag

SEQ ID NO: 50353 - DNA, 1383 bp, Artificial Sequence
  derived and/or modified sequence
atggcccctggtagagccgtggccgggctactgcttctggcagcagccggcctgggcggcgttgcagagggacctggactggcttttagcgaggacgtgttatcagtgttcggagcaaatctgagcctgagcgcagcccagctgcagcatctgctggaacagatgggagccgcttcccgggtgggcgtgccagagcccggccaactgcattttaatcagtgcctgaccgccgaagagatattcagcctgcacggcttttccaatgcaactcagatcacatcttcaaagtttagcgtcatctgccccgccgtgctgcaacagctcaacttccatccttgtgaggaccggcccaaacataagactcgaccatcacatagcgaggtctggggctacgggtttctgagcgttactattatcaacctggcctctttgctcgggcttatcctgacgccactgattaaaaagtcatacttccccaaaatcttaacgtttttcgtgggattagcaatcggcaccctgttcagcaatgccatttttcaactaataccagaagcctttgggttcgaccccaaagtggatagttacgtggagaaggctgttgccgtcttcgggggcttttacctgttgttcttcttcgagagaatgctcaaaatgctactcaagacgtatgggcagaatggacatacccactttggcaacgataacttcggacctcaggaaaagactcaccagcctaaggcccttcctgccattaatggcgtcacctgctacgctaacccggctgtaacagaggctaatggacacattcacttcgacaacgtcagcgtcgtgagcctacaggacggcaagaaagaaccctccagctgtacttgcctgaagggaccgaaactctccgaaatcggcacaattgcctggatgatcactctctgtgacgcactacacaactttattgatggtctggccattggcgccagctgtacacttagccttctccagggtctctctacttcgattgccatcctgtgtgaagaatttccccatgagctgggcgacttcgtgattctactgaacgctggtatgagcactagacaggccttactgttcaacttcctctccgcttgcagctgctacgtaggcctggcgtttggcatcttagtaggtaacaattttgcaccaaatattattttcgctttggcgggtggtatgtttctgtatatcagcttggcggacatgtttcccgagatgaatgatatgctgagggaaaaagtgacagggcgaaagactgacttcactttcttcatgattcagaatgctggaatgctcacgggtttcactgccatcctcctgattacactctatgctggagagatcgagctcgaatag

SEQ ID NO: 50354 - DNA, 1383 bp, Artificial Sequence
  derived and/or modified sequence
atggcccctggccgggctgtggccggcctgctgctgctggccgccgccggcctgggcggcgtggccgagggccctggcctggccttctctgaagatgtgctgtctgtgtttggagccaacctgagcctgtctgctgcccagctgcagcacctgctggagcagatgggcgccgccagccgggtgggcgtgcctgagcccggccagctgcacttcaaccagtgcctgacagctgaggagatcttcagcctgcacggcttcagcaatgccacccagatcaccagcagcaagttcagcgtcatctgcccagctgtgctgcagcagctgaacttccacccctgtgaggaccggcccaagcacaagacccggcccagccacagcgaggtgtggggctacggcttcctgtctgtgaccatcatcaacctggccagcctgctgggcctcatcctgacccccctcatcaagaagagctacttccccaagatcctgaccttctttgtgggcctggccatcggcaccctcttcagcaatgccatcttccagctgatccctgaggccttcggctttgaccccaaggtggacagctatgtggagaaggctgtggccgtgtttggaggcttctacctgctcttcttctttgagaggatgctgaagatgctgctgaagacctacggccagaatggccacacccactttggaaatgacaactttggcccccaggagaagacccaccagcccaaggccctgcctgccatcaacggggtgacctgctacgccaacccagctgtgacagaggccaacggccacatccactttgacaacgtgtctgtggtgtccctgcaggacggcaagaaggagcccagcagctgcacctgcctgaagggccccaagctgtctgagatcggcaccatcgcctggatgatcaccctgtgtgatgccctgcacaacttcattgatggcctggccatcggggccagctgcaccctgagcctgctgcagggcctgagcaccagcatcgccatcctgtgtgaggagttcccccatgagctgggggactttgtgatcctgctgaatgccggcatgagcacccggcaggccctgctcttcaacttcctgagcgcctgcagctgctacgtgggcctggccttcggcatcctggtgggcaacaactttgcccccaacatcatctttgccctggccggcggcatgttcctgtacatcagcctggccgacatgtttcctgagatgaatgacatgctgcgggagaaggtgacaggcaggaagacagacttcaccttcttcatgatccagaatgccggcatgctgaccggcttcaccgccatcctgctgatcaccctgtatgctggggagattgagctggagtag

SEQ ID NO: 50355 - DNA, 1383 bp, Artificial Sequence
  derived and/or modified sequence
atggcccccggccgggccgtggccggcctgctgctgctggccgccgctggcctgggaggtgtcgccgagggcccgggactcgccttctcagaagacgttctgtcagtgtttggggcaaatttgagcctctccgcagcccagctccaacaccttctagaacaaatgggcgccgcaagtcgggtcggagtgcccgaacccggacaactccattttaatcagtgtctgactgccgaggaaatcttctcactgcatggcttttcaaacgccacacaaattacctcttctaaatttagtgtgatttgcccagccgtcctccagcagcttaattttcacccttgcgaagatcggcctaaacacaagactaggccgagtcactcggaggtgtggggctacggattcctgagcgttacaatcattaatctcgccagtttactcggactgatcctcaccccattgataaagaagtcgtatttccccaaaatcctcacgttctttgtcgggctcgcgatcgggaccctcttcagcaatgccattttccaactgatcccggaagcctttggctttgatccaaaagtggactcgtacgttgaaaaggccgtggccgtttttggcggattttatttgctcttttttttcgaacgaatgctgaaaatgctgctgaaaacctatggacagaatggtcacacacactttggcaacgataacttcggaccccaagaaaagactcatcagccgaaggcactgccagccatcaatggggtgacctgttacgctaacccagcagtaaccgaagcaaacggacacatacactttgataatgtctctgtagtgtctctccaggacggaaaaaaagaacccagctcatgtacatgcttaaaaggcccaaaactttctgagatcggtaccatcgcctggatgattacgctgtgtgatgccctgcacaactttatagatggtttggccatcggagcctcctgcacactctccctgttgcaaggtctgtcaacgtcaattgcaatcttgtgtgaggaatttccccacgaactgggggattttgtgattcttctcaacgccggtatgagcacaagacaggcattgctcttcaatttcctatccgcttgctcctgctatgtcggtcttgcgttcggtatcctcgtgggcaacaactttgcccccaacatcattttcgccctagcaggaggaatgttcctgtacatatccctcgccgacatgttccccgagatgaatgatatgctgcgagagaaggtcaccggccgaaaaacagatttcacatttttcatgattcagaacgccggaatgctcaccggattcacggctattctgcttatcaccttgtatgccggggaaatcgagctggaatag

SEQ ID NO: 50356 - DNA, 1383 bp, Artificial Sequence
  derived and/or modified sequence
atggcccccggccgggccgtggccggcctgctgctgctggccgccgccgggctgggtggagtcgccgaggggcctggtttggcgttctctgaggatgtcctgtccgtatttggtgctaatctttccttgtcggctgcccagttgcagcacttactggagcagatgggggcagcttcccgcgttggcgtccccgagcccggccagctgcattttaatcaatgtcttacagccgaggaaattttctcgcttcatggcttttcaaacgctacacaaattactagttctaagttttctgtgatctgtccagcggtgttgcagcaactcaactttcacccctgtgaggaccgcccaaaacacaagacacgccctagtcattcagaggtttggggttacggcttcctctctgtgacaataatcaatttggccagcctcttgggactgattctgactccacttattaaaaaatcttactttcccaaaatcctgacttttttcgtcgggttggcaataggaaccttgttctctaatgcaatcttccaactgatacctgaggcttttggtttcgacccaaaggtggacagttatgtagagaaggctgttgcagtcttcggaggcttctatctgctgttcttctttgaacgaatgcttaaaatgctcctgaagacgtacggccagaacggacatactcactttgggaatgataactttggcccgcaggaaaaaacacatcagcccaaggcgctccctgctattaatggcgtgacctgctacgcgaacccagccgtgaccgaggctaacggccatatacactttgacaacgtcagtgtagtgtccctgcaggacgggaagaaggagccttctagctgtacgtgcttaaaagggccaaagctgtcggagattggcactatagcctggatgattacactgtgtgacgctctgcacaattttattgatggactggccatcggggcatcctgtacactctctctgctgcagggtctatcaacttcgatcgcaatcctatgtgaagagttccctcacgagttgggagacttcgtcatcctgctcaatgctggaatgtccactcgacaggctttgttgttcaattttctctccgcatgctcgtgctatgttggattggctttcggcattctcgtgggcaataattttgccccaaacataatcttcgccttggcaggcgggatgttcctctacatctccctggcagatatgtttcccgagatgaatgacatgctccgggaaaaagtgaccgggcgaaagaccgactttacattcttcatgatccagaacgccggaatgcttacaggcttcacggctattcttttgatcactctatatgcaggcgaaattgagcttgagtag

SEQ ID NO: 50357 - DNA, 1383 bp, Artificial Sequence
  derived and/or modified sequence
atggcgccagggagggccgtggcgggactgctgctcctggccgctgccggactcggtggtgttgcagagggtcccggtctcgcattttcggaggacgtgctgtcagtgttcggcgctaatctgtcacttagtgcagctcagctgcagcacttgctggagcagatgggcgcagcctctcgcgtcggggttccagaacccggacaactgcacttcaaccagtgcctcactgccgaagagatcttcagccttcatggattttccaacgccacccagatcacctcctcgaagttcagtgtgatttgccctgctgtgctccaacagcttaatttccatccatgcgaggaccgccctaaacacaaaacaagaccctctcacagcgaagtgtgggggtatggctttctgtcggtcactatcattaacctcgctagtcttctagggttgatcctgactcctcttatcaagaaatcatactttccgaagatactgacattttttgtcggcctggccattggcacactgttcagtaacgcaattttccaattgatccctgaggcctttggttttgatccaaaggtagactcttacgtggaaaaggcagtggccgtgtttggaggcttctaccttctgtttttctttgaacgtatgctgaagatgctgctgaagacatacggacagaacgggcacacccactttgggaatgataattttggccctcaggagaaaactcatcagcctaaagcactgcccgctataaatggcgtgacctgttacgctaatccagcagtgactgaagccaacgggcacatccatttcgacaatgtctccgtggtgtctttacaggatgggaagaaagagccatcgagctgcacgtgcctaaaagggcctaagttatcggaaatcggcacaatcgcttggatgattactctctgcgatgctttacataactttatcgatggactggccatcggcgcttcatgtacattatctttgctgcaggggctctctacctccatcgcgatcctgtgcgaagaattccctcatgagctgggggacttcgtcatattattaaacgcaggcatgtctactaggcaggccctgttgttcaactttctctcagcctgtagctgttacgttggcctggcatttggaattctggtgggcaacaatttcgctcccaacatcatctttgcgctggcgggaggaatgttcttgtacattagcctcgccgatatgttcccagaaatgaacgatatgctgagggagaaagtgactgggcgtaagactgacttcacattcttcatgattcagaacgcaggaatgctcactgggttcactgccattttgttaattacactatacgcaggtgaaattgagctggagtag

SEQ ID NO: 50358 - DNA, 1383 bp, Artificial Sequence
  derived and/or modified sequence
atggcccctggaagggctgtcgcaggcctactgctcctggccgcagcaggcctgggaggcgtcgccgagggacccggtctggcgttctccgaagacgttctgtccgtctttggcgcaaacctgtctctgagcgctgcacagctacaacacttactcgagcagatgggagcagcatcgcgtgtgggcgtcccagagcctgggcaactgcactttaatcagtgtttaaccgccgaggaaattttttctttacatggtttttcaaacgcaacacagatcacctctagcaagttctctgtgatctgccctgccgtcttacaacagctgaattttcacccgtgtgaagatcgtcctaagcataaaactcgaccgtcgcatagtgaagtgtggggttatggattcctctccgtgactataattaacctagccagcctcctaggcctgatcctgaccccgctaatcaagaagagctatttccctaaaattctgacattcttcgtgggcctcgcaattggaactcttttcagtaacgcgatctttcagctgatccctgaggcgttcggcttcgaccctaaagtagacagctatgtggagaaggccgtggcagtgttcggcggtttctatcttctttttttttttgaacggatgctaaagatgctgctcaagacctacggacagaatggccacacccacttcggcaatgacaactttggaccccaggaaaagactcatcagcctaaggccctgcctgctattaacggagttacttgctatgccaatccagctgttacagaagctaacggtcacatccattttgacaatgtgagtgtagtatcactgcaggacggaaagaaggagccctccagttgtacctgtttaaagggacccaagctgtcagagatcggaactattgcatggatgattaccttgtgtgatgctctgcacaacttcattgatggccttgccatcggagcctcatgcaccctgtctctgctgcagggactgtcaactagtattgccattctatgtgaagagtttccacacgagctgggagacttcgtcattctgctgaatgcgggtatgtctacgcgacaagccctgctctttaattttctttctgcctgctcctgctatgtgggcctggcattcggcatcctggtaggcaataactttgcccctaacatcattttcgccctggccggtggcatgttcttgtatataagtctcgcggacatgtttccagaaatgaacgacatgctgcgtgaaaaggtgaccgggcgaaagacggatttcaccttcttcatgattcagaacgctggcatgcttacaggattcaccgccatcctcctgatcaccctctacgcaggcgagattgaactggagtag

SEQ ID NO: 50359 - DNA, 3144 bp, Artificial Sequence
  derived and/or modified sequence
ccgcggacctgtcagagatacagaggttgtgggggcgggagacagaaagagagagagatccagagaccgagtcttacgttgacacgcagagagaaagacgcagagacagacaaacaaacagataggagaggctctccaggaggccggggggcccactccgcctatcgctcccctcggctacgctgccacttcaatgccccgcaggtcgcgagctgctgttctttcgaaggcgtcggagaaccaggggcgtcccgcgccacctctgactcggagcagcgccgagcactgacgctcccgcccttgggcaaggacgccagtgcgcccgcgcgcgtccctctgcgcggcagcccgtcgcgggccctcaaggggaagcccaggccaggatggccccgggtcgcgcggtggccgggctcctgttgctggcggccgccggcctcggaggagtggcggaggggccagggctagccttcagcgaggatgtgctgagcgtgttcggcgcgaatctgagcctgtcggcggcgcagctccagcacttgctggagcagatgggagccgcctcccgcgtgggcgtcccggagcctggccagctgcacttcaaccagtgtttaactgctgaagagatcttttcccttcatggcttttcaaatgctacccaaataaccagctccaaattctctgtcatctgtccagcagtcttacagcaattgaactttcacccatgtgaggatcggcccaagcacaaaacaagaccaagtcattcagaagtttggggatatggattcctgtcagtgacgattattaatctggcatctctcctcggattgattttgactccactgataaagaaatcttatttcccaaagattttgaccttttttgtggggctggctattgggactcttttttcaaatgcaattttccaacttattccagaggcatttggatttgatcccaaagtcgacagttatgttgagaaggcagttgctgtgtttggtggattttacctacttttcttttttgaaagaatgctaaagatgttattaaagacatatggtcagaatggtcatacccactttggaaatgataactttggtcctcaagaaaaaactcatcaacctaaagcattacctgccatcaatggtgtgacatgctatgcaaatcctgctgtcacagaagctaatggacatatccattttgataatgtcagtgtggtatctctacaggatggaaaaaaagagccaagttcatgtacctgtttgaaggggcccaaactgtcagaaatagggacgattgcctggatgataacgctctgcgatgccctccacaatttcatcgatggcctggcgattggggcttcctgcaccttgtctctccttcagggactcagtacttccatagcaatcctatgtgaggagtttccccacgagttaggagactttgtgatcctactcaatgcagggatgagcactcgacaagccttgctattcaacttcctttctgcatgttcctgctatgttgggctagcttttggcattttggtgggcaacaatttcgctccaaatattatatttgcacttgctggaggcatgttcctctatatttctctggcagatatgtttccagagatgaatgatatgctgagagaaaaggtaactggaagaaaaaccgatttcaccttcttcatgattcagaatgctggaatgttaactggattcacagccattctactcattaccttgtatgcaggagaaatcgaattggagtaatagaaaatggaagatggtgttgttaataaaggcatttaatagataaaaacatctccaaaaaggattttgaagctgatcctatttagttaaaaagataattttgctttcaactgtaggtccagaaaactaattattggcatcagtctgtgaaatagtccattatttgttgttaaaaatgcttcaaaaggttttcagtgtcagtctgagatgcctggtatataggagcctttgggaaatacctatttttcagtattccatgcatattagatatcaccatgaagcaagagacatgcattctataatcatgtagacactcagactcaggggaaaatacaagttatatcctgaaagcctttaaaactctatggtaggatcaaagattcaaatggtttcagagaggttttatttcaattaatttgttctagtgctttcaagagcaagtacatcaaaatgtagaaggtaaaatgtatgcaacactaatataaattattccaagtctttaaggagccaaagaaaaaaaagatttctcacagctttttgttctgttttgtatttcaattaggaacttgcagtattattttgaaaaccattctaaaataataggagttaggaaataaataaagttttgctagccctgctaagttcaggcttagaggcttatcgctaagtataaacttcaccagattccacgaaaagctggatagctttttttctgacttatgttgtggttgcacccctcacaaatggcagaacagtatgtaaagctggtaacacctcggtttcagtgcaccatgtgtttgctttgtgaaggtgaagaatatgttggtttagagaaagaaattggatgtaattttatgcaatttacttttaaagacaaacataactatttagcagagaatattttaataaatgcaaaacaacagctggactgctgtacatcaaggacagattaactggaaaacatatgttccttatgtgtgatcgagagccattcagaaaagacttcctttgtgttcagcctatacttttccatatggtataccttgaaaaaaattagcacaccatggttatttttctaccttttataaaagacagagcctgtttactcatttagaagatagagaaaattggtctaaaattgaacatcctagattcacactcccaagtcacttaaggtgatttgatggtgaggaaaatgattgacaaagcccaacaatgatctcaggaattacattttccaacagaccaaaaaatgttttcatgtagcagcaatgcagatttggtgaatatttaatatatattttagtatgtatttcactttatgactgacaattaaaaaatattgtttggccaaatagtaaacacccttttgaaacca

SEQ ID NO: 50360 - DNA, 3238 bp, Artificial Sequence
  derived and/or modified sequence
agtgtggttttagtttttcctaagaagtggcgtggtttggggctttatatccgggaggagcatatgtacgcaaatcctggggcgtttgcaaacccggatccggggcgtctggccccatgcccggccgggcgtttgagggctactgccacgcagcgtttctggagcctgccggctggtgccctggtggcctttatctctgtccccctttgtcctctttatctcaggctctccaggaggccggggggcccactccgcctatcgctcccctcggctacgctgccacttcaatgccccgcaggtcgcgagctgctgttctttcgaaggcgtcggagaaccaggggcgtcccgcgccacctctgactcggagcagcgccgagcactgacgctcccgcccttgggcaaggacgccagtgcgcccgcgcgcgtccctctgcgcggcagcccgtcgcgggccctcaaggggaagcccaggccaggatggccccgggtcgcgcggtggccgggctcctgttgctggcggccgccggcctcggaggagtggcggaggggccagggctagccttcagcgaggatgtgctgagcgtgttcggcgcgaatctgagcctgtcggcggcgcagctccagcacttgctggagcagatgggagccgcctcccgcgtgggcgtcccggagcctggccagctgcacttcaaccagtgtttaactgctgaagagatcttttcccttcatggcttttcaaatgctacccaaataaccagctccaaattctctgtcatctgtccagcagtcttacagcaattgaactttcacccatgtgaggatcggcccaagcacaaaacaagaccaagtcattcagaagtttggggatatggattcctgtcagtgacgattattaatctggcatctctcctcggattgattttgactccactgataaagaaatcttatttcccaaagattttgaccttttttgtggggctggctattgggactcttttttcaaatgcaattttccaacttattccagaggcatttggatttgatcccaaagtcgacagttatgttgagaaggcagttgctgtgtttggtggattttacctacttttcttttttgaaagaatgctaaagatgttattaaagacatatggtcagaatggtcatacccactttggaaatgataactttggtcctcaagaaaaaactcatcaacctaaagcattacctgccatcaatggtgtgacatgctatgcaaatcctgctgtcacagaagctaatggacatatccattttgataatgtcagtgtggtatctctacaggatggaaaaaaagagccaagttcatgtacctgtttgaaggggcccaaactgtcagaaatagggacgattgcctggatgataacgctctgcgatgccctccacaatttcatcgatggcctggcgattggggcttcctgcaccttgtctctccttcagggactcagtacttccatagcaatcctatgtgaggagtttccccacgagttaggagactttgtgatcctactcaatgcagggatgagcactcgacaagccttgctattcaacttcctttctgcatgttcctgctatgttgggctagcttttggcattttggtgggcaacaatttcgctccaaatattatatttgcacttgctggaggcatgttcctctatatttctctggcagatatgtttccagagatgaatgatatgctgagagaaaaggtaactggaagaaaaaccgatttcaccttcttcatgattcagaatgctggaatgttaactggattcacagccattctactcattaccttgtatgcaggagaaatcgaattggagtaatagaaaatggaagatggtgttgttaataaaggcatttaatagataaaaacatctccaaaaaggattttgaagctgatcctatttagttaaaaagataattttgctttcaactgtaggtccagaaaactaattattggcatcagtctgtgaaatagtccattatttgttgttaaaaatgcttcaaaaggttttcagtgtcagtctgagatgcctggtatataggagcctttgggaaatacctatttttcagtattccatgcatattagatatcaccatgaagcaagagacatgcattctataatcatgtagacactcagactcaggggaaaatacaagttatatcctgaaagcctttaaaactctatggtaggatcaaagattcaaatggtttcagagaggttttatttcaattaatttgttctagtgctttcaagagcaagtacatcaaaatgtagaaggtaaaatgtatgcaacactaatataaattattccaagtctttaaggagccaaagaaaaaaaagatttctcacagctttttgttctgttttgtatttcaattaggaacttgcagtattattttgaaaaccattctaaaataataggagttaggaaataaataaagttttgctagccctgctaagttcaggcttagaggcttatcgctaagtataaacttcaccagattccacgaaaagctggatagctttttttctgacttatgttgtggttgcacccctcacaaatggcagaacagtatgtaaagctggtaacacctcggtttcagtgcaccatgtgtttgctttgtgaaggtgaagaatatgttggtttagagaaagaaattggatgtaattttatgcaatttacttttaaagacaaacataactatttagcagagaatattttaataaatgcaaaacaacagctggactgctgtacatcaaggacagattaactggaaaacatatgttccttatgtgtgatcgagagccattcagaaaagacttcctttgtgttcagcctatacttttccatatggtataccttgaaaaaaattagcacaccatggttatttttctaccttttataaaagacagagcctgtttactcatttagaagatagagaaaattggtctaaaattgaacatcctagattcacactcccaagtcacttaaggtgatttgatggtgaggaaaatgattgacaaagcccaacaatgatctcaggaattacattttccaacagaccaaaaaatgttttcatgtagcagcaatgcagatttggtgaatatttaatatatattttagtatgtatttcactttatgactgacaattaaaaaatattgtttggccaaatagtaaacacccttttgaaacca

SEQ ID NO: 50361 - protein, 444 aa, Artificial Sequence
  derived and/or modified sequence
MAPGRAVAGLLLLAAAGLGGVAEGPGLAFSEDVLSVFGANLSLSAAQLQHLLEQMGAASRVGVPEPGQLHFNQCLTAEEIFSLHGFSNATQITSSKFSVICPAVLQQLNFHPCEDRPKHKTRPSHSEVWGYGFLSVTIINLASLLGLILTPLIKKSYFPKILTFFVGLAIGTLFSNAIFQLIPEAFGFDPKVDSYVEKAVAVFGGFYLLFFFERMLKMLLKTYGQNGHTHFGNDNFGPQEKTHQPKALPAINGVTCYANPAVTEANGHIHFDNVSVVSLQDGKKEPSSCTCLKGPKLSEIGTIAWMITLCDALHNFIDGLAIGASCTLSLLQGLSTSIAILCEEFPHELGDFVILLNAGMSTRQALLFNFLSACSCYVGLAFGILVGNNFAPNIIFALAGGMFLYISLADMFPEMNDMLREKIIKWATDDIKSQLHLLWIYTAR

SEQ ID NO: 50362 - DNA, 1335 bp, Artificial Sequence
  derived and/or modified sequence
atggcccccggcagagccgtggccggcctgctgctgctggccgccgccggcctgggcggcgtggccgagggccccggcctggccttcagcgaggacgtgctgagcgtgttcggcgccaacctgagcctgagcgccgcccagctgcagcacctgctggagcagatgggcgccgccagcagagtgggcgtgcccgagcccggccagctgcacttcaaccagtgcctgaccgccgaggagatcttcagcctgcacggcttcagcaacgccacccagatcaccagcagcaagttcagcgtgatctgccccgccgtgctgcagcagctgaacttccacccctgcgaggacagacccaagcacaagaccagacccagccacagcgaggtgtggggctacggcttcctgagcgtgaccatcatcaacctggccagcctgctgggcctgatcctgacccccctgatcaagaagagctacttccccaagatcctgaccttcttcgtgggcctggccatcggcaccctgttcagcaacgccatcttccagctgatccccgaggccttcggcttcgaccccaaggtggacagctacgtggagaaggccgtggccgtgttcggcggcttctacctgctgttcttcttcgagagaatgctgaagatgctgctgaagacctacggccagaacggccacacccacttcggcaacgacaacttcggcccccaggagaagacccaccagcccaaggccctgcccgccatcaacggcgtgacctgctacgccaaccccgccgtgaccgaggccaacggccacatccacttcgacaacgtgagcgtggtgagcctgcaggacggcaagaaggagcccagcagctgcacctgcctgaagggccccaagctgagcgagatcggcaccatcgcctggatgatcaccctgtgcgacgccctgcacaacttcatcgacggcctggccatcggcgccagctgcaccctgagcctgctgcagggcctgagcaccagcatcgccatcctgtgcgaggagttcccccacgagctgggcgacttcgtgatcctgctgaacgccggcatgagcaccagacaggccctgctgttcaacttcctgagcgcctgcagctgctacgtgggcctggccttcggcatcctggtgggcaacaacttcgcccccaacatcatcttcgccctggccggcggcatgttcctgtacatcagcctggccgacatgttccccgagatgaacgacatgctgagagagaagatcatcaagtgggccaccgacgacatcaagagccagctgcacctgctgtggatctacaccgccagatag

SEQ ID NO: 50363 - DNA, 1335 bp, Artificial Sequence
  derived and/or modified sequence
atggctcccggcagggccgtagcgggactgctcctgctggcagctgcgggactggggggggtggccgaaggcccaggcttagcttttagcgaagatgtgctctctgtctttggggccaacttatccctgagtgctgcacaattacagcaccttctggagcagatgggggccgcaagccgggttggagtgcctgagcctggacaacttcatttcaatcagtgcctcaccgccgaggaaattttcagtctgcatggcttttcaaatgccacccagattacctcctccaagttctcagtgatctgtccagctgtgctccagcaactcaactttcacccttgcgaggataggccaaaacataagacccgcccgtcccatagcgaagtctggggctacggctttttgtccgtgactatcataaatttagcatcattgctcggcctgattctgacaccactgatcaagaagtcttatttccctaagatccttacattctttgttggcctggcaattggaacattgttttccaatgcgattttccagttaattcctgaagcattcggtttcgaccctaaggtagatagttatgttgagaaagctgttgctgtgttcgggggcttttatcttctcttcttcttcgagcgcatgctcaaaatgttactcaagacctacgggcagaatggacacacgcattttggtaacgacaattttggcccacaggagaaaactcaccagcccaaggccctgccagctattaatggcgtgacttgctacgccaatccagccgtgactgaagccaacggtcatatccattttgataatgtgagcgtagtttccttgcaggatggtaaaaaggaaccgagcagttgcacgtgcctgaaaggacctaagctgagtgaaatcgggaccatcgcctggatgataacgctgtgtgatgctctgcacaattttatcgacgggctcgctattggtgcttcctgtactttgtcactgctccaaggactgtcaacatctatcgcaattctctgcgaggagttcccccacgaactaggcgattttgtgatcctcttgaacgctggcatgagtacacgacaagcgctcctgtttaatttcttgagcgcttgttcctgttacgtgggtctggcgtttgggatcttagttggcaataacttcgctcccaatatcatcttcgctttagccggcggcatgtttttatacattagtctggctgatatgtttcccgaaatgaacgatatgcttcgcgagaagatcatcaaatgggctaccgatgacatcaagagtcagctacatttgctgtggatctacaccgctagatag

SEQ ID NO: 50364 - DNA, 1335 bp, Artificial Sequence
  derived and/or modified sequence
atggcccctggccgggctgtggccggcctgctgctgctggccgccgccggcctgggcggcgtggccgagggccctggcctggccttctctgaagatgtgctgtctgtgtttggagccaacctgagcctgtctgctgcccagctgcagcacctgctggagcagatgggcgccgccagccgggtgggcgtgcctgagcccggccagctgcacttcaaccagtgcctgacagctgaggagatcttcagcctgcacggcttcagcaatgccacccagatcaccagcagcaagttcagcgtcatctgcccagctgtgctgcagcagctgaacttccacccctgtgaggaccggcccaagcacaagacccggcccagccacagcgaggtgtggggctacggcttcctgtctgtgaccatcatcaacctggccagcctgctgggcctcatcctgacccccctcatcaagaagagctacttccccaagatcctgaccttctttgtgggcctggccatcggcaccctcttcagcaatgccatcttccagctgatccctgaggccttcggctttgaccccaaggtggacagctatgtggagaaggctgtggccgtgtttggaggcttctacctgctcttcttctttgagaggatgctgaagatgctgctgaagacctacggccagaatggccacacccactttggaaatgacaactttggcccccaggagaagacccaccagcccaaggccctgcctgccatcaacggggtgacctgctacgccaacccagctgtgacagaggccaacggccacatccactttgacaacgtgtctgtggtgtccctgcaggacggcaagaaggagcccagcagctgcacctgcctgaagggccccaagctgtctgagatcggcaccatcgcctggatgatcaccctgtgtgatgccctgcacaacttcattgatggcctggccatcggggccagctgcaccctgagcctgctgcagggcctgagcaccagcatcgccatcctgtgtgaggagttcccccatgagctgggggactttgtgatcctgctgaatgccggcatgagcacccggcaggccctgctcttcaacttcctgagcgcctgcagctgctacgtgggcctggccttcggcatcctggtgggcaacaactttgcccccaacatcatctttgccctggccggcggcatgttcctgtacatcagcctggccgacatgtttcctgagatgaatgacatgctgcgggagaagatcatcaagtgggccacagatgacatcaagagccagctgcacctgctgtggatctacacagccaggtag

SEQ ID NO: 50365 - DNA, 1335 bp, Artificial Sequence
  derived and/or modified sequence
atggcccccggccgggccgtggccggcctgctgctgctggccgccgctggactcggcggtgttgcagaaggacccggtttggcgttctcagaggatgttctgagtgtgttcggcgccaatctctccctgtccgcagcgcagcttcaacatttattggagcaaatgggcgcagcttctcgtgtcggagtaccagaaccggggcaactgcatttcaatcagtgcctgaccgcagaagaaatcttctctctgcacggtttttccaatgccactcagataacaagctcaaagttctctgtgatctgtccagctgtcctccagcagctgaactttcacccgtgcgaggaccgtcctaaacacaagacacgcccatcccactcagaggtgtgggggtatggcttcctatctgtcaccatcattaaccttgcgtccctcctggggctgattctaacaccacttataaaaaagagctattttcccaaaatcttaaccttttttgtcggtctagccatcgggactttgttctcgaacgccatcttccagctcattcccgaggcctttgggttcgacccgaaagtcgactcatatgtggagaaagcagtggctgtcttcggcggcttctatttattgttctttttcgagcgcatgctcaaaatgttgctgaagacatacggacagaatgggcacacacacttcggtaacgacaactttggtccccaggagaagacccatcaaccaaaggccttgcctgctataaacggcgtcacctgctatgccaatccagccgtaactgaggccaatgggcacatccacttcgataacgtgtccgtggtctctcttcaggatgggaaaaaagagccttctagctgtacatgtctgaaaggacctaagctgtcggaaatcggcactattgcatggatgatcaccctctgtgacgccctgcataatttcattgacggccttgccattggggcctcctgtacactgagcttgctccagggcctgtccacatccattgccatcttatgtgaagagttcccgcatgagctgggcgatttcgtgattctactgaatgcaggcatgtcgactcgccaagccctactcttcaattttctgagtgcctgctcatgttacgtgggcctagctttcggaatcttggtaggcaataactttgctcctaacatcatcttcgctctggccggcgggatgtttctctatatcagtctagcagacatgttcccagaaatgaacgacatgctccgggagaagatcattaagtgggccaccgatgatataaaatctcagctccatctgctctggatctacaccgcgagatag

SEQ ID NO: 50366 - DNA, 1335 bp, Artificial Sequence
  derived and/or modified sequence
atggctccaggaagagcagtggctggcctgctacttttggccgctgcgggattagggggagtcgctgagggacctggccttgctttcagcgaagacgtcctatcagtattcggagctaacctttccctatctgccgcacaactgcaacacctattggagcagatgggcgcagcatcccgcgtgggtgtgccggaaccagggcagcttcacttcaatcaatgcttgactgcggaagagatctttagtctgcatggcttcagcaatgcaacccaaattacctctagcaaattcagtgtcatctgccccgcagtgctgcagcagctgaatttccatccctgcgaggatcgcccaaaacacaagacaagacccagccattctgaggtgtggggctatggcttcctctctgtgacaatcataaacctcgctagcctgctggggcttattctgactcccctcattaaaaagagctacttcccaaagatccttaccttttttgtgggactcgccattgggacactgttcagcaatgcaattttccagcttatcccagaggcatttggattcgatcccaaggttgattcctacgttgaaaaggctgttgccgtcttcggcggattctatctgttgttcttctttgagagaatgctaaagatgcttctgaagacatatggccagaacgggcacacccattttgggaacgacaacttcggtcctcaagagaaaacccatcagccgaaggcgctgcccgctattaatggggtgacctgttacgccaaccccgcagttacagaggctaatggacatatccatttcgataacgtctctgtggtctccctccaggacgggaagaaagaaccttctagctgtacttgtcttaagggacccaagctgtctgagatcggaacaatcgcctggatgataactttgtgcgatgccctgcacaacttcattgacggcctggcgatcggagcaagctgcacgttatcgctgttgcaaggtttgtccacatcaatcgccatcctctgcgaggagttcccccacgagctgggggactttgtgatattgttgaacgccggtatgagcacacgtcaggcactactctttaactttctctcagcctgcagctgctacgtaggtctcgcgttcgggatcctggtgggtaataatttcgctcccaacataatctttgctctggccggaggtatgttcttatatatttctctggccgacatgttccctgaaatgaatgacatgcttagagagaagattattaagtgggcaaccgacgatataaagagccaattacacctcctctggatttacactgcgcgttag

SEQ ID NO: 50367 - DNA, 4032 bp, Artificial Sequence
  derived and/or modified sequence
acttctaagtttgcggcggagagaataaagcagaaagacaggaagaggaggtggagttctacagctctccaggaggccggggggcccactccgcctatcgctcccctcggctacgctgccacttcaatgccccgcaggtcgcgagctgctgttctttcgaaggcgtcggagaaccaggggcgtcccgcgccacctctgactcggagcagcgccgagcactgacgctcccgcccttgggcaaggacgccagtgcgcccgcgcgcgtccctctgcgcggcagcccgtcgcgggccctcaaggggaagcccaggccaggatggccccgggtcgcgcggtggccgggctcctgttgctggcggccgccggcctcggaggagtggcggaggggccagggctagccttcagcgaggatgtgctgagcgtgttcggcgcgaatctgagcctgtcggcggcgcagctccagcacttgctggagcagatgggagccgcctcccgcgtgggcgtcccggagcctggccagctgcacttcaaccagtgtttaactgctgaagagatcttttcccttcatggcttttcaaatgctacccaaataaccagctccaaattctctgtcatctgtccagcagtcttacagcaattgaactttcacccatgtgaggatcggcccaagcacaaaacaagaccaagtcattcagaagtttggggatatggattcctgtcagtgacgattattaatctggcatctctcctcggattgattttgactccactgataaagaaatcttatttcccaaagattttgaccttttttgtggggctggctattgggactcttttttcaaatgcaattttccaacttattccagaggcatttggatttgatcccaaagtcgacagttatgttgagaaggcagttgctgtgtttggtggattttacctacttttcttttttgaaagaatgctaaagatgttattaaagacatatggtcagaatggtcatacccactttggaaatgataactttggtcctcaagaaaaaactcatcaacctaaagcattacctgccatcaatggtgtgacatgctatgcaaatcctgctgtcacagaagctaatggacatatccattttgataatgtcagtgtggtatctctacaggatggaaaaaaagagccaagttcatgtacctgtttgaaggggcccaaactgtcagaaatagggacgattgcctggatgataacgctctgcgatgccctccacaatttcatcgatggcctggcgattggggcttcctgcaccttgtctctccttcagggactcagtacttccatagcaatcctatgtgaggagtttccccacgagttaggagactttgtgatcctactcaatgcagggatgagcactcgacaagccttgctattcaacttcctttctgcatgttcctgctatgttgggctagcttttggcattttggtgggcaacaatttcgctccaaatattatatttgcacttgctggaggcatgttcctctatatttctctggcagatatgtttccagagatgaatgatatgctgagagaaaagataatcaaatgggctactgatgacatcaaatctcaacttcatttactttggatatatacggcaaggtagtaatttcattatctggagtatttcacctccacatctctgcaataccagcaccttcaacagtgattggttagaggttggcatatgacatagttatgaccattgagacgtgatgctgtgtgtgctgtgaagtttctcaaaaggagtaaggaagatacagcctcttctttctagggactttgtttgtaggtgtgacacctggagcagccattttgctactgttttgtttctaattgtgttccccgccgccctccccgctcgccccgaaaaacgacatgtttgagttctaatccccagtatttcagaatgtgaccttatttggaaatagagtcattgcaaatgtaatttgttaagatgagctcatactggagtagagtgggttcctgatctagtatgactggtattcttattaaaaagagaaatttgaatactagctacaccatgtaaagatgaaggcagagatcgtggtgatgcatctacaatgtcaacaattgccagcaaatcatcagaatctgggagagaggtatggaatgaattctctctcgcagccctaagaaggaaccaatcctgtgcacacctgaatcttggacttccagcctccacaactgtgagacaatacatttttgttatttaagctacccagttgtggcactttattactgcagttctagccgactaatacagctaccttgagaggaaatagcatggggatgaaggtgatgtgctgaagaagcacagcagaaagtggaaagatggtccatgaggacatccttagccactgaattgacaagcctcttccctggagtccctcttccttgggattttttttggtgtgtgtaataatcacttttcctaatggtgcaaaccattgtgagttgctctttgactgctagtaattaaagcaaactaaccaagtcagccctccccagtgttcctttttgcaatctaaattctgatgtccaactcctccctgggccactccctgtccccagatgtctctttgtatatctaaagaagaaaaagaaggataaatcctttttctcccaagagatctccctgcttttgtgaaaagcacaaagaagggcattatctaacttttctcatcattagaagtcaagcctggccgtgactcccgttatgacattttgatggccacattttatgagaaaagcccaaacagacagacctgtctgtaaattctttcatcctttgcattctttctttgactgtaccttagagagtgtttgattattgcaggggagatggaaaagaagcaggttctggcctatgctctagttcctcactttctggagttatcttttgggcctggagtctcttggagtgaggaaaggaagccatttttatactttacttatggtagagttaaacttcgtactcttaggaggctacatgcaatctccaagaggaagagagtgaagaggttaagaattatgccatcaaaatgtgctgctctggcatattgactatttgaattacagatattttaaaaacatcagatatgaagaggtcactctgatcttaattctgtgtcttaacagcaggagatgaaattcccacatgggagatggcctccctgtcacagaaggaataccattctccctatcaatgatgagaaattggaactgagagaattctgtatagaccttgttcaagtaattcttctattttaaacctccccacataatttagctgccttttcaaaactactgtcctttgtgcaaccagtatagaagcgattgactctcactgcatccttgggtcttcttttccctatatgggctcttttcccatatgggctcttatgtcctgtaaaacatgtattaaataaatttgtatgcttttctcccgttaacctgtcttacatcaatttaattcttgggcccaggtaggaccctaagaggacagaggtcgagttttgccacctctgcaagagaaaagagagatgcccagaccaccaggcctgggaaatctttgatttcccaggctttgaagtgggcactgtgtctgaacctggccctctgaaacttcctgttcctggacatcccagctgctaatgtgagttgcccttgcactggctcagggctgggacattaaaggaatttcccttttgttgacataacagtaggatggctatagctaacaataatatattatttagtttcaagtagctagaaggaacatatgaatgttcccaacacaaagaaatgacaactatttgagatgatggatatgctaataaccttaatctgattcctatacattatatgcatcacatatacatacattatatgtataacatcactatgtaccccataaatatgtgcaattattgtcaattaaacaaataaatttaaacaaacatt

SEQ ID NO: 50368 - protein, 481 aa, Artificial Sequence
  derived and/or modified sequence
MKLLLLHPAFQSCLLLTLLGLWRTTPEAHASSLGAPAISAASFLQDLIHRYGEGDSLTLQQLKALLNHLDVGVGRGNVTQHVQGHRNLSTCFSSGDLFTAHNFSEQSRIGSSELQEFCPTILQQLDSRACTSENQENEENEQTEEGRPSAVEVWGYGLLCVTVISLCSLLGASVVPFMKKTFYKRLLLYFIALAIGTLYSNALFQLIPEAFGFNPLEDYYVSKSAVVFGGFYLFFFTEKILKILLKQKNEHHHGHSHYASESLPSKKDQEEGVMEKLQNGDLDHMIPQHCSSELDGKAPMVDEKVIVGSLSVQDLQASQSACYWLKGVRYSDIGTLAWMITLSDGLHNFIDGLAIGASFTVSVFQGISTSVAILCEEFPHELGDFVILLNAGMSIQQALFFNFLSACCCYLGLAFGILAGSHFSANWIFALAGGMFLYISLADMMEFCSVAQAGVQWCHLSSLQPLPLGLKRLSCLSLPSN

SEQ ID NO: 50369 - DNA, 1446 bp, Artificial Sequence
  derived and/or modified sequence
atgaagctgctgctgctgcaccccgccttccagagctgcctgctgctgaccctgctgggcctgtggagaaccacccccgaggcccacgccagcagcctgggcgcccccgccatcagcgccgccagcttcctgcaggacctgatccacagatacggcgagggcgacagcctgaccctgcagcagctgaaggccctgctgaaccacctggacgtgggcgtgggcagaggcaacgtgacccagcacgtgcagggccacagaaacctgagcacctgcttcagcagcggcgacctgttcaccgcccacaacttcagcgagcagagcagaatcggcagcagcgagctgcaggagttctgccccaccatcctgcagcagctggacagcagagcctgcaccagcgagaaccaggagaacgaggagaacgagcagaccgaggagggcagacccagcgccgtggaggtgtggggctacggcctgctgtgcgtgaccgtgatcagcctgtgcagcctgctgggcgccagcgtggtgcccttcatgaagaagaccttctacaagagactgctgctgtacttcatcgccctggccatcggcaccctgtacagcaacgccctgttccagctgatccccgaggccttcggcttcaaccccctggaggactactacgtgagcaagagcgccgtggtgttcggcggcttctacctgttcttcttcaccgagaagatcctgaagatcctgctgaagcagaagaacgagcaccaccacggccacagccactacgccagcgagagcctgcccagcaagaaggaccaggaggagggcgtgatggagaagctgcagaacggcgacctggaccacatgatcccccagcactgcagcagcgagctggacggcaaggcccccatggtggacgagaaggtgatcgtgggcagcctgagcgtgcaggacctgcaggccagccagagcgcctgctactggctgaagggcgtgagatacagcgacatcggcaccctggcctggatgatcaccctgagcgacggcctgcacaacttcatcgacggcctggccatcggcgccagcttcaccgtgagcgtgttccagggcatcagcaccagcgtggccatcctgtgcgaggagttcccccacgagctgggcgacttcgtgatcctgctgaacgccggcatgagcatccagcaggccctgttcttcaacttcctgagcgcctgctgctgctacctgggcctggccttcggcatcctggccggcagccacttcagcgccaactggatcttcgccctggccggcggcatgttcctgtacatcagcctggccgacatgatggagttctgcagcgtggcccaggccggcgtgcagtggtgccacctgagcagcctgcagcccctgcccctgggcctgaagagactgagctgcctgagcctgcccagcaactag

SEQ ID NO: 50370 - DNA, 1446 bp, Artificial Sequence
  derived and/or modified sequence
atgaaactgctcctgctgcatccagcatttcagtcctgcctgttgcttaccctactagggctgtggcggactacccctgaagcgcacgctagctctctaggggccccagccatctccgcagcttcattcttgcaggacttaatccataggtacggagagggtgactctcttaccctgcagcagctgaaggccttgctcaaccatttggatgttggagttgggaggggcaacgtcactcagcatgtgcagggccatcgaaatttatcgacatgcttttcctctggggacttattcacggctcacaacttttccgaacagagtcgcatcgggtcctccgaactgcaagagttttgtcctacgattctccagcagctggattccagagcatgcacatcagaaaaccaggagaatgaagaaaacgaacagactgaagaaggcagacctagcgcagtggaagtttggggatacggtctgctgtgcgtgacagtgatctccctgtgtagcctgctgggagccagcgtcgtaccctttatgaaaaagaccttctacaagcgcctgctgctctattttatcgcgctggcaattggcactttgtacagcaatgccctgttccagcttattcctgaggctttcggtttcaatcctttggaagattactatgtatctaagagcgctgtggttttcggtggcttttatctgttcttcttcaccgagaaaatcttgaaaattttactcaagcagaagaacgagcaccatcacgggcattcacactacgcctcagaaagcctcccctccaagaaggatcaagaggagggagtgatggaaaagttgcagaatggggatctggatcatatgattccgcaacactgcagtagcgagctagatggcaaggcccctatggtggacgaaaaggtgatcgtgggctctctgtccgtccaggacctgcaggcttctcaatcggcttgttattggcttaaaggagtgcggtattctgacattggcaccctcgcgtggatgatcacgttgtctgatgggctgcataactttatcgacggcctcgcgatcggagcaagtttcacagtgagtgtttttcagggcatttctacatcagtagctatcctgtgcgaggaattcccccatgagctcggcgattttgttatcctcctgaatgctggaatgtctatccaacaagctctgttctttaacttcctgtcggcatgttgttgttacctgggtctggccttcgggatactggccgggagtcatttcagcgccaattggattttcgccctggcgggaggaatgttcctttatatttctctggccgacatgatggagttttgctcagtggcccaagctggggtccagtggtgccacctgtcatctctgcagcccctgccgttgggcctgaaacggctgtcctgcttatcactgccatctaactag

SEQ ID NO: 50371 - DNA, 1446 bp, Artificial Sequence
  derived and/or modified sequence
atgaagctgctgctgctgcacccagccttccagagctgcctgctgctgaccctgctgggcctgtggaggaccaccccagaggcccacgccagcagcctgggcgccccagccatctctgctgccagcttcctgcaggacctgatccacagatatggagagggggacagcctgaccctgcagcagctgaaggccctgctgaaccacctggatgtgggcgtgggcagaggaaatgtgacccagcacgtgcagggccacaggaacctgagcacctgcttcagcagcggggacctcttcaccgcccacaacttcagcgagcagagcagaattggcagcagcgagctgcaggagttctgccccaccatcctgcagcagctggacagccgggcctgcaccagcgagaaccaggagaatgaagaaaatgagcagacagaggagggccggcccagcgctgtggaggtgtggggctacggcctgctgtgtgtgaccgtcatcagcctgtgcagcctgctgggcgcctctgtggtgcccttcatgaagaagaccttctacaagaggctgctgctgtacttcatcgccctggccatcggcaccctgtacagcaatgccctcttccagctgatccctgaggccttcggcttcaaccccctggaggactactacgtgtccaagtctgctgtggtgtttggaggcttctacctgttcttcttcacagagaagatcctgaagatcctgctgaagcagaagaatgagcaccaccacggccacagccactacgccagcgagagcctgcccagcaagaaggaccaggaggagggcgtgatggagaagctgcagaatggagacctggaccacatgatcccccagcactgcagcagcgagctggatggcaaggcccccatggtggatgagaaggtgattgtgggcagcctgtctgtgcaggacctgcaggccagccagagcgcctgctactggctgaagggcgtgcgctacagcgacatcggcaccctggcctggatgatcaccctgagtgatggcctgcacaacttcattgatggcctggccatcggggccagcttcaccgtgtctgtgttccagggcatcagcacctctgtggccatcctgtgtgaggagttcccccatgagctgggggactttgtgatcctgctgaatgccggcatgagcatccagcaggccctcttcttcaacttcctgagcgcctgctgctgctacctgggcctggccttcggcatcctggccggcagccacttcagcgccaactggatctttgccctggccggcggcatgttcctgtacatcagcctggccgacatgatggagttctgcagcgtggcccaggccggcgtgcagtggtgccacctgagcagcctgcagcccctgcccctgggcctgaagaggctgagctgcctgagcctgcccagcaactag

SEQ ID NO: 50372 - DNA, 1446 bp, Artificial Sequence
  derived and/or modified sequence
atgaagctgctgctgctgcaccccgccttccagagctgcctgctgcttactctcttgggtctctggcgtactacccctgaggcgcatgcctcatcactgggcgcgccagctataagtgccgcttcattcctgcaggatctgattcaccggtacggcgagggggacagtctgaccctgcagcaactcaaggctttgttgaatcatctggacgtgggggtggggcgggggaacgtaacacaacacgtccaaggtcacaggaacttgagtacatgtttcagtagtggcgatctgttcaccgcgcataatttttcagagcagagccgcatcggatcaagcgaacttcaggagttctgccctactatcctgcaacaactggactcacgggcgtgcaccagtgaaaaccaggagaatgaggagaatgaacagaccgaagagggaaggcctagcgctgttgaagtctggggctatggcttgctgtgtgttaccgtgatctccctgtgttcgctactgggtgcctctgtcgtgcctttcatgaagaagacgttctacaagagactgcttctgtattttattgcactggccatagggacgttatatagtaatgcactatttcagcttatccccgaggccttcgggttcaatcccctggaggactattatgtgtctaagtcggcagtggtgtttgggggcttctatttattcttctttactgagaaaatcctcaaaatcctgctaaagcagaagaacgagcatcaccatggccactcccactatgcaagcgaaagccttcctagcaagaaagaccaggaagagggcgtgatggagaagttgcaaaacggcgacctggaccacatgatccctcaacactgttccagtgagcttgatggcaaagcccccatggtggacgaaaaggttatcgtgggctccctctctgtgcaggacctgcaagcgagccagtctgcctgctattggctcaaaggtgtgcgctacagcgacatcggaactctggcttggatgatcactctgtccgatggccttcacaattttatcgacggtttagcaattggtgctagttttactgtgagtgtcttccaaggcatcagcaccagcgttgccattctgtgcgaagaatttcctcatgagttgggcgattttgtcatccttttaaacgcaggaatgtccatccagcaagccctgttttttaatttcctgagcgcatgctgctgttatttaggcctcgcctttggcatattggctggctcccacttcagcgcaaactggatttttgcacttgcaggtgggatgtttttgtatatctccctcgctgacatgatggagttctgcagcgtggcccaagccggggtgcagtggtgtcacctgtcaagcttacagcctttgcctttaggcctcaaaagactatcatgtctgtcactgccctctaactag

SEQ ID NO: 50373 - DNA, 1446 bp, Artificial Sequence
  derived and/or modified sequence
atgaagctgctgctgctgcaccccgctttccagagctgcttgctgcttaccctgctggggctctggcgtaccacacccgaggctcacgctagtagtctgggagcacctgccatcagcgccgcttcctttctccaggacctgattcataggtatggagagggagactcgctgactctacagcaactgaaggccctactgaaccatctcgacgttggcgtgggacggggaaacgtaacccagcacgtgcaagggcatcgcaacctcagcacatgtttctcctctggcgacctgtttacagcccataacttttcagaacagtcccgtatcggtagctctgaactgcaggagttctgtccgacaatccttcagcaactggatagtcgcgcttgcacttcagaaaatcaggagaatgaagaaaatgaacagaccgaggagggcaggccgagcgctgtggaggtgtggggatacggcctattgtgcgttacggtgatcagtctttgcagcctgctgggagcaagcgtagtgccctttatgaagaaaacattctacaagcggctgctcctgtactttatcgccctggccattggcactctgtactcaaacgccttgttccagctgattcccgaagcttttgggttcaaccctttagaagattattacgtctctaagagcgccgtcgtgttcggagggttctacttatttttcttcactgaaaagatattgaagattctgcttaagcagaagaatgagcatcaccatggacacagccactacgctagcgagtccctgcccagcaaaaaggatcaagaggagggagttatggaaaaattgcaaaatggggatctggaccacatgattccacagcactgtagtagcgaactggacggcaaagccccaatggttgacgaaaaggttatagtgggatccctgtccgtgcaggatctgcaggcatcccagagtgcttgctattggctgaagggcgttaggtactctgatatcgggacactggcttggatgatcacgttaagcgatgggttgcacaactttatcgacggattagccatcggcgcttccttcactgtatccgtgttccaaggtatatcaactagcgttgccattctgtgcgaggagttccctcacgagttgggagattttgtcatcctactgaatgctggcatgagcatccagcaggctcttttcttcaattttctcagtgcttgctgctgctacctggggttagcatttgggattctggcaggaagtcactttagcgccaattggatctttgctctggctgggggaatgtttctctacattagtcttgccgatatgatggaattttgcagcgttgcccaggcaggggtgcagtggtgtcacttgtcatccctccaaccccttcctctaggtctgaagcggctcagctgtctgtctctgccctcaaattag

SEQ ID NO: 50374 - DNA, 1708 bp, Artificial Sequence
  derived and/or modified sequence
cagtgaggggggtcggcgcgcgtgtctacgcggacgcaccggctaagctgcttctgccgccgccggccgcctgggaccttgcggtgaggctgcgcggggccgaggccgcctccgagcgccaggtttattcagtcaccatgaagctgctgctgctgcacccggccttccagagctgcctcctgctgaccctgcttggcttatggagaaccacccctgaggctcacgcttcatccctgggtgcaccagctatcagcgctgcctccttcctgcaggatctaatacatcggtatggcgagggtgacagcctcactctgcagcagctgaaggccctactcaaccacctggatgtgggagtgggccggggtaatgtcacccagcacgtgcaaggacacaggaacctctccacgtgctttagttctggagacctcttcactgcccacaatttcagcgagcagtcgcggattgggagcagcgagctccaggagttctgccccaccatcctccagcagctggattcccgggcctgcacctcggagaaccaggaaaacgaggagaatgagcagacggaggaggggcggccaagcgctgttgaagtgtggggatacggtctcctctgtgtgaccgtcatctccctctgctccctcctgggggccagcgtggtgcccttcatgaagaagaccttttacaagaggctgctgctctacttcatagctctggcgattggaaccctctactccaacgccctcttccagctcatcccggaggcatttggtttcaaccctctggaagattattatgtctccaagtctgcagtggtgtttgggggcttttatcttttctttttcacagagaagatcttgaagattcttcttaagcagaaaaatgagcatcatcatggacacagccattatgcctctgagtcgcttccctccaagaaggaccaggaggagggggtgatggagaagctgcagaacggggacctggaccacatgattcctcagcactgcagcagtgagctggacggcaaggcgcccatggtggacgagaaggtcattgtgggctcgctctctgtgcaggacctgcaggcttcccagagtgcttgctactggctgaaaggtgtccgctactctgatatcggcactctggcctggatgatcactctgagcgacggcctccataatttcatcgatggcctggccatcggtgcttccttcactgtgtcagttttccaaggcatcagcacctcggtggccatcctctgtgaggagttcccacatgagctaggagactttgtcatcctgctcaacgctgggatgagcatccaacaagctctcttcttcaacttcctttctgcctgctgctgctacctgggtctggcctttggcatcctggccggcagccacttctctgccaactggatttttgcgctagctggaggaatgttcttgtatatttctctggctgatatgatggagttttgctctgttgcccaggctggagtgcaatggtgccatctcagctcactgcaacctctgccgcttgggttgaagcgattatcctgtctaagcctcccgagtaactgagccagccatgtttgttaataaaaatggggacaatactgtatatatatggttatattttagctttttcacttttcagtatctcctgaggcttttctcatgtcattaaatatttttctaatttaaaa

SEQ ID NO: 50375 - protein, 414 aa, Artificial Sequence
  derived and/or modified sequence
MGGLSARPTAGRTDPAGTCWGQDPGSKMATVIPGPLSLGEDFYREAIEHCRSYNARLCAERSLRLPFLDSQTGVAQNNCYIWMEKTHRGPGLAPGQIYTYPARCWRKKRRLNILEDPRLRPCEYKIDCEAPLKKEGGLPEGPVLEALLCAETGEKKIELKEEETIMDCQKQQLLEFPHDLEVEDLEDDIPRRKNRAKGKAYGIGGLRKRQDTASLEDRDKPYVCDICGKRYKNRPGLSYHYTHTHLAEEEGEENAERHALPFHRKNNHKQFYKELAWVPEAQRKHTAKKAPDGTVIPNGYCDFCLGGSKKTGCPEDLISCADCGRSGHPSCLQFTVNMTAAVRTYRWQCIECKSCSLCGTSENDDQLLFCDDCDRGYHMYCLSPPMAEPPEGSWSCHLCLRHLKEKASAYITLT

SEQ ID NO: 50376 - DNA, 1245 bp, Artificial Sequence
  derived and/or modified sequence
atgggtggcctgagcgcaagaccaaccgccggacgaacagatcccgccggcacatgttggggtcaagatcctggatcaaagatggcaaccgtgatccctggacccctctccttaggggaagatttctatcgcgaggccatagagcattgtcgctcctataacgcacgcctgtgtgctgaaaggtcattgcggttgccattcttggacagccagacaggcgtggcccagaacaactgctacatttggatggaaaagacacacagaggcccgggactcgcccctggtcagatttacacataccccgctagatgctggcggaagaagcgaaggctgaatatactggaggatccacgactccgaccctgtgaatataaaatcgattgcgaggcccccttgaaaaaagagggaggcctgcctgaaggtcctgttctagaagccttactatgcgcagagactggcgagaagaagatcgagttgaaggaggaagaaacaatcatggactgccagaaacagcagctattagaattccctcacgacctcgaagtggaagacctggaggacgatatacccagacgtaaaaatagagctaaggggaaagcctacggcatcggtggcctgcgcaaacgacaagacacggccagtctggaagatagagacaagccatacgtatgtgatatatgtggaaagcgctacaaaaatcggccaggcctatcttaccactacacccatacccacctcgccgaggaggaaggcgaagaaaatgctgagaggcacgcattaccctttcatcgtaagaacaaccacaaacagttctacaaggaactggcatgggtcccggaagctcagaggaagcatactgcaaagaaggctccagacgggaccgttataccaaatggatactgcgatttttgcctgggcggttctaaaaagacagggtgccccgaggacttgatctcttgtgcagactgcggacgatcagggcaccccagctgtctgcagttcactgtgaatatgacagccgccgtgcgcacctaccgctggcagtgtattgagtgcaagtcttgttcattatgcggtacatcagagaacgacgatcaattgctcttctgcgacgattgtgaccggggttatcatatgtactgcctgagcccacccatggccgagcctcctgagggtagctggtcatgccacctgtgtttaaggcatcttaaggagaaggcttcagcttatattacactgacctag

SEQ ID NO: 50377 - DNA, 1245 bp, Artificial Sequence
  derived and/or modified sequence
atgggcggcctcagcgcccgtcctaccgccggacggaccgaccctgcgggcacttgttgggggcaggatcctggcagcaagatggcaactgtgataccaggtccgcttagcctgggggaagacttttatcgcgaagcgattgagcattgtcgctcctacaacgcccgactctgcgccgagagatcgcttcggctcccctttctcgacagccagactggtgtcgcacagaataactgttacatctggatggagaagactcacaggggcccagggctagctcctggacagatctatacctatcccgcccgctgttggcggaaaaagcgtagactcaacatcctcgaagaccctcgcctgcggccttgcgaatataagattgactgcgaggcaccactaaaaaaggaaggtggtttacccgaagggcctgtgttggaggccctgttatgtgccgagacaggagagaagaagatcgagctgaaagaggaggaaaccatcatggactgccagaagcaacagctcctagaatttccccatgatctggaggtggaggatctggaagacgatattcccaggagaaaaaatagagcgaagggtaaagcttatggcatcggaggccttagaaagaggcaagacaccgctagcctcgaggatcgagataaaccttatgtctgcgacatttgcggtaagcgctacaagaacaggcccggcctgagttaccactacactcatacccacctggcggaggaagaaggcgaggagaatgcagagaggcatgctttaccattccacagaaaaaacaatcataagcagttctataaagagcttgcttgggtgcctgaggctcaacgaaagcacacagccaagaaagcacccgatggcactgtcattccaaatggatactgcgacttttgtttaggaggctccaaaaagactggatgccctgaggaccttatctcttgcgctgattgcggtcgatcaggccacccgtcctgtctgcagtttaccgtgaacatgacagccgcggtccgtacttatcgatggcaatgtatagaatgcaaaagttgtagcctttgtggcacaagcgaaaatgatgaccagctgctgttctgcgacgactgcgatcgtgggtatcacatgtattgtctttctccccctatggccgagccacctgagggctcctggtcgtgccatctatgtctgagacacctgaaggaaaaagcatcagcttacatcactttgacgtag

SEQ ID NO: 50378 - DNA, 1245 bp, Artificial Sequence
  derived and/or modified sequence
atgggcggcctgagcgcccggcccacagctggccgcacagatcctgctggcacctgctggggccaggaccccggcagcaagatggccaccgtcatccctggccccctgagcctgggggaggacttctaccgggaggccatcgagcactgccgcagctacaatgcccggctgtgtgccgagaggagcctgcggctgcccttcctggacagccagacaggagtggcccagaacaactgctacatctggatggagaagacccaccggggccctggcctggcccctggccagatctacacctacccagcccgctgctggaggaagaagaggcggctgaacatcctggaggacccccggctgcggccctgtgagtacaagattgactgtgaggcccccctgaagaaggagggcggcctgcctgagggccctgtgctggaggccctgctgtgtgccgagaccggggagaagaagattgagctgaaggaggaggagaccatcatggactgccagaagcagcagctgctggagttcccccatgacctggaggtggaggacctggaggatgacatccccaggaggaagaacagagccaagggcaaggcctatggaattggaggcctgaggaagaggcaggacacagccagcctggaggaccgggacaagccctacgtgtgtgacatctgtgggaagcgctacaagaacagacctggcctgagctaccactacacccacacccacctggccgaggaggagggggaggagaatgctgagagacatgccctgcccttccacaggaagaacaaccacaagcagttctacaaggagctggcctgggtgcctgaggcccagaggaagcacacagccaagaaggccccagatggcaccgtcatccccaacggctactgtgacttctgcctgggcggcagcaagaagacaggctgcccagaagatctcatcagctgtgccgactgtggccgcagcggccaccccagctgcctgcagttcaccgtgaacatgacagctgctgtgaggacctaccgctggcagtgcatcgagtgcaagagctgcagcctgtgtggcaccagtgaaaatgatgaccagctgctcttctgtgatgactgtgaccggggctaccacatgtactgcctgagcccccccatggccgagcccccagagggctcctggagctgccacctgtgcctgcggcacctgaaggagaaggccagcgcctacatcaccctgacctag

SEQ ID NO: 50379 - DNA, 1245 bp, Artificial Sequence
  derived and/or modified sequence
atgggcggcctgagcgcccggcccaccgccggccggaccgaccccgccggcacttgctggggccaggatcccgggagcaagatggccaccgttattcccggtcccctgtcattgggagaggacttctaccgggaagccatcgaacattgccgttcgtacaacgcccgcctgtgcgctgagcgatccctgcggctgccttttctcgactcacagaccggggttgctcagaataactgctatatctggatggagaaaacccatagaggccccggactggccccaggacagatttacacctacccagccaggtgttggagaaagaagcggcgccttaacatcctggaagaccctcggctgcgaccctgcgagtataaaattgactgcgaggccccactgaagaaggagggcggcctacccgagggcccggtgctggaggctttgctatgcgcggagaccggggaaaaaaagatagagctgaaggaggaggaaaccatcatggattgtcaaaagcaacagctgttggagttcccacatgaccttgaggtcgaggaccttgaagatgatatcccaagacgaaagaatcgagccaaggggaaagcatatgggataggggggctgaggaagagacaggacaccgcaagtctggaagacagggataagccctacgtgtgtgatatctgcgggaaaaggtataagaaccgacccggcttaagctaccactatacccacacccacctggctgaggaagagggggaggaaaacgctgaacggcacgctctgccattccaccggaaaaacaatcacaagcagttttataaggaactggcttgggtgcccgaagcccaacgcaagcatacagcaaaaaaagctcctgatgggaccgtcattcctaatgggtattgcgacttttgcttgggcggctctaagaaaacaggatgtcctgaagacttgatatcttgtgccgactgtggccggtcagggcaccctagctgcctccaatttaccgtcaatatgactgctgccgtgaggacttatcggtggcaatgcatcgagtgtaagtcttgctccctgtgcggcacgtcagaaaatgacgaccagttgctcttctgcgatgattgtgaccgaggatatcatatgtattgcctgagtccgccaatggccgagcctcctgaagggagttggtcgtgccacttgtgtttaagacatctcaaggagaaggctagcgcgtatattaccttgacttag

SEQ ID NO: 50380 - DNA, 1245 bp, Artificial Sequence
  derived and/or modified sequence
atgggcggcctgagcgcccggcccaccgccggccggaccgaccccgcaggaacttgctggggacaggacccaggctccaagatggccaccgtaattcccggaccactgtccctgggcgaagacttttaccgggaagctatcgagcattgtcgctcatacaacgctcggctgtgcgcagaaaggtctctgcggctgcccttcctggactcccagacaggggtggcccagaataattgttacatttggatggagaaaacccaccgtggacccggcttggccccgggccagatctatacttaccccgcacgttgttggaggaaaaaacggcgtctcaatatactggaggacccacgactccgaccgtgtgagtataagattgactgcgaggccccgttgaagaaagagggcggactcccagaaggaccagtccttgaagcgctgttgtgcgcagagacaggcgaaaagaagatcgaactcaaggaagaggaaacaatcatggattgccaaaagcagcagctcttggagtttccccatgacctagaggtcgaagaccttgaggatgatatcccgcgccgaaagaatcgggccaaaggaaaagcctacggaattggtggactgagaaaacgacaggacaccgcatctctggaagaccgcgacaaaccatatgtttgcgacatctgcggaaaaagatataaaaatcggcctggcctttcctaccactacacccacacacatttggctgaggaagagggagaggaaaacgcggagaggcacgcactgccgtttcatcggaaaaacaatcacaagcaattctataaagagctggcctgggtgccagaggcgcagcggaagcatacagccaagaaggcccctgacggtacggtcatccctaatggctactgcgacttctgtcttggaggctcaaaaaagactggctgccctgaggacctgatatcttgcgctgactgcggccgatccggacacccatcatgccttcagtttaccgtgaatatgacagccgctgtccgcacttaccggtggcagtgtatcgagtgtaaaagttgctcattgtgtgggaccagcgaaaacgatgatcagctcttgttttgcgatgattgcgatcgcggttaccatatgtactgtttatccccccccatggcagagcctcctgagggatcctggagctgtcatctgtgtctccggcatctgaaggaaaaagcgtccgcatacattactctcacgtag

SEQ ID NO: 50381 - DNA, 1245 bp, Artificial Sequence
  derived and/or modified sequence
atgggcggtctatctgcgaggccaacggctgggcgaactgatcctgctgggacctgctggggtcaggatcccggtagcaagatggccactgtgattccaggtcctctgtcactcggtgaagatttctatagagaggcaattgaacattgccgttcttataacgcacgcctatgtgccgaaagatccctccgtcttccatttctggatagtcaaaccggcgtcgcgcagaataattgctacatctggatggaaaagacccatcgaggccctgggctggcgcctggacaaatttacacctatcctgcacgatgttggcggaagaagcggagactgaatatcctcgaagaccccagattaagaccttgcgaatacaagattgactgcgaggctccattgaagaaagagggcggactgcccgaggggcctgtgctggaagcactcctgtgcgcggagaccggcgaaaagaaaatagaactgaaggaagaggagactataatggattgccagaaacaacagcttctggagttcccacacgatctcgaggtggaagacctcgaggatgacatccccagacgcaaaaaccgggctaagggaaaagcttacggtatcggcggactcaggaaaagacaggacactgccagcttggaggaccgagataagccctatgtgtgtgacatatgtggcaagaggtacaaaaaccgccctgggttaagttaccactatacacacacacacctcgcagaggaggagggggaggagaatgccgagcgacacgcgctccctttccatcgcaagaacaaccacaagcaattttacaaggagcttgcctgggttccagaggcgcagagaaagcacaccgccaagaaagctcctgacggcacagtcatccccaatggctactgtgacttctgcttgggcggatccaagaaaacgggctgccctgaagatcttattagctgtgcggattgtggacggagtggtcatccgtcgtgtttgcagttcacagtcaatatgacagcagcggttcgcacttaccggtggcaatgcatcgagtgtaagtcctgctccctgtgcggaacaagcgagaacgacgatcagctgcttttttgcgacgactgtgaccggggataccacatgtactgcctgtccccacctatggctgagcccccagaaggctcatggtcatgtcacttgtgtcttaggcacctgaaggagaaggcttctgcgtacatcactctgacctag

SEQ ID NO: 50382 - DNA, 1245 bp, Artificial Sequence
  derived and/or modified sequence
atgggagggctcagcgccaggccaacagccggaaggaccgaccctgctggcacctgctggggccaggacccgggatccaagatggccaccgtcataccaggcccactctccctgggagaagatttctatcgggaagcaattgagcactgccgtagctacaatgctaggctgtgcgcggagcgcagtctgcggcttccttttctggatagtcaaacgggcgtggcccagaataattgttacatctggatggagaagacccacaggggaccaggcctggcccctggacagatctatacatatccagcccgatgttggcgtaaaaagcgccgtttgaacatcctcgaggaccctagactgagaccatgcgagtacaagatcgactgtgaggccccattgaagaaagagggcggtctgcccgagggcccagtcctggaggcactgctgtgcgccgaaactggggaaaagaaaattgagcttaaagaagaggaaactattatggattgtcagaaacagcagcttcttgagttcccgcacgacctggaagttgaggacctagaggatgacatccctaggcgtaaaaacagagccaaggggaaagcatatggcattggaggactcaggaaaagacaggacacagcctccttggaggacagggacaaaccctacgtatgcgatatctgcgggaagcgatacaagaaccgacctgggttgagctaccattacactcacacccaccttgcggaggaagaaggggaggagaacgctgaaaggcacgctttgccattccatagaaaaaacaaccacaaacagttttataaggaactggcgtgggttccagaagcacagcgcaaacacaccgcgaagaaagcaccggatggaaccgttatccctaacggttactgtgacttttgcctgggcggatctaagaaaacaggctgccctgaagacctcatcagctgtgctgactgtggaaggagcggccacccatcctgcttgcagttcactgtgaatatgaccgccgctgtgcgcacatacagatggcagtgtattgagtgcaaatcttgttcattatgcggaacgtccgaaaatgatgaccagcttcttttctgcgacgactgtgaccgaggctaccatatgtattgcctgagtcctccaatggccgaaccccctgagggatcatggtcttgtcatctatgtctcagacatctcaaagaaaaggctagtgcttacatcacactcacttag

SEQ ID NO: 50383 - DNA, 1632 bp, Artificial Sequence
  derived and/or modified sequence
gtgctcccgccccccgggaatgaatggatgggcggcctcagcgcccgcccgaccgctgggaggaccgacccggcggggacctgctgggggcaggacccggggagcaagatggccactgtcatccctggccccctgagcctaggcgaggacttctaccgcgaggccatcgagcactgccgcagttacaacgcgcgcctgtgcgccgagcgcagcctgcgactgcccttcctcgactcgcagaccggcgtggcccagaacaactgctacatctggatggagaagacccaccgcgggccgggtttggccccgggacagatttacacgtaccccgcccgctgttggaggaagaaacggagactcaacatcctggaggaccccagactcaggccctgcgagtacaagatcgactgtgaagcacccctgaagaaggagggtggcctcccggaagggccggtcctcgaggctctactgtgtgcagagacgggggagaagaagattgagctgaaggaggaggagaccattatggactgtcagaaacagcagttgctggagtttccgcatgacctcgaggtggaagacttggaggatgacattcccaggaggaagaacagggccaaaggaaaggcatatggcatcgggggtctccggaaacgccaggacaccgcttccctggaggaccgagacaagccgtatgtctgtgatatctgtgggaaacggtataagaaccggccggggctcagctaccactacacccacacccacctggccgaggaggagggggaggagaacgccgaacgccacgccctgcccttccaccggaaaaacaaccataaacagttttacaaagaattggcctgggtccctgaggcacaaaggaaacacacagccaagaaggcgcccgacggcactgtcatccccaacggctactgtgacttctgcctggggggctccaagaagacggggtgtcccgaggacctcatctcctgtgcggactgtgggcgatcaggacacccctcgtgtttacaattcacggtgaacatgacggcagccgtgcggacctaccgctggcagtgcatcgagtgcaaatcctgcagcctgtgcggaacctccgagaacgacgaccagctgctgttttgtgatgactgcgatcggggttaccacatgtactgcctgagtccccccatggcggagcccccggaagggagctggagctgtcacctctgtctccggcacctgaaggaaaaggcttctgcttacatcaccctcacctaggccggctcggctcgccgcgactctggggtggtgctcgcctacctgcctctccgagctcctcaattctcccccaccctgaacatcccgcagggggagggggagagggggaagccgagagggggctgggccaccccctcccctctgtgcaagtggaatgtctgccctgtgggtgggtgggcccggccagggcctctccctccctccctccctctctgtcccttggcaaatggacaccaggggcttctcccctcaaagccataccccgcctctgggcgggcatggggggtggtgggtgccagccaggggcatggacagagcctttttctaaagaaaaagacaaaaagttaaaaaaaaaaaaaa

SEQ ID NO: 50384 - DNA, 2326 bp, Artificial Sequence
  derived and/or modified sequence
gtgctcccgccccccgggaatgaatggatgggcggcctcagcgcccgcccgaccgctgggaggaccgacccggcggggacctgctgggggcaggacccggggagcaagatggccactgtcatccctggccccctgagcctaggcgaggacttctaccgcgaggccatcgagcactgccgcagttacaacgcgcgcctgtgcgccgagcgcagcctgcgactgcccttcctcgactcgcagaccggcgtggcccagaacaactgctacatctggatggagaagacccaccgcgggccgggtttggccccgggacagatttacacgtaccccgcccgctgttggaggaagaaacggagactcaacatcctggaggaccccagactcaggccctgcgagtacaagatcgactgtgaagcacccctgaagaaggagggtggcctcccggaagggccggtcctcgaggctctactgtgtgcagagacgggggagaagaagattgagctgaaggaggaggagaccattatggactgtcagaaacagcagttgctggagtttccgcatgacctcgaggtggaagacttggaggatgacattcccaggaggaagaacagggccaaaggaaaggcatatggcatcgggggtctccggaaacgccaggacaccgcttccctggaggaccgagacaagccgtatgtctgtgatatctgtgggaaacggtataagaaccggccggggctcagctaccactacacccacacccacctggccgaggaggagggggaggagaacgccgaacgccacgccctgcccttccaccggaaaaacaaccataaacagttttacaaagaattggcctgggtccctgaggcacaaaggaaacacacagccaagaaggcgcccgacggcactgtcatccccaacggctactgtgacttctgcctggggggctccaagaagacggggtgtcccgaggacctcatctcctgtgcggactgtgggcgatcaggacacccctcgtgtttacaattcacggtgaacatgacggcagccgtgcggacctaccgctggcagtgcatcgagtgcaaatcctgcagcctgtgcggaacctccgagaacgacgaccagctgctgttttgtgatgactgcgatcggggttaccacatgtactgcctgagtccccccatggcggagcccccggaagggagctggagctgtcacctctgtctccggcacctgaaggaaaaggcttctgcttacatcaccctcacctaggccggctcggctcgccgcgactctggggtggtgctcgcctacctgcctctccgagctcctcaattctcccccaccctgaacatcccgcagggggagggggagagggggaagccgagagggggctgggccaccccctcccctctgtgcaagtggaatgtctgccctgtgggtgggtgggcccggccagggcctctccctccctccctccctctctgtcccttggcaaatggacaccaggggcttctcccctcaaagccataccccgcctctgggcgggcatggggggtggtgggtgccagccaggggcatggacagagcctttttctaaagaaaaagacaaaaagttaaaaaaaaaaaaaagaagaaaagaaaagaagttaatatatacaaagagtcctccaaggcctggctgggtggaggggcgctgctgagagtgtccaccgggcacccgcctctgccggccccccgccgggcgccccaaccccaatttctggagctgcagccgtcccgcgccccacccaaggtgggcgccttcccctcttgtgcccagggcggtgggcgtggtgtccacccgcccctcctggtgcccacggtggatactgcatgatgtgaaccttggttttgaactctgttcctgcccctccccgaccgccccagcctgtgcccgccccgtgcctgccgtggctggtgggtggcggtggtggggccgggtgggcccccgcccagcgcctgctggaatgagaagcacagactccgccacggactccttttctctccctcctcccgccccgccaggcctggcggcccccgcccccctcgctggccattttgggggagtgagggggcgtggttgtttcttgtggttgtgtgtgtttgttgttcgggttttaaaaaagggaaactgagactgcaggtgggggaggtggtgggttttggggggatgtcccctaatccaggagtgccccctcacttgtcaccgagtctcctctattgcctgcctctgctgtgaattaacttgttctgtgtattaaactgggcctgacccctctgccca

SEQ ID NO: 50385 - DNA, 1245 bp, Artificial Sequence
  derived and/or modified sequence
atgggcggcctgagcgccagacccaccgccggcagaaccgaccccgccggcacctgctggggccaggaccccggcagcaagatggccaccgtgatccccggccccctgagcctgggcgaggacttctacagagaggccatcgagcactgcagaagctacaacgccagactgtgcgccgagagaagcctgagactgcccttcctggacagccagaccggcgtggcccagaacaactgctacatctggatggagaagacccacagaggccccggcctggcccccggccagatctacacctaccccgccagatgctggagaaagaagagaagactgaacatcctggaggaccccagactgagaccctgcgagtacaagatcgactgcgaggcccccctgaagaaggagggcggcctgcccgagggccccgtgctggaggccctgctgtgcgccgagaccggcgagaagaagatcgagctgaaggaggaggagaccatcatggactgccagaagcagcagctgctggagttcccccacgacctggaggtggaggacctggaggacgacatccccagaagaaagaacagagccaagggcaaggcctacggcatcggcggcctgagaaagagacaggacaccgccagcctggaggacagagacaagccctacgtgtgcgacatctgcggcaagagatacaagaacagacccggcctgagctaccactacacccacacccacctggccgaggaggagggcgaggagaacgccgagagacacgccctgcccttccacagaaagaacaaccacaagcagttctacaaggagctggcctgggtgcccgaggcccagagaaagcacaccgccaagaaggcccccgacggcaccgtgatccccaacggctactgcgacttctgcctgggcggcagcaagaagaccggctgccccgaggacctgatcagctgcgccgactgcggcagaagcggccaccccagctgcctgcagttcaccgtgaacatgaccgccgccgtgagaacctacagatggcagtgcatcgagtgcaagagctgcagcctgtgcggcaccagcgagaacgacgaccagctgctgttctgcgacgactgcgacagaggctaccacatgtactgcctgagcccccccatggccgagccccccgagggcagctggagctgccacctgtgcctgagacacctgaaggagaaggccagcgcctacatcaccctgacctag

SEQ ID NO: 50386 - DNA, 999 bp, Artificial Sequence
  derived and/or modified sequence
atggagaaaacacacagggggccagggcttgcccccggccagatctacacgtacccagctagatgttggcggaaaaagcggcggctgaacattctggaagatccaaggctacgtccttgcgagtataaaattgactgtgaggctccactgaagaaagaaggtggccttcccgaggggccagtgcttgaggctttgctatgtgccgagaccggagaaaagaagattgaactgaaggaggaggaaaccattatggattgccaaaagcaacaactccttgagttcccgcatgacctggaagttgaggatctcgaggatgatatcccccgccggaagaaccgcgcaaaggggaaagcatacggcatcgggggactgcggaaaagacaggatacggcgagtctggaagacagagacaagccttatgtttgtgacatctgtgggaagcgatacaaaaaccgtcctgggctgagctaccactatactcacactcacctggcagaggaagagggcgaggaaaacgctgaacggcatgctttgcccttccatcgcaaaaacaaccacaaacagttttataaggagctggcctgggtccctgaagcccagaggaaacacacagccaaaaaggcccctgacggcacagtgatccccaatggttattgcgacttctgtttaggcggctccaaaaaaacagggtgccctgaggatcttatatcttgtgcagactgcggaagatctggccacccctcttgtctgcaattcaccgttaacatgaccgccgcagtgcggacctacagatggcaatgcatagaatgtaagtcgtgcagtctgtgcggaacaagcgaaaacgacgatcagcttttattctgcgatgattgtgatcgtgggtaccacatgtattgtttaagtccacctatggctgaaccgccagagggatcgtggagctgccacctctgtctgaggcacctgaaagaaaaagcctctgcctacattactctgacctag

SEQ ID NO: 50387 - DNA, 999 bp, Artificial Sequence
  derived and/or modified sequence
atggagaagacccaccggggccctggcctggcccctggccagatctacacctacccagcccgctgctggaggaagaagaggcggctgaacatcctggaggacccccggctgcggccctgtgagtacaagattgactgtgaggcccccctgaagaaggagggcggcctgcctgagggccctgtgctggaggccctgctgtgtgccgagaccggggagaagaagattgagctgaaggaggaggagaccatcatggactgccagaagcagcagctgctggagttcccccatgacctggaggtggaggacctggaggatgacatccccaggaggaagaacagagccaagggcaaggcctatggaattggaggcctgaggaagaggcaggacacagccagcctggaggaccgggacaagccctacgtgtgtgacatctgtgggaagcgctacaagaacagacctggcctgagctaccactacacccacacccacctggccgaggaggagggggaggagaatgctgagagacatgccctgcccttccacaggaagaacaaccacaagcagttctacaaggagctggcctgggtgcctgaggcccagaggaagcacacagccaagaaggccccagatggcaccgtcatccccaacggctactgtgacttctgcctgggcggcagcaagaagacaggctgcccagaagatctcatcagctgtgccgactgtggccgcagcggccaccccagctgcctgcagttcaccgtgaacatgacagctgctgtgaggacctaccgctggcagtgcatcgagtgcaagagctgcagcctgtgtggcaccagtgaaaatgatgaccagctgctcttctgtgatgactgtgaccggggctaccacatgtactgcctgagcccccccatggccgagcccccagagggctcctggagctgccacctgtgcctgcggcacctgaaggagaaggccagcgcctacatcaccctgacctag

SEQ ID NO: 50388 - DNA, 999 bp, Artificial Sequence
  derived and/or modified sequence
atggagaagacccaccggggccccggcctggcccccggccagatctatacttaccctgctagatgctggcggaaaaaaagacgactcaatatcctcgaggacccgaggctgcgtccctgcgaatataagatcgactgtgaagcacctctcaaaaaggagggcggtctacctgaagggcctgtcctagaggccctgttgtgcgctgagaccggtgagaagaagatcgagctcaaagaagaagagaccatcatggactgtcagaaacaacaactcctagagttcccacatgacctggaggtggaagacctggaagatgatattccaaggcgcaagaatcgtgcaaaaggcaaggcgtatggtataggcggtttgagaaagaggcaggacaccgcttcattagaagatcgagacaagccatacgtgtgcgacatatgcgggaagcgatacaaaaacaggcccgggctgtcatatcattatactcacactcatcttgctgaagaagaaggcgaagagaacgccgagagacatgctttacccttccaccggaaaaacaatcacaaacagttctacaaagagttggcctgggtgccagaggcccaacgaaaacatactgccaagaaagccccggatggaacggttatacccaatggttactgtgatttttgcttaggggggagcaagaaaaccggatgtcccgaagatcttatctcctgtgcagattgcggcaggagcggccatcctagttgcctccaatttaccgtcaacatgaccgccgctgtccgaacgtaccggtggcaatgcatcgagtgcaagtcctgtagcctgtgtggcacctctgaaaatgatgatcaacttttgttttgcgacgattgcgaccgaggctaccacatgtactgcctgagtccccccatggctgagccgcctgaggggagctggtcatgccacctctgccttcggcatttaaaggaaaaggcctctgcatacatcacgcttacctag

SEQ ID NO: 50389 - DNA, 999 bp, Artificial Sequence
  derived and/or modified sequence
atggaaaaaactcacaggggcccaggacttgccccaggacagatttatacgtacccagccaggtgctggcgaaaaaagcgccgtctcaacatacttgaggatccaaggctcaggccatgcgagtacaagatagattgcgaggccccactgaaaaaggaaggcggactgcccgaagggcctgtgctcgaggctcttctctgcgcggaaactggtgaaaaaaagatagaactcaaggaggaggagacgataatggattgccagaaacagcagctgctggagtttccacacgatctggaggtggaagacttagaagacgacattccacggagaaagaaccgggctaagggtaaggcatatggcattggcggattaagaaaaagacaggacacggcctccctggaagaccgcgacaagccctacgtttgtgacatttgtggcaagcggtataagaaccggccaggactgtcctaccactacacgcacacacaccttgcagaggaggagggtgaagagaatgcagaaaggcacgctctgcccttccacaggaagaataaccataaacagttctataaggaacttgcctgggtcccagaggcacagagaaaacacacagcgaaaaaggcccctgacggaaccgttatcccgaacgggtattgcgacttctgtcttggtgggagcaaaaagacaggctgtcccgaggacctgataagttgcgccgactgcggacgtagcgggcatccttcgtgcttgcagttcactgttaatatgacggccgcagtcagaacctaccgatggcagtgtattgagtgtaaatcttgttcgctctgcggtacctcagaaaatgacgaccagctgctcttttgcgacgattgcgaccgaggctaccacatgtattgccttagtccgcctatggccgaaccgcctgagggctcttggagttgtcatctgtgcctacgacatttgaaagaaaaggcttccgcgtatatcacattaacatag

SEQ ID NO: 50390 - DNA, 999 bp, Artificial Sequence
  derived and/or modified sequence
atggagaagacccacagaggccccggcctggcccccggccagatctacacctaccccgccagatgctggagaaagaagagaagactgaacatcctggaggaccccagactgagaccctgcgagtacaagatcgactgcgaggcccccctgaagaaggagggcggcctgcccgagggccccgtgctggaggccctgctgtgcgccgagaccggcgagaagaagatcgagctgaaggaggaggagaccatcatggactgccagaagcagcagctgctggagttcccccacgacctggaggtggaggacctggaggacgacatccccagaagaaagaacagagccaagggcaaggcctacggcatcggcggcctgagaaagagacaggacaccgccagcctggaggacagagacaagccctacgtgtgcgacatctgcggcaagagatacaagaacagacccggcctgagctaccactacacccacacccacctggccgaggaggagggcgaggagaacgccgagagacacgccctgcccttccacagaaagaacaaccacaagcagttctacaaggagctggcctgggtgcccgaggcccagagaaagcacaccgccaagaaggcccccgacggcaccgtgatccccaacggctactgcgacttctgcctgggcggcagcaagaagaccggctgccccgaggacctgatcagctgcgccgactgcggcagaagcggccaccccagctgcctgcagttcaccgtgaacatgaccgccgccgtgagaacctacagatggcagtgcatcgagtgcaagagctgcagcctgtgcggcaccagcgagaacgacgaccagctgctgttctgcgacgactgcgacagaggctaccacatgtactgcctgagcccccccatggccgagccccccgagggcagctggagctgccacctgtgcctgagacacctgaaggagaaggccagcgcctacatcaccctgacctag

SEQ ID NO: 50391 - protein, 271 aa, Artificial Sequence
  derived and/or modified sequence
MPEAPPLLLAAVLLGLVLLVVLLLLLRHWGWGLCLIGWNEFILQPIHNLLMGDTKEQRILNHVLQHAEPGNAQSVLEAIDTYCEQKEWAMNVGDKKGKIVDAVIQEHQPSVLLELGAYCGYSAVRMARLLSPGARLITIEINPDCAAITQRMVDFAGVKDKVTLVVGASQDIIPQLKKKYDVDTLDMVFLDHWKDRYLPDTLLLEECGLLRKGTVLLADNVICPGAPDFLAHVRGSSCFECTHYQSFLEYREVVDGLEKAIYKGPGSEAGP

SEQ ID NO: 50392 - protein, 223 aa, Artificial Sequence
  derived and/or modified sequence
MPEAPPLLLAAVLLGLVLLVVLLLLLRHWGWGLCLIGWNEFILQPIHNLLMGDTKEQRILNHVLQHAEPGNAQSVLEAIDTYCEQKEWAMNVGDKKGKIVDAVIQEHQPSVLLELGAYCGYSAVRMARLLSPGARLITIEINPDCAAITQRMVDFAGVKDKVTLVVGASQDIIPQLKKKYDVDTLDMVFLDHWKDRYLPDTLLLEECGLLRKGTVLLADNVIC

SEQ ID NO: 50393 - DNA, 816 bp, Artificial Sequence
  derived and/or modified sequence
atgcccgaggccccccctcttctcctcgcggccgtgctgttgggattggtgctcctcgtcgtgctgctcctgctgttgcgtcattggggctggggcctatgccttataggatggaacgagttcatacttcagcccattcacaatctgctcatgggcgacacaaaagaacagaggattttgaatcacgtcttgcagcatgctgaacccggcaatgcgcaaagtgtgctggaagcgattgatacctattgcgagcaaaaggagtgggctatgaatgtgggggacaagaaaggaaagattgtcgacgcagtgattcaggagcaccaaccttccgtgctgctcgaactgggagcctattgcggatacagcgctgttcggatggcacgactgctgtctcctggggcacggctcattacaatagaaattaatccggattgcgccgccatcacacagcggatggtggactttgcaggggttaaggacaaagtcacattagtggtgggggcctctcaggacataatcccccagctgaaaaaaaagtacgacgtggatactttggacatggttttccttgaccactggaaggatcgatatttgcccgatactcttctccttgaagaatgcggattgcttcgaaagggtacggtgttactggcggacaacgtcatttgcccaggcgctcctgacttcttggcccacgtgagagggtcttcctgctttgaatgtacgcactatcaatcattcctggagtatcgcgaagtcgtggacggtctggaaaaggccatctacaagggcccgggcagcgaagccggaccatag

SEQ ID NO: 50394 - DNA, 816 bp, Artificial Sequence
  derived and/or modified sequence
atgccggaggctccacccctgttgttggccgcagtcctgctgggcttggttttgttggtggtgctgcttcttctcctacgacactggggctggggcctgtgcttgatagggtggaatgagttcatcctgcagccaattcataacctcctgatgggtgacaccaaagagcaacggatcctgaatcacgtgctgcaacatgccgagccaggaaatgctcaatccgtactagaagctatagatacgtattgcgagcagaaagagtgggcaatgaacgttggcgacaagaaaggaaagatagtggatgcggtaatccaggagcatcagcccagcgtactgttggagctgggggcctactgcggatattctgccgtgcgcatggcgaggcttctcagccccggggcccgcctgatcaccatcgaaattaacccagactgtgccgctatcactcagaggatggtcgactttgccggggtgaaggacaaagtgacactggtggtgggggccagccaggatatcatcccccagctgaagaagaagtacgatgtggacacactcgacatggtcttcctggatcactggaaagaccgatatctgccggacacgctgctgctagaggaatgtggactcctcagaaaggggactgtgctgttagcagacaatgtgatctgccccggcgccccagatttcctggcccacgtgaggggcagctcctgttttgagtgtacacattaccagtcctttctggagtatcgagaggtagtggacggcctggaaaaggccatttacaaaggccccggctctgaagccggcccctag

SEQ ID NO: 50395 - DNA, 816 bp, Artificial Sequence
  derived and/or modified sequence
atgcccgaggctccgccactgcttctggctgctgtcctgctagggctggtacttctggtggtcctcctcctcctgttacgccattggggatggggcttatgcttgatcggttggaacgagtttatcctgcagcccatccataaccttctcatgggagatactaaagaacagagaatcttaaatcacgttctccagcacgctgaacctggcaacgcacagtcagtgctcgaggctatcgacacctattgcgagcagaaagagtgggctatgaatgtaggggataagaaaggaaagatcgtggatgccgtgatacaggagcatcaaccctccgtgctgctggaattaggcgcctactgtgggtattctgcagtcaggatggcgagactgctgtctccaggtgcccggttgataactatagagattaaccctgactgcgccgccatcacccagcgtatggtggactttgcaggggtgaaagacaaggtgacacttgtcgtgggcgcgtcacaggatatcatccctcagctgaagaaaaaatatgacgttgacacactagatatggtgtttctggatcattggaaggacaggtacttgcccgataccctcctgctcgaggaatgtgggctgctgaggaaaggcacagtgctcctggccgacaatgttatctgtccaggtgctcccgactttcttgctcatgtgagagggtcgagctgcttcgagtgtacacactatcagtcattcctcgagtaccgagaggtcgtcgatgggctcgagaaagccatttataagggccccggatccgaggccgggccctag

SEQ ID NO: 50396 - DNA, 672 bp, Artificial Sequence
  derived and/or modified sequence
atgcctgaagcaccaccactgcttctcgccgcggtgttactcggtcttgtgctgctggtcgtcttgctccttctgcttcgtcattggggctggggcctgtgtctgattgggtggaatgagttcatcttgcaacctatccataacctgcttatgggcgacaccaaggaacaacgaattctcaaccacgtgctccagcacgccgaacctggcaacgcccagagtgtgcttgaagctattgatacatactgcgagcagaaagagtgggctatgaatgtaggggacaagaagggcaaaatcgtcgacgcggtgattcaggagcaccagccaagcgtgttgctcgagcttggagcttactgcgggtattccgctgtcaggatggccagactgctgagcccaggagccaggctaatcaccatcgaaattaacccggactgcgcggctattacacagcgcatggttgatttcgccggcgtgaaggataaagttacgttagtagtcggagcgtcacaggacatcattcctcagctaaaaaaaaagtatgatgttgacacattagacatggtctttctggaccactggaaggaccgctacctcccagacacactgctgctggaagaatgtggactgttgaggaagggtaccgtgctgctagcagataacgtgatctgctag

SEQ ID NO: 50397 - DNA, 816 bp, Artificial Sequence
  derived and/or modified sequence
atgcctgaggccccacccctgctgctggccgctgtgctgctgggcctggtgctgctggtggtgctgctgctgctgctgcggcactggggctggggcctgtgcctgattggctggaatgagttcatcctgcagcccatccacaacctgctgatgggagacaccaaggagcagaggatcctgaaccacgtgctgcagcacgccgagcctggaaatgcccagagcgtgctggaggccatcgacacctactgtgagcagaaggagtgggccatgaatgtgggggacaagaagggcaagatcgtggatgctgtgatccaggagcaccagcccagcgtgctgctggagctgggcgcctactgcggctacagcgctgtgaggatggcccggctgctgagccctggggcccggctcatcaccatcgagatcaacccagactgtgccgccatcacccagaggatggtggactttgctggggtgaaggacaaggtgaccctggtggtgggcgccagccaggacatcatcccccagctgaagaagaagtatgatgtggacaccctggacatggtgttcctggaccactggaaggaccgctacctgcctgacaccctgctgctggaggagtgtggcctgctgaggaagggcaccgtgctgctggccgacaacgtcatctgccctggggccccagacttcctggcccacgtgcggggcagcagctgctttgagtgcacccactaccagagcttcctggagtaccgggaggtggtggatggcctggagaaggccatctacaagggccctggcagcgaggccggcccctag

SEQ ID NO: 50398 - DNA, 672 bp, Artificial Sequence
  derived and/or modified sequence
atgcctgaggccccacccctgctgctggccgctgtgctgctgggcctggtgctgctggtggtgctgctgctgctgctgcggcactggggctggggcctgtgcctgattggctggaatgagttcatcctgcagcccatccacaacctgctgatgggagacaccaaggagcagaggatcctgaaccacgtgctgcagcacgccgagcctggaaatgcccagagcgtgctggaggccatcgacacctactgtgagcagaaggagtgggccatgaatgtgggggacaagaagggcaagatcgtggatgctgtgatccaggagcaccagcccagcgtgctgctggagctgggcgcctactgcggctacagcgctgtgaggatggcccggctgctgagccctggggcccggctcatcaccatcgagatcaacccagactgtgccgccatcacccagaggatggtggactttgctggggtgaaggacaaggtgaccctggtggtgggcgccagccaggacatcatcccccagctgaagaagaagtatgatgtggacaccctggacatggtgttcctggaccactggaaggaccgctacctgcctgacaccctgctgctggaggagtgtggcctgctgaggaagggcaccgtgctgctggccgacaacgtcatctgctag

SEQ ID NO: 50399 - DNA, 816 bp, Artificial Sequence
  derived and/or modified sequence
atgcccgaggccccccccctgctgctggccgccgtgctgctgggccttgtactgcttgttgtgttgttgctcctgttacgccactggggatgggggctgtgtcttatcggttggaatgagttcatccttcagcctatccacaatctacttatgggcgatacgaaagagcagcgcatcttgaatcatgtcttgcagcacgctgaaccaggcaacgcccagtctgtcctcgaagctattgacacctactgcgaacagaaagagtgggcaatgaatgtgggcgataagaagggcaagatagtggatgcagtaattcaggaacaccagccctctgtcctcctcgagctaggcgcatactgcgggtattccgccgtgcggatggcaaggctattgtccccgggggcacgattgattacaatcgagatcaaccctgattgcgcagctattacacagcgtatggtggattttgccggcgtgaaagacaaagtcaccctggtggtgggtgccagccaggatatcatacctcagcttaagaagaagtacgacgtggatactctggacatggtctttctagatcattggaaggatcgttatctccccgacacactcctgctggaggagtgtgggctcttgaggaagggtactgtgctgctcgcagacaatgtcatctgccctggggccccagattttctggcacatgtgagaggctcctcttgcttcgagtgtactcactatcaaagctttctggaataccgagaggttgtggacggtttggaaaaggctatctataaaggacctggatctgaagccggtccatag

SEQ ID NO: 50400 - DNA, 816 bp, Artificial Sequence
  derived and/or modified sequence
atgcccgaggccccccccctgctgctggccgccgtgctgctgggcctggtcctattagtggtcttgctgctgctgctgaggcactggggctggggactttgccttatcggatggaacgagttcatactgcagcccatccataatttactcatgggcgacaccaaagagcagaggatcctgaatcacgtcctccagcatgctgagccaggcaatgctcagtccgtgctcgaggcaatagacacatattgcgagcagaaagagtgggctatgaatgttggggacaagaagggaaagatcgttgacgccgtcattcaggagcatcagcccagtgtcctcttggagttgggagcctattgcggatatagcgccgtgcgcatggcccggttgctttccccgggggccaggcttattacaatagaaattaatcccgactgtgccgccattacccagcgaatggtggattttgccggcgtcaaggacaaagtcacgctggtggtcggtgcaagccaggacatcataccacagctcaagaagaagtacgatgtggatactctggatatggtctttctggaccattggaaagacaggtacctccctgacactctcctgctcgaggagtgcggacttctacggaagggaacagtcttgctcgccgataacgtgatatgcccgggagcaccagattttctggcccacgtccggggtagctcctgcttcgagtgtacccactaccagagttttctcgaataccgagaggtggtcgatggattggagaaggcaatatataaaggacccgggagcgaggcaggaccatag

SEQ ID NO: 50401 - DNA, 816 bp, Artificial Sequence
  derived and/or modified sequence
atgcccgaggccccccccctgctgctggccgccgtgctgctgggcctagtcttgttggtcgtgctcttactgctgctccgccactggggatggggactgtgtttgataggttggaatgagtttatcctccagcctatccataacttgttgatgggggacaccaaagagcagcgcatcctcaatcacgtcctccagcatgccgaacccggcaacgcccaaagcgtgttagaggccattgacacgtattgcgaacaaaaggagtgggccatgaatgtgggtgataagaagggcaagatcgtcgatgccgtcatacaagaacatcagcccagtgtcctcctggaactcggagcctactgcggttattctgcagtccgaatggctcgactcctgtctcctggcgccagactcatcacaattgagataaaccccgattgcgcagccatcacacaacgtatggttgattttgcaggcgtgaaggacaaggtcacactggttgtcggagcctcacaggatatcatcccccaattgaagaagaagtatgacgtggatacccttgacatggtgttcctcgatcactggaaagatcggtacctacctgatacactgctgctggaggaatgcgggctgctgcggaaaggcactgtgctactggctgacaacgtcatatgccctggagcccctgatttcctggcacacgtgcgcgggtcatcatgcttcgagtgcacacattatcagtcatttctcgagtaccgggaagtggtggacggcctcgagaaagcgatctataaaggcccgggaagcgaggccgggccctag

SEQ ID NO: 50402 - DNA, 672 bp, Artificial Sequence
  derived and/or modified sequence
atgcccgaggccccccccctgctgctggccgccgtgctgctgggcctcgtgttattagtggtgctgctcctgctgcttaggcattggggttggggcctctgtttgatcggatggaacgagttcattcttcagcccattcacaacctgctgatgggggacaccaaggagcaacgtatactcaatcacgtcctccagcatgcagagcctggcaatgcacaatcagttctcgaggccatcgatacctattgcgagcagaaagagtgggcaatgaacgtcggagacaagaagggaaaaattgtggacgcggtgattcaagaacaccagcccagtgtgctgctggaacttggagcctattgcggctattccgccgtgcggatggctaggcttcttagcccaggagcgcggcttatcacgatagagatcaaccccgactgcgccgctattacccaacgcatggtggacttcgcaggtgtgaaagacaaggtgactctggtggttggggctagccaggatataatccctcagctgaaaaagaagtacgatgtggatactctggatatggtgttcctcgaccattggaaggaccggtacctaccagacacccttctgctggaagagtgcggcctcctgcgcaagggtaccgttctactggcagataacgtgatatgctag

SEQ ID NO: 50403 - DNA, 816 bp, Artificial Sequence
  derived and/or modified sequence
atgccagaggcccctccactcctgctcgcagccgttctgctgggactggtacttctcgtggtgctgttgctcctgcttagacactggggttggggattgtgcttaatcgggtggaatgagttcatcctgcaacctattcacaacctacttatgggcgataccaaagagcaacgcattctgaaccatgtcctccagcatgccgaaccaggcaacgcccaaagcgtgttggaagccatcgacacctactgcgagcagaaagagtgggctatgaacgttggagacaagaaaggaaagattgttgacgcggttatccaggaacaccagcctagcgtactcttggaattaggcgcatattgtggatacagcgcagtgaggatggcccgtttgctatccccgggtgcacgcctgatcacaatcgaaatcaatccagattgcgccgcaataacgcagcggatggttgactttgctggtgttaaagataaggtcacgctagtggtcggcgcatcccaggacatcattccccagctcaaaaagaagtacgacgtcgatacactagatatggtcttcctcgaccactggaaggatcgatacctgccagataccctgcttttagaggaatgcggcttactgcggaaaggaaccgtgctgcttgcagacaatgttatctgtcccggtgcgcctgactttttagctcacgtccgcggaagtagttgcttcgagtgcacgcattaccagagctttcttgaatatagagaggttgtggacggtctggaaaaagctatttataaggggccaggtagcgaggctggcccatag

SEQ ID NO: 50404 - DNA, 816 bp, Artificial Sequence
  derived and/or modified sequence
atgcctgaagcccctccactcttgcttgccgcagtgttgctgggcctggtgctgctcgtggtgttactcctgctgctccgtcattggggttggggcctttgccttatagggtggaatgaattcatactgcaacctattcacaatctgttaatgggggacactaaggaacagcgaattctgaaccacgtgcttcagcacgccgagcctggaaatgctcagagcgtccttgaggccattgatacgtactgtgaacagaaagaatgggcaatgaatgttggcgacaagaaaggaaagatcgtcgacgcagtcatacaggaacaccagccgtctgttctgctcgagctcggtgcgtactgcggatactcggccgtccgaatggccaggcttctctccccgggagctcgcctgattactattgagatcaaccccgattgcgccgctattactcagagaatggtggacttcgctggagtgaaagataaagtgacactcgttgtgggtgccagtcaggacataattccccagctcaagaaaaagtacgacgtggatactctggacatggtgtttctggatcactggaaagacagatatctgcccgatactctcttactcgaggaatgcggactgttgcgaaagggcaccgtgttgctggctgacaatgtgatatgccctggcgcacccgactttctcgctcacgttcgcggtagctcgtgtttcgaatgcacacattaccagtcctttttagagtatcgagaggtcgtggatggtctggaaaaggctatctataaaggcccaggcagcgaggccggtccttag

SEQ ID NO: 50405 - DNA, 816 bp, Artificial Sequence
  derived and/or modified sequence
atgcccgaggcacctcccctgcttctggcagccgtgcttctgggtcttgtgctgctagtggttctcctgctgctgctgcgccactgggggtggggactgtgcctgattgggtggaacgagttcattctccaacccatccacaacctgctcatgggagatacaaaagaacagaggatcttgaaccacgtgctgcaacacgccgagcctggcaacgctcagtcagtgctggaggccattgacacttattgtgaacagaaggagtgggctatgaacgtgggcgacaagaaggggaaaatcgtggatgccgttatacaggaacatcagccgtcggtgctcctggagctgggggcatattgcggctatagtgcagttcggatggccaggctgctgagtccaggcgcacggttgataaccattgaaataaatcctgactgtgccgcaatcacacagaggatggttgattttgccggtgtcaaggataaagtgaccctggtggtcggggcaagtcaagatatcattccccagttgaaaaaaaagtacgatgtcgataccctcgacatggtgtttctggatcactggaaggatagataccttcctgataccctacttctggaagaatgcggactgcttagaaaggggacggtattgctcgcagacaacgtcatatgtccaggggcacccgatttcctggctcatgtcagaggcagttcctgctttgagtgtacccattaccaaagctttctggagtacagggaggtcgttgacgggctggagaaggccatttataaaggaccaggaagcgaagctggcccatag

SEQ ID NO: 50406 - DNA, 672 bp, Artificial Sequence
  derived and/or modified sequence
atgccagaagcccctccactgcttctcgccgctgtgttactgggcctggtcctcttggtcgtgctgctcctgctccttcggcattgggggtggggcctttgtctgatcggctggaacgagttcatcttacagccgatacacaaccttctcatgggcgataccaaggaacagcgtatcctaaatcacgtgttgcagcacgccgagccaggcaatgcccagagcgtgctggaagcaatcgacacctactgcgagcagaaggaatgggctatgaatgtgggcgacaagaagggaaagatcgtagatgccgtgattcaggaacaccagccctcagtgctgttggaactgggggcttactgcggctactccgccgtccggatggcacgtctgctgagccccggagcgaggttgataactatcgaaataaaccccgactgtgctgccatcacccaacggatggttgattttgctggcgttaaggataaagtaactctggtagtaggagcatctcaggacattattccacagctgaaaaagaagtacgacgtcgatacgcttgacatggtgtttctcgaccactggaaggatcggtatttgccggacactttgttattagaggagtgtggcctgctgcgcaagggtaccgtcctgctggcagacaacgtgatttgctag

SEQ ID NO: 50407 - DNA, 1548 bp, Artificial Sequence
  derived and/or modified sequence
atccccgcagcgccaccgccattgccgccatcgtcgtggggcttctggggcagctagggctgcccgccgcgctgcctgcgccggaccggggcgggtccagtcccgggcgggccgtcgcgggagagaaataacatctgctttgctgccgagctcagaggagaccccagacccctcccgcagccagagggctggagcctgctcagaggtgctttgaagaggatccctgggctgcctggggaagcacccagggccagggagtgtgaccctgcaggctccacacaggactgccagaggcacacacctgctctgtctacccgagggcaccagagggcacgagaaggctggctccctggcgctgacacgtcaggcaactgaggcacaaggctggcatttctgaaccttgcccctctgcaaacacaagggggcgatggtggcactccaagcaaaggggcgtgtgggtgctgcaggaggagcacagagcactggcgcccctcccctcccgccctgcagatgccggaggccccgcctctgctgttggcagctgtgttgctgggcctggtgctgctggtggtgctgctgctgcttctgaggcactggggctggggcctgtgccttatcggctggaacgagttcatcctgcagcccatccacaacctgctcatgggtgacaccaaggagcagcgcatcctgaaccacgtgctgcagcatgcggagcccgggaacgcacagagcgtgctggaggccattgacacctactgcgagcagaaggagtgggccatgaacgtgggcgacaagaaaggcaagatcgtggacgccgtgattcaggagcaccagccctccgtgctgctggagctgggggcctactgtggctactcagctgtgcgcatggcccgcctgctgtcaccaggggcgaggctcatcaccatcgagatcaaccccgactgtgccgccatcacccagcggatggtggatttcgctggcgtgaaggacaaggtcacccttgtggttggagcgtcccaggacatcatcccccagctgaagaagaagtatgatgtggacacactggacatggtcttcctcgaccactggaaggaccggtacctgccggacacgcttctcttggaggaatgtggcctgctgcggaaggggacagtgctactggctgacaacgtgatctgcccaggtgcgccagacttcctagcacacgtgcgcgggagcagctgctttgagtgcacacactaccaatcgttcctggaatacagggaggtggtggacggcctggagaaggccatctacaagggcccaggcagcgaagcagggccctgactgcccccccggcccccctctcgggctctctcacccagcctggtactgaaggtgccagacgtgctcctgctgaccttctgcggctccgggctgtgtcctaaatgcaaagcacacctcggccgaggcctgcgccctgacatgctaacctctctgaactgcaacactggattgttcttttttaagactcaatcatgacttctttactaacactggctagctata

SEQ ID NO: 50408 - DNA, 1457 bp, Artificial Sequence
  derived and/or modified sequence
ccgccattgccgccatcgtcgtggggcttctggggcagctagggctgcccgccgcgctgcctgcgccggaccggggcgggtccagtcccgggcgggccgtcgcgggagagaaataacatctgctttgctgccgagctcagaggagaccccagacccctcccgcagccagagggctggagcctgctcagaggtgctttgaagggtctgtgacctgaacccctgggcttctgcctcaggcctcctgtgctctgctctctgcctgctgggtcccctcaccaggcttctgtctggttcccaggctacctgcctggagggtcacaccaggaggatttcaaacaggtttcaagtggggtcacttgccatcactgtgccccacgagatgccggaggccccgcctctgctgttggcagctgtgttgctgggcctggtgctgctggtggtgctgctgctgcttctgaggcactggggctggggcctgtgccttatcggctggaacgagttcatcctgcagcccatccacaacctgctcatgggtgacaccaaggagcagcgcatcctgaaccacgtgctgcagcatgcggagcccgggaacgcacagagcgtgctggaggccattgacacctactgcgagcagaaggagtgggccatgaacgtgggcgacaagaaaggcaagatcgtggacgccgtgattcaggagcaccagccctccgtgctgctggagctgggggcctactgtggctactcagctgtgcgcatggcccgcctgctgtcaccaggggcgaggctcatcaccatcgagatcaaccccgactgtgccgccatcacccagcggatggtggatttcgctggcgtgaaggacaaggtcacccttgtggttggagcgtcccaggacatcatcccccagctgaagaagaagtatgatgtggacacactggacatggtcttcctcgaccactggaaggaccggtacctgccggacacgcttctcttggaggaatgtggcctgctgcggaaggggacagtgctactggctgacaacgtgatctgcccaggtgcgccagacttcctagcacacgtgcgcgggagcagctgctttgagtgcacacactaccaatcgttcctggaatacagggaggtggtggacggcctggagaaggccatctacaagggcccaggcagcgaagcagggccctgactgcccccccggcccccctctcgggctctctcacccagcctggtactgaaggtgccagacgtgctcctgctgaccttctgcggctccgggctgtgtcctaaatgcaaagcacacctcggccgaggcctgcgccctgacatgctaacctctctgaactgcaacactggattgttcttttttaagactcaatcatgacttctttactaacactggctagctatattatcttatatactaatatcatgttttaaaaatataaaat

SEQ ID NO: 50409 - DNA, 2035 bp, Artificial Sequence
  derived and/or modified sequence
gctgttggcagctgtgttgctgggcctggtgctgctggtggtgctgctgctgcttctgaggcactggggctggggcctgtgccttatcggctggaacgagttcatcctgcagcccatccacaacctgctcatgggtgacaccaaggagcagcgcatcctgaaccacgtgctgcagcatgcggagcccgggaacgcacagagcgtgctggaggccattgacacctactgcgagcagaaggagtgggccatgaacgtgggcgacaagaaaggcaagatcgtggacgccgtgattcaggagcaccagccctccgtgctgctggagctgggggcctactgtggctactcagctgtgcgcatggcccgcctgctgtcaccaggggcgaggctcatcaccatcgagatcaaccccgactgtgccgccatcacccagcggatggtggatttcgctggcgtgaaggacaaggtcacccttgtggttggagcgtcccaggacatcatcccccagctgaagaagaagtatgatgtggacacactggacatggtcttcctcgaccactggaaggaccggtacctgccggacacgcttctcttggaggaatgtggcctgctgcggaaggggacagtgctactggctgacaacgtgatctgcccaggtgcgccagacttcctagcacacgtgcgcgggagcagctgctttgagtgcacacactaccaatcgttcctggaatacagggaggtggtggacggcctggagaaggccatctacaagggcccaggcagcgaagcagggccctgactgcccccccggcccccctctcgggctctctcacccagcctggtactgaaggtgccagacgtgctcctgctgaccttctgcggctccgggctgtgtcctaaatgcaaagcacacctcggccgaggcctgcgccctgacatgctaacctctctgaactgcaacactggattgttcttttttaagactcaatcatgacttctttactaacactggctagctatattatcttatatactaatatcatgttttaaaaatataaaatagaaattaagaatctaaatatttagatataactcgacttagtacatccttctcaactgccattcccctgctgcccttgacttgggcaccaaacattcaaagctccccttgacggacgctaacgctaagggcggggcccctagctggctgggttctgggtggcacgcctggcccactggcctcccagccacagtggtgcagaggtcagccctcctgcagctaggccaggggcacctgttagccccatggggacgactgccggcctgggaaacgaagaggagtcagccagcattcacacctttctgaccaagcaggcgctggggacaggtggaccccgcagcagcaccagcccctctgggccccatgtggcacagagtggaagcatctccttccctactccccactgggccttgcttacagaagaggcaatggctcagaccagctcccgcatccctgtagttgcctccctggcccatgagtgaggatgcagtgctggtttctgcccacctacacctagagctgtccccatctcctccaaggggtcagactgctagccacctcagaggctccaagggcccagttcccaggcccaggacaggaatcaaccctgtgctagctgagttcacctgcaccgagaccagcccctagccaagattctactcctgggctcaaggcctggctagcccccagccagcccactcctatggatagacagaccagtgagcccaagtggacaagtttggggccacccagggaccagaaacagagcctctgcaggacacagcagatgggcacctgggaccacctccacccagggccctgccccagacgcgcagaggcccgacacaagggagaagccagccacttgtgccagacctgagtggcagaaagcaaaaagttcctttgctgctttaatttttaaattttcttacaaaaatttaggtgtttaccaatagtcttattttggcttatttttaa

SEQ ID NO: 50410 - DNA, 816 bp, Artificial Sequence
  derived and/or modified sequence
atgcccgaggccccccccctgctgctggccgccgtgctgctgggcctggtgctgctggtggtgctgctgctgctgctgagacactggggctggggcctgtgcctgatcggctggaacgagttcatcctgcagcccatccacaacctgctgatgggcgacaccaaggagcagagaatcctgaaccacgtgctgcagcacgccgagcccggcaacgcccagagcgtgctggaggccatcgacacctactgcgagcagaaggagtgggccatgaacgtgggcgacaagaagggcaagatcgtggacgccgtgatccaggagcaccagcccagcgtgctgctggagctgggcgcctactgcggctacagcgccgtgagaatggccagactgctgagccccggcgccagactgatcaccatcgagatcaaccccgactgcgccgccatcacccagagaatggtggacttcgccggcgtgaaggacaaggtgaccctggtggtgggcgccagccaggacatcatcccccagctgaagaagaagtacgacgtggacaccctggacatggtgttcctggaccactggaaggacagatacctgcccgacaccctgctgctggaggagtgcggcctgctgagaaagggcaccgtgctgctggccgacaacgtgatctgccccggcgcccccgacttcctggcccacgtgagaggcagcagctgcttcgagtgcacccactaccagagcttcctggagtacagagaggtggtggacggcctggagaaggccatctacaagggccccggcagcgaggccggcccctag

SEQ ID NO: 50411 - DNA, 672 bp, Artificial Sequence
  derived and/or modified sequence
atgcccgaggccccccccctgctgctggccgccgtgctgctgggcctggtgctgctggtggtgctgctgctgctgctgagacactggggctggggcctgtgcctgatcggctggaacgagttcatcctgcagcccatccacaacctgctgatgggcgacaccaaggagcagagaatcctgaaccacgtgctgcagcacgccgagcccggcaacgcccagagcgtgctggaggccatcgacacctactgcgagcagaaggagtgggccatgaacgtgggcgacaagaagggcaagatcgtggacgccgtgatccaggagcaccagcccagcgtgctgctggagctgggcgcctactgcggctacagcgccgtgagaatggccagactgctgagccccggcgccagactgatcaccatcgagatcaaccccgactgcgccgccatcacccagagaatggtggacttcgccggcgtgaaggacaaggtgaccctggtggtgggcgccagccaggacatcatcccccagctgaagaagaagtacgacgtggacaccctggacatggtgttcctggaccactggaaggacagatacctgcccgacaccctgctgctggaggagtgcggcctgctgagaaagggcaccgtgctgctggccgacaacgtgatctgctag

SEQ ID NO: 50412 - protein, 454 aa, Artificial Sequence
  derived and/or modified sequence
MVPGQAQPQSPEMLLLPLLLPVLGAGSLNKDPSYSLQVQRQVPVPEGLCVIVSCNLSYPRDGWDESTAAYGYWFKGWTSPKTGAPVATNNQSREVEMSTRDRFQLTGDPGKGSCSLVIRDAQREDEAWYFFRVERGSRVRHSFVNNLFSVSAPALTQKPDVYIPETLEPGQPVTVICVFNWAFKKCPAPSFSWTGAALSPRRTRPSTSHFSVLSFTPSPQDHDTDLTCHVDFSRKGVSAQRTVRLRVAYAPKDLIISISHDNTSALELQGNVIYLEVQKGQFLRLLCAADSQPPATLSWVLQDRVLSSSHPWGPRTLGLELRGVRAGDSGRYTCRAENRLGSQQRALDLSVQYPPENLRVMVSQANRTVLENLRNGTSLRVLEGQSLRLVCVTHSSPPARLSWTRWGQTVGPSQPSDPGVLELPRVQMEHEGEFTCHARHPLGSQRVSLSFSVH

SEQ ID NO: 50413 - protein, 481 aa, Artificial Sequence
  derived and/or modified sequence
MLLLPLLLPVLGAGSLNKDPSYSLQVQRQVPVPEGLCVIVSCNLSYPRDGWDESTAAYGYWFKGWTSPKTGAPVATNNQSREVEMSTRDRFQLTGDPGKGSCSLVIRDAQREDEAWYFFRVERGSRVRHSFVNNLFSVSAPALTQKPDVYIPETLEPGQPVTVICVFNWAFKKCPAPSFSWTGAALSPRRTRPSTSHFSVLSFTPSPQDHDTDLTCHVDFSRKGVSAQRTVRLRVASLELQGNVIYLEVQKGQFLRLLCAADSQPPATLSWVLQDRVLSSSHPWGPRTLGLELRGVRAGDSGRYTCRAENRLGSQQRALDLSVQYPPENLRVMVSQANRTVLENLRNGTSLRVLEGQSLRLVCVTHSSPPARLSWTRWGQTVGPSQPSDPGVLELPRVQMEHEGEFTCHARHPLGSQRVSLSFSVHCKSGPMTGVVLVAVGEVAMKILLLCLCLILLRVRSCRRKAARAALGMEAADAVTD

SEQ ID NO: 50414 - protein, 602 aa, Artificial Sequence
  derived and/or modified sequence
MVPGQAQPQSPEMLLLPLLLPVLGAGSLNKDPSYSLQVQRQVPVPEGLCVIVSCNLSYPRDGWDESTAAYGYWFKGRTSPKTGAPVATNNQSREVEMSTRDRFQLTGDPGKGSCSLVIRDAQREDEAWYFFRVERGSRVRHSFLSNAFFLKVTALTKKPDVYIPETLEPGQPVTVICVFNWAFKKCPAPSFSWTGAALSPRRTRPSTSHFSVLSFTPSPQDHDTDLTCHVDFSRKGVSAQRTVRLRVAYAPKDLIISISHDNTSALELQGNVIYLEVQKGQFLRLLCAADSQPPATLSWVLQDRVLSSSHPWGPRTLGLELRGVRAGDSGRYTCRAENRLGSQQQALDLSVQYPPENLRVMVSQANRTVLENLGNGTSLPVLEGQSLRLVCVTHSSPPARLSWTRWGQTVGPSQPSDPGVLELPPIQMEHEGEFTCHAQHPLGSQHVSLSLSVHWKLEHGGGLGLGAALGAGVAALLAFCSCLVVFRVKICRKEARKRAAAEQDVPSTLGPISQGHQHECSAGSSQDHPPPGAATYTPGKGEEQELHYASLSFQGLRLWEPADQEAPSTTEYSEIKIHTGQPLRGPGFGLQLEREMSGMVPK

SEQ ID NO: 50415 - DNA, 1930 bp, Artificial Sequence
  derived and/or modified sequence
actgcccctccaccaggcttcctgctggaggagtttccttcccagccaggccggcccagaagccagatggtcccgggacaggcccagccccagagcccagagatgctgctgctgcccctgctgctgcccgtgctgggggcggggtccctgaacaaggatcccagttacagtcttcaagtgcagaggcaggtgccggtgccggagggcctgtgtgtcatcgtgtcttgcaacctctcctacccccgggatggctgggacgagtctactgctgcttatggctactggttcaaaggatggaccagcccaaagacgggtgctcctgtggccactaacaaccagagtcgagaggtggaaatgagcacccgggaccgattccagctcactggggatcccggcaaagggagctgctccttggtgatcagagacgcgcagagggaggatgaggcatggtacttctttcgggtggagagaggaagccgtgtgagacatagtttcgtgaacaatttgttctcggtctctgccccagccctgactcagaagcctgatgtctacatccccgagaccctggagcccgggcagccggtgacggtcatctgtgtgtttaactgggctttcaagaaatgtccagccccttctttctcctggacgggggctgccctctcccctagaagaaccagaccaagcacctcccacttctcagtgctcagcttcacgcccagcccccaggaccacgacaccgacctcacctgccatgtggacttctccagaaagggtgtgagcgcacagaggaccgtccgactccgtgtggcctatgcccccaaagaccttattatcagcatttcacatgacaacacgtcagccctggaactccagggaaacgtcatatatctggaagttcagaaaggccagttcctgcggctcctctgtgctgctgacagccagccccctgccacgctgagctgggtcctgcaggacagagtcctctcctcgtcccacccctggggccccagaaccctggggctggagctgcgtggggtaagggccggggattcagggcgctacacctgccgagcggagaacaggcttggctcccagcagcgagccctggacctctctgtgcagtatcctccagagaacctgagagtgatggtttcccaagcaaacaggacagtcctggaaaacctgaggaacggcacatccctccgggtcctggagggccaaagcctgcgtctggtctgtgtcacacacagcagccccccagccaggctgagctggacccggtggggacagaccgtgggcccctcccagccctcagaccctggggtcctggagctgcctcgggttcaaatggagcacgaaggagagttcacctgccacgctcggcacccgctgggctcccagcgcgtctctctcagcttctccgtgcactgcaaatcagggcccatgacgggggtggttctggtggctgttggggaggtggctatgaagatcctgcttctctgcctctgcctcatcctcctcagagtgaggtcttgcaggaggaaggcagcaagggcagcattgggcatggaggctgcagacgctgtcacggactaatctccagactccagactgcttccagatgcctcctcatccagttcctccacagtctgagcggccgtgtttcctctgcaggctttgcatggtctgtcccctgctggactctcctgatccctcctttccctgtcacccaacatctccccaaaccctccgggccaaggactctgcggctcttgacactttgcacgtgtagtttcttctcctgaaacacccttccctccagcctgggcgacagagcaagactgtctcaaaaactaaaacaaaaaaacaccaccaccaccaccaatgtctgattaaatctaagccacggttccattttggggcaaggggc

SEQ ID NO: 50416 - DNA, 1809 bp, Artificial Sequence
  derived and/or modified sequence
atggtgcctggtcaagcccaacctcaatctccagaaatgctcttgttgcccctccttctgcccgtactcggcgctggaagcctgaacaaagatccctcttatagtctgcaggtccagaggcaagtccccgtacccgagggattatgtgttatagttagttgcaaccttagttaccctcgagacggctgggatgagtccaccgccgcttatggctactggtttaaggggcgaacaagccccaagacgggggctcccgtggccacaaataaccagtccagagaggttgagatgtcaacccgtgaccggttccaacttacaggagaccccggtaagggatcctgcagccttgtcattcgagatgcacagagggaggacgaggcatggtatttcttcagagttgagaggggcagtcgggtgcggcactctttcctgtcgaacgcgttctttctgaaagtaacagcactcaccaagaagcccgacgtatatataccggagactctcgagcccggacagcctgtcaccgtcatttgcgtgttcaattgggccttcaagaagtgtccagcaccaagcttttcctggacaggcgcagcgctgtcacctcgccgaactaggccctcaacgtcccacttctcggttctaagttttacaccttccccccaggaccacgacactgacctgacatgccacgtagacttcagtcgcaaaggcgtgtctgctcaacgtaccgttcggcttcgtgtggcttatgcccccaaggatctcatcatctcgatctctcatgacaacacgtcagccctggaactgcagggcaatgtaatatacctcgaggtgcagaaggggcaatttctgcgcctactatgtgctgctgactctcaaccccccgccaccctgtcgtgggtgcttcaggatcgcgtcctgtcctcatcacacccatggggacctaggacgttggggttggagttgcggggcgtgcgggcaggagactccggcagatatacttgtagagctgaaaacagactaggctcccagcagcaggccctggatctttctgtccagtacccccctgaaaacctgcgtgtgatggtgtcacaggctaaccggacagtgttggagaaccttggaaatggcactagccttcctgtgttggaagggcagtcgctaaggttggtatgcgtgactcattcctcccctcctgcacggttgagctggaccagatggggtcagactgtggggccttcacaaccgtctgatccaggcgtgcttgaactgccaccaatccaaatggaacacgagggcgagttcacatgtcatgctcagcatccgctgggaagccaacacgtatctctgagcctgtccgtgcactggaaattagagcacggtggcggcttgggcttgggggctgccttaggggcgggagtggcagccctcctggctttttgtagttgccttgttgtgttcagggttaaaatctgccgaaaagaagcccgaaaacgtgctgccgccgagcaggacgtgccgtcaacactgggccccatatcacagggccatcagcacgagtgctccgccggatcctcccaagatcatccccccccaggagctgccacttacacgcctggaaagggagaagaacaagagctccactacgcaagtctcagttttcagggactcagactttgggagcctgcggatcaggaagctccctccaccactgaatattccgaaattaagatccacactgggcagcccctccgtggaccaggttttgggctccagctggagcgtgagatgtccggaatggtgcctaagtag

SEQ ID NO: 50417 - DNA, 1809 bp, Artificial Sequence
  derived and/or modified sequence
atggtacccggacaggcacaaccccagtcgcccgagatgcttctccttccactgctgttgccggtcctgggggccggctccttaaacaaagatcctagctactctctgcaggttcagagacaggtgcccgtgcctgagggactgtgcgtcatcgtgtcttgtaatcttagctatcccagagatggctgggatgagtcgactgccgcttatggctattggttcaaagggcggacctctcccaaaaccggcgctcctgtcgccacaaataaccagtctagagaagtcgagatgagcacccgcgatcggttccagctgaccggcgaccctggaaaaggtagctgtagcttggtgatcagggatgcgcagagagaagacgaagcatggtacttctttagggttgagaggggtagccgagtaagacatagcttcttatccaacgccttctttctaaaagtcaccgcactgactaagaaacccgacgtgtatattcccgagacactggagcccggccaacccgtaaccgttatctgtgtgtttaactgggcctttaagaagtgccccgcaccaagcttttcctggaccggggcagcccttagccctcgaaggacacggccctccacctcccatttctcagtcttgagtttcaccccctctcctcaggaccatgacactgacctaacatgccacgtcgacttttcccgcaagggcgtgtccgcccaaagaacagtgcggctccgggttgcctatgcacctaaggatttaattattagcatctcccatgacaatacaagtgccctggagctccagggaaacgtgatttatctcgaggtgcagaaaggacagttcttaagacttctgtgcgctgcagatagccagccacctgccactctctcatgggtcctgcaagaccgtgttctcagctcttctcatccctgggggccaaggacactgggactggagttaaggggagtcagggccggcgactccggcaggtatacatgccgagctgagaacaggctcggttcacagcagcaagcactggatctttcagtccagtacccccccgaaaatctgcgcgtaatggtgtctcaggccaataggaccgtcctggagaaccttggcaatggaacctccttgcctgttcttgaagggcaatccctccgcttggtctgcgttacccacagcagtccgcccgcccgattatcatggacccggtggggccagacagtaggaccctcccagccgtctgatccaggagtgctggaacttccccctatccagatggagcacgagggggagttcacctgtcacgcgcaacacccactgggatctcaacatgtcagcctgtcactctcagtacactggaagctggagcatggagggggcctagggctgggggcagctctcggggcaggcgtcgctgcactcctcgcattctgttcctgtttggtcgtctttcgcgtgaagatttgccggaaggaggccagaaagagagccgccgcagaacaggatgtgccttctactctaggccctatcagccagggtcatcagcacgaatgttccgccgggtcatcccaggaccatcctcctccgggggcagcaacctacaccccgggtaaaggcgaggaacaggaacttcattacgctagtttgtcctttcagggactgcggctctgggagcccgctgaccaagaggctccctcaactacagagtactccgaaattaaaatccatactggccagcccttgcgcggtcctggattcggactgcagctagaacgtgagatgtccggtatggtgccaaagtag

SEQ ID NO: 50418 - DNA, 1809 bp, Artificial Sequence
  derived and/or modified sequence
atggtgcccggccaggcccagccccagagccctgagatgctgctgctgcccctgctgctgcctgtgctgggcgccggcagcctgaacaaggaccccagctacagcctgcaggtgcagaggcaggtgcctgtgcctgagggcctgtgtgtgattgtgtcctgcaacctgagctaccccagagatggctgggatgagagcacagctgcctacggctactggttcaagggccgcaccagccccaagacaggagcccctgtggccaccaacaaccagagccgggaggtggagatgagcacccgggaccgcttccagctgaccggggaccccgggaagggcagctgcagcctggtgatcagagatgcccagcgggaggatgaggcctggtacttcttccgggtggagcggggcagccgggtgcgccacagcttcctgagcaatgccttcttcctgaaggtgacagccctgaccaagaagccagatgtgtacatccctgagaccctggagcccggccagcctgtgaccgtcatctgtgtgttcaactgggccttcaagaagtgcccagcccccagcttctcctggacaggagctgccctgagccccaggaggacccggcccagcaccagccacttctctgtgctgtccttcacccccagcccccaggaccatgacacagacctgacctgccacgtggacttcagcaggaaaggagtgtctgcccagaggacagtgcggctgcgggtggcctatgcccccaaggacctgatcatcagcatcagccatgacaacaccagcgccctggagctgcagggcaatgtcatctacctggaggtgcagaagggccagttcctgcggctgctgtgtgccgctgacagccagcccccagccaccctgtcctgggtgctgcaggacagagtgctgagcagcagccacccctggggccccaggaccctgggcctggagctgcggggcgtgcgggccggggacagcggccgctacacctgcagagcagaaaatcggctgggcagccagcagcaggccctggacctgtctgtgcagtacccacctgagaacctgcgggtgatggtgtcccaggccaacagaacagtgctggagaacctgggcaatggcaccagcctgcctgtgctggagggccagagcctgcggctggtgtgtgtgacccacagcagccccccagcccggctgtcctggacccgctggggccagacagtgggccccagccagcccagcgaccccggggtgctggagctgccccccatccagatggagcacgagggggagttcacctgccacgcccagcaccccctgggcagccagcacgtgtccctgagcctgtctgtgcactggaagctggagcacggcggcggcctgggcctgggcgccgccctgggcgccggcgtggccgccctgctggccttctgcagctgcctggtggtgttccgggtgaagatctgcaggaaggaggccaggaagagagctgctgctgagcaggatgtgcccagcaccctgggccccatcagccagggccaccagcatgaatgttctgctggcagcagccaggaccaccccccacctggagctgccacctacacccctgggaagggggaggagcaggagctgcactacgccagcctgtccttccagggcctgcggctgtgggagcctgctgaccaggaggcccccagcaccacagagtacagcgagatcaagatccacacaggccagcccctgcggggccctggcttcggcctgcagctggagcgggagatgagcggcatggtgcccaagtag

SEQ ID NO: 50419 - DNA, 1809 bp, Artificial Sequence
  derived and/or modified sequence
atggtgcccggccaggcccagccccagagccccgagatgctgctgctgcccctgctgttgccagtgctgggcgccggaagcctcaacaaggacccatcatattccctccaggtacagcgccaagttccagtgccagaagggttgtgtgtgattgtcagctgtaacttaagttaccctagagatggttgggacgagtctactgccgcctacggatactggttcaaaggacgcacttcgccgaaaactggagcacctgtcgcaactaacaatcagagccgcgaggtcgagatgagtactagggacaggttccagctgaccggcgaccccggaaagggttcttgttcacttgtcatacgggacgcgcagcgggaagacgaagcttggtatttctttagggtcgagagggggagcagggtgagacatagctttctgagcaacgctttcttccttaaagtcacggcgctgacgaagaagccagacgtttacattccagagactctcgagcctggccagccagtgaccgtgatctgcgtgtttaactgggccttcaagaaatgccccgccccttccttttcatggacgggcgccgccttgagtcctcggcgtactcgtccttctacaagccatttcagtgtgttgagcttcactccttctcctcaggatcatgatacggatctgacatgccacgtcgacttctcccggaagggagtcagcgctcagcggaccgtcaggttgcgcgtggcttacgccccgaaggacctgataatttccatctcccacgataataccagcgcactggaactgcaaggaaatgtgatttacctggaagtgcagaaaggtcagtttctgcggcttctttgtgccgccgactcacagcccccagccactctgtcatgggtgctgcaagatagggtgcttagcagtagccacccatggggccccagaaccctgggcctggaattgcgaggcgtccgagcgggtgactccggcaggtatacgtgtagagccgagaatcggctggggtcgcagcagcaagcactagatctctctgtccaataccccccagagaatctgcgcgtgatggtgtcacaagccaaccggactgttctcgagaaccttggaaacggaacgtctcttcctgtgttggaaggccaatccctgcggttagtatgtgtgacacatagttcacctcccgctcgcctctcctggacaagatgggggcagacagtgggtccaagccagccatcagaccccggagtgctcgaacttccacccatccagatggaacatgaaggtgaattcacttgccacgcacagcacccattagggtctcagcatgtgtccctttctctgagtgtccactggaaactggagcatggaggaggcttgggcttaggcgccgctttgggtgcaggggtagctgcactgctggccttctgcagttgcttagtggtgtttcgcgtcaaaatttgtcgcaaggaggcgcgaaagcgggccgccgccgaacaggatgtacccagcactctcggacccatttcccaaggacaccagcatgaatgtagtgccggcagtagtcaagatcacccccctccgggcgctgcgacttacacaccaggcaaaggtgaggaacaggaactccattatgcctcattgagctttcagggactgagactgtgggagccggcagaccaggaagcgccttcgacgaccgagtacagcgagattaaaatccacaccgggcagcccctgagagggcccggctttggcctgcagctggagagagagatgtcggggatggtcccaaaatag

SEQ ID NO: 50420 - DNA, 1809 bp, Artificial Sequence
  derived and/or modified sequence
atggtgcccggccaggcccagccccagagccccgagatgctgctgttgcctctactactgcccgtgctcggagcaggctctctgaacaaagatccaagttattctctccaggtacagcgtcaggtgcctgtacccgaagggctgtgtgttattgtctcctgcaacctctcctacccacgtgatggctgggacgagagcaccgccgcctatggctactggtttaaaggccggacctcacctaagaccggcgctcctgtggccaccaataaccagtccagggaggttgagatgtcgactcgggacaggtttcaactgaccggcgacccagggaagggctcttgtagtctggtgatccgtgacgcccagagggaggacgaggcatggtatttcttcagggtagaacgaggctcacgagtcagacactcttttctatccaacgctttctttttaaaggtgacagctttaaccaagaaaccagatgtgtacatcccagaaacactggagcctgggcaacctgtcaccgtgatatgcgtctttaactgggctttcaagaaatgccctgccccatctttttcctggaccggtgccgcgttaagtccacggagaacccgcccaagtacctctcacttctctgttctgagttttactcccagtccccaggaccatgatacagacctgacctgccacgtggacttttcccgcaaaggcgtaagcgcgcagcgcacagtgagactgagagtcgcatatgctcccaaggacctgatcattagcattagccacgacaacacatcagccttggaactccagggcaatgttatctatcttgaggttcagaagggccagttccttaggctcctctgcgctgctgactcccagcctcccgccacgctgtcctgggtgctccaggatagagtgctttcatcaagccacccatggggaccccgtacattgggactggaactgaggggcgtgcgcgctggggattcagggagatacacatgcagagccgaaaatcgattaggatcccaacaacaggcactcgacctatccgttcagtatccgccagaaaacctgcgtgtcatggtctcacaagccaatcggactgtcctggaaaatctggggaacggcaccagcctcccagtcctggagggacagagcctccgactcgtgtgcgtgacacattcctctccaccggcccggctgagttggaccaggtggggccagacagtggggcccagccagccctctgaccccggagttctggaactgcctccgatacagatggagcacgagggcgagttcacctgccacgcacaacaccccctgggatcccaacacgtcagtctgtcactgagcgtgcactggaagctggaacacggaggaggcctgggcctgggggccgccttgggggcaggcgtcgcagccctattagccttttgtagctgcctcgtagtctttcgagtcaagatctgcaggaaagaagcccgtaagcgtgcggcagcggaacaggacgtgccatctaccctgggtccaatctcacaaggacaccagcacgaatgttcagcaggctcatcccaggaccacccaccacccggcgctgccacttacacccccggcaagggggaagagcaggaacttcactacgccagtttgagctttcagggcctgcggctctgggagccagctgatcaggaggcccccagcactaccgagtattctgaaatcaagatccatacaggacagcccctgagaggccctggtttcgggctacagcttgagcgcgaaatgtctgggatggtccccaaatag

SEQ ID NO: 50421 - DNA, 1809 bp, Artificial Sequence
  derived and/or modified sequence
atggtacccggacaggcccagccacagtctcccgagatgctactcctccctcttctactccctgtcctaggtgccggatcgctgaataaggatccctcctactcactgcaggtccagcgccaggtgcctgtcccggagggattatgtgtgatcgtgagttgcaatcttagctatcctcgagacggatgggatgagagcacagcagcatacggatactggttcaaaggacgcaccagccctaagacaggcgctccggttgccaccaataatcaaagccgggaggttgagatgtcaacacgtgacagatttcagctgacaggcgacccgggtaagggcagttgtagtctcgtcattcgcgatgctcagcgggaagatgaggcctggtattttttcagagtggaacggggaagcagggtcaggcattctttcctgtctaacgctttctttctgaaggttaccgctctcacaaaaaaaccagacgtttatatacccgagacccttgaaccgggacagccagtcactgtgatatgtgtgtttaactgggcgtttaagaagtgccccgcaccaagcttttcttggactggggctgccctctctcccagaaggacacggccatctaccagtcattttagtgtgctgagttttacaccttctccccaggaccacgatacggatctcacatgccacgtcgatttcagtcgtaagggggtatcagcccagaggacagtgagacttagagtcgcgtatgcccctaaggatctgatcatctcgatttcccacgacaacacaagcgcactggagcttcaggggaacgtgatttatctagaggtacagaagggccaattccttaggttactatgtgccgctgatagtcagccacccgcaacgctttcctgggtgcttcaagaccgggttctgtcctcttctcatccatggggaccgagaactctcggattggaactacgtggagttagagccggagactctggcaggtacacctgccgcgctgaaaatcgcttaggctcccagcaacaggccctggacttgagtgttcaatacccaccagagaacctacgggtcatggtgtcgcaggcgaacagaaccgtgcttgaaaacttagggaacggcactagcctgcctgtgctggagggtcagtcgctacgtctggtttgtgtgactcattccagcccaccagctcgactgtcctggactcgctggggacaaactgtcgggccatcacagcccagtgatcccggtgtgttggagctacccccaatccagatggagcatgagggggagttcacctgtcacgcgcagcatcccttaggcagccagcacgtaagcctctcactatccgtacactggaagctggaacatggcggagggctgggtctgggggctgcgctgggcgctggtgtggcagcgctcttggctttctgttcttgtctggtggtttttcgggtaaaaatctgtaggaaagaggctcgaaaaagagcggcagctgaacaagacgtgcccagcaccctgggcccaatatcacaaggacatcagcacgagtgcagcgccggatccagccaggatcacccaccacccggagccgctacatatactccaggaaagggggaggaacaggagttacactacgccagcctctcatttcagggcttaaggttgtgggaaccagccgatcaagaggctccatctaccaccgagtattcagagattaagatccacactggacaacctctgcgaggtcccggatttgggctgcagctggaacgggagatgtccggtatggttccaaaatag

SEQ ID NO: 50422 - DNA, 1809 bp, Artificial Sequence
  derived and/or modified sequence
atggtacccggacaagcacagccccaatcaccagagatgttattattgcccctcttgctgcccgtgctcggagctgggagcttgaacaaggacccatcttacagtctgcaggtacagagacaggttcccgttcccgaaggcctgtgcgtgattgtctcttgcaatctctcatatcccagagatggttgggacgagtccactgccgcatacggatactggttcaagggtcgcactagcccaaagactggcgctcccgtggcgactaataaccagagtcgagaggtggaaatgtccacaagagacaggttccaactgaccggggatcccggtaaggggagttgctcacttgtcatcagagatgcccagagggaggacgaggcctggtacttttttagagtagaaaggggctcccgcgtgcgccattcgttcctctccaatgccttcttcctcaaggtaactgcgttgaccaaaaagcccgacgtgtatatcccagagaccctcgagcctggtcaacctgtgactgtaatctgcgttttcaactgggcttttaaaaagtgcccagctccctcattctcttggactggagccgctctgtcacctaggcgaacccgccctagtacctcacatttttctgtactaagctttacaccatcaccccaagaccatgacacagacctgacatgtcacgtggatttctcacgcaagggcgtatctgcacaaagaaccgtgcgactacgagtggcgtatgcgcctaaggatctcattatctctatctctcacgacaacacaagtgcactcgagctgcagggaaacgtcatttacttggaggtccagaagggacagtttcttcggctactctgcgctgctgactctcagcctcctgctacgctatcctgggtgttacaggatcgcgtgctatcctcctcacatccctggggcccaagaaccctggggttggaactcagaggcgtccgggcaggagactctggcagatacacctgtcgcgctgagaatagattaggatcccaacagcaggctcttgacctcagcgttcagtaccctccagagaatttgcgggtgatggtcagtcaggcaaatcggacagtgctagagaatctcgggaatgggacaagcctgccagtgctagaggggcagagtctaagacttgtgtgcgtgacccactcctcgcccccagccagactcagttggacccgttggggacaaaccgtgggaccctcccaaccatccgaccctggggtgctggagctgccacccatccagatggagcacgaaggagagtttacctgccacgcccagcatcccttaggttcccagcatgtgagcttgagcctgtccgtccattggaaattggagcacggcggaggcctcggtttgggcgctgccctgggcgcaggggttgctgcacttttagctttctgctcctgtttggttgtgtttagggtaaaaatctgccgcaaagaagcacgcaagagagctgctgccgagcaagacgtgccgtccacactcgggcctattagccaaggacatcaacacgagtgctccgccggttccagccaggaccacccaccccctggggcagccacctacactccagggaaaggagaggagcaggaactgcactatgcctctctcagcttccagggcctgcgactctgggagcctgctgaccaggaggccccttctaccacggaatactccgagatcaaaattcacactggacagcccctgcggggtccaggcttcggcctgcagcttgaacgggagatgagcggcatggtgcccaaatag

SEQ ID NO: 50423 - DNA, 2875 bp, Artificial Sequence
  derived and/or modified sequence
cgaggctcctcctctgtggatggtcactgcccctccaccaggcttcctgctggaggagtttccttcccagccaggccggcccagaagccagatggtcccgggacaggcccagccccagagcccagagatgctgctgctgcccctgctgctgcccgtgctgggggcggggtccctgaacaaggatcccagttacagtcttcaagtgcagaggcaggtgccggtgccggagggcctgtgtgtcatcgtgtcttgcaacctctcctacccccgggatggctgggacgagtctactgctgcttatggctactggttcaaaggacggaccagcccaaagacgggtgctcctgtggccactaacaaccagagtcgagaggtggaaatgagcacccgggaccgattccagctcactggggatcccggcaaagggagctgctccttggtgatcagagacgcgcagagggaggatgaggcatggtacttctttcgggtggagagaggaagccgtgtgagacatagtttcctgagcaatgcgttctttctaaaagtaacagccctgactaagaagcctgatgtctacatccccgagaccctggagcccgggcagccggtgacggtcatctgtgtgtttaactgggctttcaagaaatgtccagccccttctttctcctggacgggggctgccctctcccctagaagaaccagaccaagcacctcccacttctcagtgctcagcttcacgcccagcccccaggaccacgacaccgacctcacctgccatgtggacttctccagaaagggtgtgagcgcacagaggaccgtccgactccgtgtggcctatgcccccaaagaccttattatcagcatttcacatgacaacacgtcagccctggaactccagggaaacgtcatatatctggaagttcagaaaggccagttcctgcggctcctctgtgctgctgacagccagccccctgccacgctgagctgggtcctgcaggacagagtcctctcctcgtcccacccctggggccccagaaccctggggctggagctgcgtggggtaagggccggggattcagggcgctacacctgccgagcggagaacaggcttggctcccagcagcaagccctggacctctctgtgcagtatcctccagagaacctgagagtgatggtttcccaagcaaacaggacagtcctggaaaacctcgggaacggcacatccctcccggtcctggagggccaaagcctgcgcctggtctgtgtcacccacagcagccccccagccaggctgagctggacccggtggggacagaccgtgggcccctcccagccctcagaccccggggtcctggagctgccacccattcaaatggagcacgaaggagagttcacctgccacgctcagcaccctctgggctcccagcacgtctctctcagcctctccgtgcactggaagctggagcatgggggaggacttggcctgggggctgccctgggagctggcgtcgctgccctgctcgctttctgttcctgccttgtcgtcttcagggtgaagatctgcaggaaggaagctcgcaagagggcagcagctgagcaggacgtgccctccaccctgggacccatctcccagggtcaccagcatgaatgctcggcaggcagctcccaagaccacccgcccccaggtgcagccacctacaccccggggaagggggaagagcaggagctccactatgcctccctcagcttccagggcctgaggctctgggagcctgcggaccaggaggcccccagcaccaccgagtactcggagatcaagatccacacaggacagcccctgaggggcccaggctttgggcttcaattggagagggagatgtcagggatggttccaaagtgaagaggtctccatggcaacaggacaccagcaagtgtgtgggagtcgcactggtgtgacggccagaactggactcagatttcagccccatccccaatgaagagcttgagtttgaagattatactttttttgagacagggtctgactctgtcctccaggccagagtccagtggtgcaatctcagctcactgtagcctcaacctgccaggttgaagtgagcctcccatttcagcctcccaagtagctgggactacaattgtgagccaccatgccaggctcattgttatatttttagtagagacagggttttgccatgtttccctggctggtctcagactcctgggctcaagcaatctgcccgcctctgcctcccaaagtgctgggattacagacgtgagccaccacagctggctgaagattatactttcaattcagagcgagtttgaagatgacactttgaggcatcgtgtctatggttcattactacagaagcttctctggatgtgtaaagcacaggaaaccaggcagaggaggcacagggtgctctccagaacgagaagccagctcctggagttgtttgctgcaactgccattccccgttgatgaccatgctcttccttcagaagagggagagtgagaggaccaagtccaagtggttcccatttgaacatttaaaaaaaaaaaaaaggctgggcatggtggctcacgcctgtaatctcaacactttgggaggctgaagtgggtggatcacaagtcaggagttcaagaccagcctgggcaagatggtgaaaccccatctctactaaaaatacaaaaattagccgggcatggtggcgggcgcctaaaatcccagctactcgggagactaggcagagaattggttgaacccgggaggtggaggttgcagtgagccgagatcgtcccactgcactccagcctgggcaacagagtgagactctgtttctaaataaataaatg

SEQ ID NO: 50424 - DNA, 2479 bp, Artificial Sequence
  derived and/or modified sequence
atggtcccgggacaggcccagccccagagcccagagatgctgctgctgcccctgctgctgcccgtgctgggggcggggtccctgaacaaggatcccagttacagtcttcaagtgcagaggcaggtgccggtgccggagggcctgtgtgtcatcgtgtcttgcaacctctcctacccccgggatggctgggacgagtctactgctgcttatggctactggttcaaaggacggaccagcccaaagacgggtgctcctgtggccactaacaaccagagtcgagaggtggaaatgagcacccgggaccgattccagctcactggggatcccggcaaagggagctgctccttggtgatcagagacgcgcagagggaggatgaggcatggtacttctttcgggtggagagaggaagccgtgtgagacatagtttcctgagcaatgcgttctttctaaaagtaacagccctgactaagaagcctgatgtctacatccccgagaccctggagcccgggcagccggtgacggtcatctgtgtgtttaactgggctttcaagaaatgtccagccccttctttctcctggacgggggctgccctctcccctagaagaaccagaccaagcacctcccacttctcagtgctcagcttcacgcccagcccccaggaccacgacaccgacctcacctgccatgtggacttctccagaaagggtgtgagcgcacagaggaccgtccgactccgtgtggcctatgcccccaaagaccttattatcagcatttcacatgacaacacgtcagccctggaactccagggaaacgtcatatatctggaagttcagaaaggccagttcctgcggctcctctgtgctgctgacagccagccccctgccacgctgagctgggtcctgcaggacagagtcctctcctcgtcccacccctggggccccagaaccctggggctggagctgcgtggggtaagggccggggattcagggcgctacacctgccgagcggagaacaggcttggctcccagcagcaagccctggacctctctgtgcagtatcctccagagaacctgagagtgatggtttcccaagcaaacaggacagtcctggaaaacctcgggaacggcacatccctcccggtcctggagggccaaagcctgcgcctggtctgtgtcacccacagcagccccccagccaggctgagctggacccggtggggacagaccgtgggcccctcccagccctcagaccccggggtcctggagctgccacccattcaaatggagcacgaaggagagttcacctgccacgctcagcaccctctgggctcccagcacgtctctctcagcctctccgtgcactggaagctggagcatgggggaggacttggcctgggggctgccctgggagctggcgtcgctgccctgctcgctttctgttcctgccttgtcgtcttcagggtgaagatctgcaggaaggaagctcgcaagagggcagcagctgagcaggacgtgccctccaccctgggacccatctcccagggtcaccagcatgaatgctcggcaggcagctcccaagaccacccgcccccaggtgcagccacctacaccccggggaagggggaagagcaggagctccactatgcctccctcagcttccagggcctgaggctctgggagcctgcggaccaggaggcccccagcaccaccgagtactcggagatcaagatccacacaggacagcccctgaggggcccaggctttgggcttcaattggagagggagatgtcagggatggttccaaagtgaagaggtctccatggcaacaggacaccagcaagtgtgtgggagtcgcactggtgtgacggccagaactggactcagatttcagccccatccccaatgaagagcttgagtttgaagattatactttttttgagacagggtctgactctgtcctccaggccagagtccagtggtgcaatctcagctcactgtagcctcaacctgccaggttgaagtgagcctcccatttcagcctcccaagtagctgggactacaattgtgagccaccatgccaggctcattgttatatttttagtagagacagggttttgccatgtttccctggctggtctcagactcctgggctcaagcaatctgcccgcctctgcctcccaaagtgctgggattacagacgtgagccaccacagctggctgaagattatactttcaattcagagcgagtttgaagatgacactttgaggcatcgtgtctatggttcattactacagaagcttctctggatgtgtaaagcacaggaaaccaggcagaggaggcacagggtgctctccagaacgagaagccagctcctggagttgtttgctgcaactgccattccccgttgatgaccatgctcttccttcagaagagggagagtgagaggaccaagtccaagtggttcccatttgaacattt

SEQ ID NO: 50425 - DNA, 1809 bp, Artificial Sequence
  derived and/or modified sequence
atggtgcccggccaggcccagccccagagccccgagatgctgctgctgcccctgctgctgcccgtgctgggcgccggcagcctgaacaaggaccccagctacagcctgcaggtgcagagacaggtgcccgtgcccgagggcctgtgcgtgatcgtgagctgcaacctgagctaccccagagacggctgggacgagagcaccgccgcctacggctactggttcaagggcagaaccagccccaagaccggcgcccccgtggccaccaacaaccagagcagagaggtggagatgagcaccagagacagattccagctgaccggcgaccccggcaagggcagctgcagcctggtgatcagagacgcccagagagaggacgaggcctggtacttcttcagagtggagagaggcagcagagtgagacacagcttcctgagcaacgccttcttcctgaaggtgaccgccctgaccaagaagcccgacgtgtacatccccgagaccctggagcccggccagcccgtgaccgtgatctgcgtgttcaactgggccttcaagaagtgccccgcccccagcttcagctggaccggcgccgccctgagccccagaagaaccagacccagcaccagccacttcagcgtgctgagcttcacccccagcccccaggaccacgacaccgacctgacctgccacgtggacttcagcagaaagggcgtgagcgcccagagaaccgtgagactgagagtggcctacgcccccaaggacctgatcatcagcatcagccacgacaacaccagcgccctggagctgcagggcaacgtgatctacctggaggtgcagaagggccagttcctgagactgctgtgcgccgccgacagccagccccccgccaccctgagctgggtgctgcaggacagagtgctgagcagcagccacccctggggccccagaaccctgggcctggagctgagaggcgtgagagccggcgacagcggcagatacacctgcagagccgagaacagactgggcagccagcagcaggccctggacctgagcgtgcagtacccccccgagaacctgagagtgatggtgagccaggccaacagaaccgtgctggagaacctgggcaacggcaccagcctgcccgtgctggagggccagagcctgagactggtgtgcgtgacccacagcagcccccccgccagactgagctggaccagatggggccagaccgtgggccccagccagcccagcgaccccggcgtgctggagctgccccccatccagatggagcacgagggcgagttcacctgccacgcccagcaccccctgggcagccagcacgtgagcctgagcctgagcgtgcactggaagctggagcacggcggcggcctgggcctgggcgccgccctgggcgccggcgtggccgccctgctggccttctgcagctgcctggtggtgttcagagtgaagatctgcagaaaggaggccagaaagagagccgccgccgagcaggacgtgcccagcaccctgggccccatcagccagggccaccagcacgagtgcagcgccggcagcagccaggaccaccccccccccggcgccgccacctacacccccggcaagggcgaggagcaggagctgcactacgccagcctgagcttccagggcctgagactgtgggagcccgccgaccaggaggcccccagcaccaccgagtacagcgagatcaagatccacaccggccagcccctgagaggccccggcttcggcctgcagctggagagagagatgagcggcatggtgcccaagtag

SEQ ID NO: 50426 - protein, 296 aa, Artificial Sequence
  derived and/or modified sequence
MSRQEPKMFVLLYVTSFAICASGQPRGNQLKGENYSPRYICSIPGLPGPPGPPGANGSPGPHGRIGLPGRDGRDGRKGEKGEKGTAGLRGKTGPLGLAGEKGDQGETGKKGPIGPEGEKGEVGPIGPPGPKGDRGEQGDPGLPGVCRCGSIVLKSAFSVGITTSYPEERLPIIFNKVLFNEGEHYNPATGKFICAFPGIYYFSYDITLANKHLAIGLVHNGQYRIKTFDANTGNHDVASGSTVIYLQPEDEVWLEIFFTDQNGLFSDPGWADSLFSGFLLYVDTDYLDSISEDDEL

SEQ ID NO: 50427 - protein, 289 aa, Artificial Sequence
  derived and/or modified sequence
MFVLLYVTSFAICASGQPRGNQLKGENYSPRYICSIPGLPGPPGPPGANGSPGPHGRIGLPGRDGRDGRKGEKGEKGTAGLRGKTGPLGLAGEKGDQGETGKKGPIGPEGEKGEVGPIGPPGPKGDRGEQGDPGLPGVCRCGSIVLKSAFSVGITTSYPEERLPIIFNKVLFNEGEHYNPATGKFICAFPGIYYFSYDITLANKHLAIGLVHNGQYRIKTFDANTGNHDVASGSTVIYLQPEDEVWLEIFFTDQNGLFSDPGWADSLFSGFLLYVDTDYLDSISEDDEL

SEQ ID NO: 50428 - DNA, 891 bp, Artificial Sequence
  derived and/or modified sequence
atgagccgtcaggagccaaagatgttcgtgctcctctatgtgacatctttcgcaatctgcgcttccggacaaccaagaggcaatcagctgaaaggcgagaattacagtcccagatatatttgtagcatacccggtctccctggccctccagggccacccggagctaatggatcacctgggccacatgggcgaattggcttgcccggaagggacggaagggacggcaggaagggcgagaagggcgagaaaggaacagcgggtttaaggggtaagaccggacccttaggactagccggagagaaaggagaccagggagagactggaaaaaagggaccaatcggccctgagggggaaaagggcgaagtgggccctattggacctccgggacctaagggtgacaggggagagcagggggaccctggcctgcccggtgtctgccggtgcggctccatcgtccttaaaagcgccttcagcgtcgggatcacaacatcatatccagaggaacggctcccaattatttttaataaggttctctttaatgagggcgaacactacaaccccgctacgggaaagttcatctgtgcctttccagggatctattatttttcttatgatattacgctggcaaacaagcaccttgccattggactggtgcataatggtcagtaccggatcaaaaccttcgacgccaatacgggcaatcacgacgtggccagcgggagcacagtgatatatctgcagccagaggatgaggtgtggttagaaatcttctttactgaccagaacggtctattttcggatcctggttgggctgactctctgttcagtggcttcctgctttatgtcgacacggactatttagactccattagcgaggatgatgaactgtag

SEQ ID NO: 50429 - DNA, 891 bp, Artificial Sequence
  derived and/or modified sequence
atgtctcgccaggaacccaaaatgtttgtgctgctctatgtgaccagctttgccatttgcgctagcggtcaacctaggggtaatcagctcaagggcgaaaactattcacctagatacatttgtagcattccaggtctccccggtccaccaggtcctcctggggccaacggctcacccggcccccacggcaggatcggacttccagggagggacggccgggacggtcgcaagggagaaaagggcgagaagggcaccgccggcctgcggggtaagactggccctctgggtctcgcgggggaaaaaggtgatcagggcgaaaccgggaaaaaagggccgattggaccagagggagaaaagggagaggttggaccgatcggaccgccaggaccgaagggtgaccgtggtgaacaaggagaccctggattgcctggcgtctgtaggtgcgggagcattgtcctgaagagcgcattttccgtgggaatcaccacctcttatcccgaagaaagactcccaatcattttcaacaaggtactgtttaatgagggcgagcattacaaccctgcaaccgggaagttcatttgtgctttccccggtatctattatttttcatatgatatcaccctcgcaaataaacaccttgccatcggattagttcataatggtcaatataggataaagacatttgacgcaaacactgggaaccatgacgtcgccagcggctcaacagtgatctacttacagccggaagacgaggtgtggctcgagatattttttactgatcaaaatggattgttcagcgacccaggttgggctgacagtcttttttctggcttcctcttgtatgttgatacagattatttggactcgatcagcgaggacgacgaactgtag

SEQ ID NO: 50430 - DNA, 4464 bp, Artificial Sequence
  derived and/or modified sequence
ttgcacgccggggtccttgcccgctccctctctctgccaccgctcaaagcctgggagaacgcttttgaaagcgaatcaggaaattacttatcaatctgaagccccaaagaattatgaataatcctcgctgccaaagggaaggggattttgagcaaaagctccacatctgcgcacactagagttcaaagactccagctgttggaaggtcttgtgagcaatagccaaagatgtttgtcttgctctatgttacaagttttgccatttgtgccagtggacaaccccggggtaatcagttgaaaggagagaactactcccccaggtatatctgcagcattcctggcttgcctggacctccagggccccctggagcaaatggttcccctgggccccatggtcgcatcggccttccaggaagagatggtagagacggcaggaaaggagagaaaggtgaaaagggaactgcaggtttgagaggtaagactggaccgctaggtcttgccggtgagaaaggggaccaaggagagactgggaagaaaggacccataggaccagagggagagaaaggagaagtaggtccaattggtcctcctggaccaaagggagacagaggagaacaaggggacccggggctgcctggagtttgcagatgtggaagcatcgtgctcaaatccgccttttctgttggcatcacaaccagctacccagaagaaagactacctattatatttaacaaggtcctcttcaacgagggagagcactacaaccctgccacagggaagttcatctgtgctttcccagggatctattacttttcttatgatatcacattggctaataagcatctggcaatcggactggtacacaatgggcaataccggataaagaccttcgacgccaacacaggaaaccatgatgtggcttcggggtccacagtcatctatctgcagccagaagatgaagtctggctggagattttcttcacagaccagaatggcctcttctcagacccaggttgggcagacagcttattctccgggtttctcttatacgttgacacagattacctagattccatatcagaagatgatgaattgtgatcaggaccaagatccctgtggtaaacactctgattgaatctggggttccagaaggtggaacaagcaggaatgggatccaaagagactcccactcagattctaaagcatttaaagacaattctagcagaatttatcaaaacaagatgaaacacagaaaagttgaaaccacaacaaaatgaattctattaaagaatagccccagatataaattctcttgaaagcaatgttcataaatatttaagcaaattaaagacaatgttaacaaattttctattaaatgccctgagtgataaaaccagttggcaataatattgccttattaaatcttcaaaaaatatattttagtctgttatttaagaaaaacataacatcccaaaatctttgacaattctcgaaaggctatatagtaagtcaaaaaccaaaggtaagagatgctaactatttttcaagcaagctacagagaaatgataaatgttttttgttttattatttattccttcatgtttgtatatattcactcaacaaccctttaatgagcctgtaaggaccagacactgtggcgctgaatcagatttaataatgagttaagacaaagcccctacctatgggctagtgtgtggtgatcaaactatcacaattcagtgtgatgagcagcatagcaaacagatggatttgaagctaaaagcacacagggtctgctattcctgaggctgggggccagagaagcttttacgcatggaaaaacactaatcatgccaaggtgtatgtgtttaagggggtgtgatggatgcaaagggaatgaggaattcagcactgcattctctttgcaccctcaatgcatgattggtattctcaacagcaaaggggtgaaaaatctagagacagaggaggcctggcaggggtgataaaaatggagattgaaatgaagagaaatagccagcaggtgattcttctgaatcctttagtgtgatggtttcccaagacaaacatttgtcctaatagctttctcataaatatgggcaccactttacattgtggtaagacattgcttctcatggatctgctaggtatttatttcaaataaagcaaggcatatgttcactgatttacgagtaagctgatgagagcaatgaacaggagaaggagggagagagccaaatgtctgagtaaacagatatcccttccaagtctcacacctcccttagtcccactcttgcttgtgtcagcaccttgttcttcactgaactgcaattcttcaattattctcttccatgattttgtctgatctaccatttctatggtttatggtaatagtattccctttatccctcccttttggtaacttccaatcctccttctatgtattcctttctctgctcattgacttataaatagttttcatacctcttatgtttgaatcaccatgctagattctgtgaagacagaagagtatcaagattaatatattaatagtatagctctgactggtaaatttcttttttttaatcttccccaatttaaattttttaatttaaaagtaaattttactgtcgaaaatgcaaacttggggagggcggaaacatcacacacaaggtttccacttcacacttggagggttgcatggcggctgggcaaaggtgctccccacttcccagatggtgcggcggctggccagaggcactcttcacttcccagacagaggggcggccgggcagaggtgctcctcacttcccagagggtgcaggagccagctctgactagtaaatttctaaggataccagaaaggaaatggcatgcacacacacaaaaaatacctaaattttggatgagaaaatgataaaatatgctaagttctaggctggaaataagggcaaaatgctgtgaaagaagaggaaatgtttacttccaaattaggatgtgacagagaagggatagggaaatcctctctgctcattgggccttacatgatgggtgacacttggagtggcacaagttgggggaaagcgcacttgagacagaggtaatgatggggacgaagtgagaacagagacccagaaggagaatcaatggaccatatttgtaagagctttgaaagccagcctgagaattggaggatttattcataagaaagtgtagagaccctgtgtatttcagagctggatactgccattaccacagatgaaagttgcaatgatctagcagttgtgtgcaaaggcaaggcttgcttttcctgtctttcaaccctatcttgcttttcctgtctttcaaccctatcttgctttcattgtcttcatcttcctgccatactttgtgcacttattgctctccttctgagtcaggacatgtgtacaggagaccaagaacaatgagtattagaaaaaaaggagacagcaaaggtggtttgaggtagtcacctgcttacagataacagccaaagatagaattccaagttataaagcataaaaaagagccaacagaagtaactaatccgggaaaagtgaacatatgggccctttaaagactacaagatttgctagataaactggaaatggagaagttattgcagacagtcatgaaccacaaatcactgtgattaaaattttcttctgatcgtaatccacgaatgcattcattttttggacattgcttacttatcttttaaatgtttcttttattacaaagcctattttgagtagcttttaaaactgaatttcctttaattggtttgaagcctagagatgaatttcgttttcaaatatctggtgggatggtaatggggattagagaactgacatgagaaaagaggagctgttttggtattaaacgaataaaatcttaagcaaatataggtgtcttttattcttaaaaaatagcagatacagtttatccacatttgtaaatatttgtataaagaaagtagcaaaacagttttggtttaaaaagttccaagtctcattgcaatcattctttgtaaaggctgacttgtaatgaatatgtattaagcaatatttattgactatacaccatcttgttctagaagagtttaaagccacttaagaagataaataagatataaaaagaaaacagcagtcaaaagcagatgagaagaaatgggaaaaacaaaaaaaaaagaaaataatgaggctaatataatgctgtgtgtacatgaacatgaatgtgcctgtgttacacattttcaggccacaaatgtttctttgtgcccctgcatgcacaagggtatttccaggtcatttatcattgtgaacagtgttgcttatgataaaaaatagattctataaactctaaatatactttttttctaccactctgtgtaaaagatcatgaacgtaaataaattttagatatg

SEQ ID NO: 50431 - DNA, 1533 bp, Artificial Sequence
  derived and/or modified sequence
gaggccacaacacacagagatggagaagctctaaacttaccactgaaggaaagcaggcacttaaagtttatcccaaacaaaactgtaattttaactggtccccgagttgagcctcactcgatgaatgacttccagggcctttggctctttgggactaaacgagaaaattatttttagcacaactatttggaaatctttgagaatttggatctgttattctgtctggtaccaaagcaagtttttcactgagctctcatgaaagatcctcagtctcttgtggatttagaatcctgcagcagcccaccatctaagagcaagagccaaagatgtttgtcttgctctatgttacaagttttgccatttgtgccagtggacaaccccggggtaatcagttgaaaggagagaactactcccccaggtatatctgcagcattcctggcttgcctggacctccagggccccctggagcaaatggttcccctgggccccatggtcgcatcggccttccaggaagagatggtagagacggcaggaaaggagagaaaggtgaaaagggaactgcaggtttgagaggtaagactggaccgctaggtcttgccggtgagaaaggggaccaaggagagactgggaagaaaggacccataggaccagagggagagaaaggagaagtaggtccaattggtcctcctggaccaaagggagacagaggagaacaaggggacccggggctgcctggagtttgcagatgtggaagcatcgtgctcaaatccgccttttctgttggcatcacaaccagctacccagaagaaagactacctattatatttaacaaggtcctcttcaacgagggagagcactacaaccctgccacagggaagttcatctgtgctttcccagggatctattacttttcttatgatatcacattggctaataagcatctggcaatcggactggtacacaatgggcaataccggataaagaccttcgacgccaacacaggaaaccatgatgtggcttcggggtccacagtcatctatctgcagccagaagatgaagtctggctggagattttcttcacagaccagaatggcctcttctcagacccaggttgggcagacagcttattctccgggtttctcttatacgttgacacagattacctagattccatatcagaagatgatgaattgtgatcaggaccaagatccctgtggtaaacactctgattgaatctggggttccagaaggtggaacaagcaggaatgggatccaaagagactcccactcagattctaaagcatttaaagacaattctagcagaatttatcaaaacaagatgaaacacagaaaagttgaaaccacaacaaaatgaattctattaaagaatagccccagatataaattctcttgaaagcaatgttcataaatatttaagcaaattaaagacaatgttaacaaattttctattaaatgccctgagtgataaaaccagttggcaataatattgccttattaaatcttcaaaaaata

SEQ ID NO: 50432 - DNA, 891 bp, Artificial Sequence
  derived and/or modified sequence
atgtcccgccaggaacccaagatgtttgtactcctgtatgtaacatccttcgcaatctgcgcgagtgggcagccacgggggaaccaacttaaaggagagaactactcacctcggtacatttgttccatacccggactacctggaccaccaggtccaccaggcgcaaatggatcacccggaccacatggacgtataggcctgcctgggcgcgacggtagagacggtcggaagggcgagaaaggagagaaaggcaccgcaggactgcgtggaaaaactggccctctgggactggctggtgagaaaggggaccagggcgaaacaggaaaaaagggacccattggacctgaaggtgaaaaaggcgaggtgggacccattggacccccgggaccaaagggcgaccgcggtgaacaaggggatcctggactgcccggcgtgtgtagatgcggctccatcgttctgaaatccgccttttccgtaggcatcaccacgtcgtacccagaggaaagactccccataatcttcaataaagtgttattcaatgagggagaacattacaatcctgcgaccggcaaattcatttgtgcattccccggtatctattatttttcatatgatatcaccctcgcaaataaacaccttgccatcggattagttcataatggtcaatataggataaagacatttgacgcaaacactgggaaccatgacgtcgccagcggctcaacagtgatctacttacagccggaagacgaggtgtggctcgagatattttttactgatcaaaatggattgttcagcgacccaggttgggctgacagtcttttttctggcttcctcttgtatgttgatacagattatttggactcgatcagcgaggacgacgaactgtag

SEQ ID NO: 50433 - DNA, 4516 bp, Artificial Sequence
  derived and/or modified sequence
gggagaaggagtgggaggttgtttaaactgagaaagacagttgcaaaacttcgtacaacagcatgagctccaagcttcaaacgcattctcatgctcagacgagcactttatttttcatcaagttattttttgcattgttttggagtagcttcgaataataaacacatatttctgctttaaatttttaatagttaactacattcatgggacaaccaaagcaagaaagcctcatgttttgggggaaagtttgatatcagcaatgtccagacaagagccaaagatgtttgtcttgctctatgttacaagttttgccatttgtgccagtggacaaccccggggtaatcagttgaaaggagagaactactcccccaggtatatctgcagcattcctggcttgcctggacctccagggccccctggagcaaatggttcccctgggccccatggtcgcatcggccttccaggaagagatggtagagacggcaggaaaggagagaaaggtgaaaagggaactgcaggtttgagaggtaagactggaccgctaggtcttgccggtgagaaaggggaccaaggagagactgggaagaaaggacccataggaccagagggagagaaaggagaagtaggtccaattggtcctcctggaccaaagggagacagaggagaacaaggggacccggggctgcctggagtttgcagatgtggaagcatcgtgctcaaatccgccttttctgttggcatcacaaccagctacccagaagaaagactacctattatatttaacaaggtcctcttcaacgagggagagcactacaaccctgccacagggaagttcatctgtgctttcccagggatctattacttttcttatgatatcacattggctaataagcatctggcaatcggactggtacacaatgggcaataccggataaagaccttcgacgccaacacaggaaaccatgatgtggcttcggggtccacagtcatctatctgcagccagaagatgaagtctggctggagattttcttcacagaccagaatggcctcttctcagacccaggttgggcagacagcttattctccgggtttctcttatacgttgacacagattacctagattccatatcagaagatgatgaattgtgatcaggaccaagatccctgtggtaaacactctgattgaatctggggttccagaaggtggaacaagcaggaatgggatccaaagagactcccactcagattctaaagcatttaaagacaattctagcagaatttatcaaaacaagatgaaacacagaaaagttgaaaccacaacaaaatgaattctattaaagaatagccccagatataaattctcttgaaagcaatgttcataaatatttaagcaaattaaagacaatgttaacaaattttctattaaatgccctgagtgataaaaccagttggcaataatattgccttattaaatcttcaaaaaatatattttagtctgttatttaagaaaaacataacatcccaaaatctttgacaattctcgaaaggctatatagtaagtcaaaaaccaaaggtaagagatgctaactatttttcaagcaagctacagagaaatgataaatgttttttgttttattatttattccttcatgtttgtatatattcactcaacaaccctttaatgagcctgtaaggaccagacactgtggcgctgaatcagatttaataatgagttaagacaaagcccctacctatgggctagtgtgtggtgatcaaactatcacaattcagtgtgatgagcagcatagcaaacagatggatttgaagctaaaagcacacagggtctgctattcctgaggctgggggccagagaagcttttacgcatggaaaaacactaatcatgccaaggtgtatgtgtttaagggggtgtgatggatgcaaagggaatgaggaattcagcactgcattctctttgcaccctcaatgcatgattggtattctcaacagcaaaggggtgaaaaatctagagacagaggaggcctggcaggggtgataaaaatggagattgaaatgaagagaaatagccagcaggtgattcttctgaatcctttagtgtgatggtttcccaagacaaacatttgtcctaatagctttctcataaatatgggcaccactttacattgtggtaagacattgcttctcatggatctgctaggtatttatttcaaataaagcaaggcatatgttcactgatttacgagtaagctgatgagagcaatgaacaggagaaggagggagagagccaaatgtctgagtaaacagatatcccttccaagtctcacacctcccttagtcccactcttgcttgtgtcagcaccttgttcttcactgaactgcaattcttcaattattctcttccatgattttgtctgatctaccatttctatggtttatggtaatagtattccctttatccctcccttttggtaacttccaatcctccttctatgtattcctttctctgctcattgacttataaatagttttcatacctcttatgtttgaatcaccatgctagattctgtgaagacagaagagtatcaagattaatatattaatagtatagctctgactggtaaatttcttttttttaatcttccccaatttaaattttttaatttaaaagtaaattttactgtcgaaaatgcaaacttggggagggcggaaacatcacacacaaggtttccacttcacacttggagggttgcatggcggctgggcaaaggtgctccccacttcccagatggtgcggcggctggccagaggcactcttcacttcccagacagaggggcggccgggcagaggtgctcctcacttcccagagggtgcaggagccagctctgactagtaaatttctaaggataccagaaaggaaatggcatgcacacacacaaaaaatacctaaattttggatgagaaaatgataaaatatgctaagttctaggctggaaataagggcaaaatgctgtgaaagaagaggaaatgtttacttccaaattaggatgtgacagagaagggatagggaaatcctctctgctcattgggccttacatgatgggtgacacttggagtggcacaagttgggggaaagcgcacttgagacagaggtaatgatggggacgaagtgagaacagagacccagaaggagaatcaatggaccatatttgtaagagctttgaaagccagcctgagaattggaggatttattcataagaaagtgtagagaccctgtgtatttcagagctggatactgccattaccacagatgaaagttgcaatgatctagcagttgtgtgcaaaggcaaggcttgcttttcctgtctttcaaccctatcttgcttttcctgtctttcaaccctatcttgctttcattgtcttcatcttcctgccatactttgtgcacttattgctctccttctgagtcaggacatgtgtacaggagaccaagaacaatgagtattagaaaaaaaggagacagcaaaggtggtttgaggtagtcacctgcttacagataacagccaaagatagaattccaagttataaagcataaaaaagagccaacagaagtaactaatccgggaaaagtgaacatatgggccctttaaagactacaagatttgctagataaactggaaatggagaagttattgcagacagtcatgaaccacaaatcactgtgattaaaattttcttctgatcgtaatccacgaatgcattcattttttggacattgcttacttatcttttaaatgtttcttttattacaaagcctattttgagtagcttttaaaactgaatttcctttaattggtttgaagcctagagatgaatttcgttttcaaatatctggtgggatggtaatggggattagagaactgacatgagaaaagaggagctgttttggtattaaacgaataaaatcttaagcaaatataggtgtcttttattcttaaaaaatagcagatacagtttatccacatttgtaaatatttgtataaagaaagtagcaaaacagttttggtttaaaaagttccaagtctcattgcaatcattctttgtaaaggctgacttgtaatgaatatgtattaagcaatatttattgactatacaccatcttgttctagaagagtttaaagccacttaagaagataaataagatataaaaagaaaacagcagtcaaaagcagatgagaagaaatgggaaaaacaaaaaaaaaagaaaataatgaggctaatataatgctgtgtgtacatgaacatgaatgtgcctgtgttacacattttcaggccacaaatgtttctttgtgcccctgcatgcacaagggtatttccaggtcatttatcattgtgaacagtgttgcttatgataaaaaatagattctataaactctaaatatactttttttctaccactctgtgtaaaagatcatgaacgtaaataaattttagatat

SEQ ID NO: 50434 - DNA, 891 bp, Artificial Sequence
  derived and/or modified sequence
atgagcagacaggagcccaagatgttcgtgctgctgtacgtgaccagcttcgccatctgcgccagcggccagcccagaggcaaccagctgaagggcgagaactacagccccagatacatctgcagcatccccggcctgcccggcccccccggcccccccggcgccaacggcagccccggcccccacggcagaatcggcctgcccggcagagacggcagagacggcagaaagggcgagaagggcgagaagggcaccgccggcctgagaggcaagaccggccccctgggcctggccggcgagaagggcgaccagggcgagaccggcaagaagggccccatcggccccgagggcgagaagggcgaggtgggccccatcggcccccccggccccaagggcgacagaggcgagcagggcgaccccggcctgcccggcgtgtgcagatgcggcagcatcgtgctgaagagcgccttcagcgtgggcatcaccaccagctaccccgaggagagactgcccatcatcttcaacaaggtgctgttcaacgagggcgagcactacaaccccgccaccggcaagttcatctgcgccttccccggcatctactacttcagctacgacatcaccctggccaacaagcacctggccatcggcctggtgcacaacggccagtacagaatcaagaccttcgacgccaacaccggcaaccacgacgtggccagcggcagcaccgtgatctacctgcagcccgaggacgaggtgtggctggagatcttcttcaccgaccagaacggcctgttcagcgaccccggctgggccgacagcctgttcagcggcttcctgctgtacgtggacaccgactacctggacagcatcagcgaggacgacgagctgtag

SEQ ID NO: 50435 - DNA, 891 bp, Artificial Sequence
  derived and/or modified sequence
atgtccagacaggagcctaagatgttcgtcctgctgtatgtgacaagtttcgctatatgtgctagtggacagcctagggggaaccagttaaagggcgagaactactccccgcgctatatctgctcaatcccaggactgcccggccctcctgggccgccaggggctaacggatcacctggaccccacggccgaatcgggttgccaggcagagacggacgtgatgggagaaagggcgagaaaggggagaaggggaccgccgggcttcgaggaaaaaccggtcccctcggcctggccggagaaaaaggagaccagggtgagactggcaaaaaaggccctatcggaccggagggcgagaaaggagaggtcggacctatcgggccacccggtcccaagggggatcgcggcgaacagggggacccagggctacctggtgtgtgtcgatgcggaagcatcgtcctaaagagcgcgttttccgtcggcataaccacctcttaccccgaggagagacttccaatcatttttaataaagtcctgttcaatgaaggtgaacactacaacccagccactgggaaattcatttgtgcctttccaggaatctattacttctcctacgacataaccttagctaacaagcacctagccatcggcctcgtgcacaatggccaataccgtattaaaacttttgacgccaataccggtaatcatgacgtggcctctggatctactgtaatatatctgcagccagaggatgaggtatggctggagatctttttcaccgatcaaaatggcctatttagcgaccctggttgggcagactcattgttcagtggttttcttttgtatgtggatactgactatctcgacagcatctctgaggatgacgaattgtag

SEQ ID NO: 50436 - DNA, 891 bp, Artificial Sequence
  derived and/or modified sequence
atgagccggcaggagcccaagatgtttgtgctgctgtatgtgaccagctttgccatctgtgccagcggccagccccggggcaaccagctgaagggggagaactacagcccccgctacatctgcagcatccctggcctgcccggccccccaggccccccaggggccaacggcagccctggcccccacggcagaattggcctgcccggcagagatggaagagatggcaggaaaggagagaagggggagaagggcacagctggcctgcggggcaagacaggccccctgggcctggccggggagaagggggaccagggcgagaccgggaagaagggccccatcggccctgagggggagaagggggaggtgggccccatcggccccccaggccccaagggggacagaggagagcagggcgaccccggcctgcccggggtgtgccgctgtggcagcatcgtgctgaagagcgccttctctgtgggcatcaccaccagctacccagaggagcggctgcccatcatcttcaacaaggtgctcttcaatgaaggagagcactacaacccagccaccgggaagttcatctgtgccttccctggcatctactacttctcctatgacatcaccctggccaacaagcacctggccatcggcctggtgcacaacggccagtaccgcatcaagacctttgatgccaacacaggcaaccatgatgtggccagcggcagcaccgtcatctacctgcagccagaagatgaggtgtggctggagatcttcttcacagaccagaatggcctcttcagtgaccccggctgggccgacagcctcttcagcggcttcctgctgtatgtggacacagactacctggacagcatcagtgaagatgatgagctgtag

SEQ ID NO: 50437 - DNA, 891 bp, Artificial Sequence
  derived and/or modified sequence
atgagccggcaggagcccaagatgttcgtgctgctgtacgtgacctccttcgcgatctgcgcctcggggcaaccccgtggcaatcagctgaagggcgaaaactatagtccgagatacatctgttccatcccaggcctaccaggaccacctgggccaccaggcgctaatgggtcgcctggtcctcacggcaggataggcctgccggggcgcgatggccgagacggccggaaaggggagaagggggaaaagggcaccgccgggctgagaggcaagaccggccctctgggcctggctggcgagaaaggggaccagggggagactggaaaaaagggacctatcggccccgagggggagaaaggcgaggtcggaccaattggtccacctggacccaaaggagacaggggggaacagggagaccctggcctgccgggggtatgtcgatgtggcagcatcgtgcttaaatccgccttctcggtgggcattaccacgtcttatcccgaagaaagattgcccattatctttaacaaagttcttttcaatgagggtgaacactacaatccagccacaggtaaattcatttgtgccttccctggaatctattacttttcctatgacataacgcttgcgaacaagcatctcgccattggccttgtccacaacgggcagtaccgcatcaaaacatttgacgcaaatactggtaatcacgacgtggcgtccggcagtaccgtcatttatcttcagcctgaggacgaggtctggctggagattttttttacagaccagaacggcctgttttcagacccaggctgggctgattcactattctccggcttccttctctacgtcgatactgactatttagactcaattagcgaggacgatgaactgtag

SEQ ID NO: 50438 - DNA, 566 bp, Artificial Sequence
  derived and/or modified sequence
cattgcacgccggggtccttgcccgctccctctctctgccaccgctcaaagcctgggagaacgcttttgaaagcgaatcaggaaattacttatcaatctgaagccccaaagaattatgaataatcctcgctgccaaagggaaggggattttgagcaaaagctccacatctgcgcacactagagttcaaagactccagctgttggaaggtcttgtgagcaatagccaaagatgtttgtcttgctctatgttacaagttttgccatttgtgccagtggacaaccccggggtaatcagttgaaaggagagaactactcccccaggtatatctgcagcattcctggcttgcctggacctccagggccccctggagcaaatggttcccctgggccccatggtcgcatcggccttccaggaagagatggtagagacggcaggaaaggagagaaaggtgaaaagggaactgcaggtttgagaggtaagactggaccgctaggtcttgccggtgagaaaggggaccaaggagagactgggaagaaaggacccataggaccagagggagagaaag

SEQ ID NO: 50439 - RNA, 891 nt, Artificial Sequence
  derived and/or modified sequence
augucucgccaggaacccaaaauguuugugcugcucuaugugaccagcuuugccauuugcgcuagcggucaaccuagggguaaucagcucaagggcgaaaacuauucaccuagauacauuuguagcauuccaggucuccccgguccaccagguccuccuggggccaacggcucacccggcccccacggcaggaucggacuuccagggagggacggccgggacggucgcaagggagaaaagggcgagaagggcaccgccggccugcgggguaagacuggcccucugggucucgcgggggaaaaaggugaucagggcgaaaccgggaaaaaagggccgauuggaccagagggagaaaagggagagguuggaccgaucggaccgccaggaccgaagggugaccguggugaacaaggagacccuggauugccuggcgucuguaggugcgggagcauuguccugaagagcgcauuuuccgugggaaucaccaccucuuaucccgaagaaagacucccaaucauuuucaacaagguacuguuuaaugagggcgagcauuacaacccugcaaccgggaaguucauuugugcuuuccccgguaucuauuauuuuucauaugauaucacccucgcaaauaaacaccuugccaucggauuaguucauaauggucaauauaggauaaagacauuugacgcaaacacugggaaccaugacgucgccagcggcucaacagugaucuacuuacagccggaagacgagguguggcucgagauauuuuuuacugaucaaaauggauuguucagcgacccagguugggcugacagucuuuuuucuggcuuccucuuguauguugauacagauuauuuggacucgaucagcgaggacgacgaacuguag

SEQ ID NO: 50440 - RNA, 891 nt, Artificial Sequence
  derived and/or modified sequence
augucccgccaggaacccaagauguuuguacuccuguauguaacauccuucgcaaucugcgcgagugggcagccacgggggaaccaacuuaaaggagagaacuacucaccucgguacauuuguuccauacccggacuaccuggaccaccagguccaccaggcgcaaauggaucacccggaccacauggacguauaggccugccugggcgcgacgguagagacggucggaagggcgagaaaggagagaaaggcaccgcaggacugcguggaaaaacuggcccucugggacuggcuggugagaaaggggaccagggcgaaacaggaaaaaagggacccauuggaccugaaggugaaaaaggcgaggugggacccauuggacccccgggaccaaagggcgaccgcggugaacaaggggauccuggacugcccggcguguguagaugcggcuccaucguucugaaauccgccuuuuccguaggcaucaccacgucguacccagaggaaagacuccccauaaucuucaauaaaguguuauucaaugagggagaacauuacaauccugcgaccggcaaauucauuugugcauuccccgguaucuauuauuuuucauaugauaucacccucgcaaauaaacaccuugccaucggauuaguucauaauggucaauauaggauaaagacauuugacgcaaacacugggaaccaugacgucgccagcggcucaacagugaucuacuuacagccggaagacgagguguggcucgagauauuuuuuacugaucaaaauggauuguucagcgacccagguugggcugacagucuuuuuucuggcuuccucuuguauguugauacagauuauuuggacucgaucagcgaggacgacgaacuguag

SEQ ID NO: 50441 - protein, 660 aa, Artificial Sequence
  derived and/or modified sequence
MQENLRFASSGDDIKIWDASSMTLVDKFNPHTSPHGISSICWSSNNNFLVTASSSGDKIVVSSCKCKPVPLLELAEGQKQTCVNLNSTSMYLVSGGLNNTVNIWDLKSKRVHRSLKDHKDQVTCVTYNWNDCYIASGSLSGEIILHSVTTNLSSTPFGHGSNQSVRHLKYSLFKKSLLGSVSDNGIVTLWDVNSQSPYHNFDSVHKAPASGICFSPVNELLFVTIGLDKRIILYDTSSKKLVKTLVADTPLTAVDFMPDGATLAIGSSRGKIYQYDLRMLKSPVKTISAHKTSVQCIAFQYSTVLTKSSLNKGCSNKPTTVNKRSVNVNAASGGVQNSGIVREAPATSIATVLPQPMTSAMGKGTVAVQEKAGLPRSINTDTLSKETDSGKNQDFSSFDDTGKSSLGDMFSPIRDDAVVNKGSDESIGKGDGFDFLPQLNSVFPPRKNPVTSSTSVLHSSPLNVFMGSPGKEENENRDLTAESKKIYMGKQESKDSFKQLAKLVTSGAESGNLNTSPSSNQTRNSEKFEKPENEIEAQLICEPPINGSSTPNPKIASSVTAGVASSLSEKIADSIGNNRQNAPLTSIQIRFIQNMIQETLDDFREACHRDIVNLQVEMIKQFHMQLNEMHSLLERYSVNEGLVAEIERLREENKRLRAHF

SEQ ID NO: 50442 - protein, 101 aa, Artificial Sequence
  derived and/or modified sequence
MQENLRFASSGDDIKIWDASSMTLVDKFNPHTSPHGISSICWSSNNNFLVTASSSGDKIVVSSCKCKPVPLLELAEGQKQTCVNLNSTSMYLVSGGLNNTV

SEQ ID NO: 50443 - DNA, 306 bp, Artificial Sequence
  derived and/or modified sequence
atgcaggagaacctcaggttcgcttcctccggcgatgacatcaagatctgggatgcaagctctatgacactagtcgataagttcaatccacacacctccccacacggaatcagttccatatgttggtcttctaataataatttcctggttacagcctcgtcaagtggagacaaaatcgtggtttccagctgtaagtgcaagcccgtcccccttttggagctcgcagaaggacaaaaacagacttgtgtgaatttaaatagcacatccatgtacctggtttctggagggctgaacaataccgtgtag

SEQ ID NO: 50444 - DNA, 498 bp, Artificial Sequence
  derived and/or modified sequence
atgcaagaaaatctgcggttcgccagtagtggagatgacatcaaaatctgggatgcgtcttctatgacccttgtggataaatttaaccctcatactagcccccatgggatctcctctatctgctggtcatccaacaacaactttctcgtaactgcctcatctagcggagataaaatcgtcgtttcgtcctgcaagtgtaagcccgttccactgctggagttggccgaggggcagaagcagacttgcgtgaaccttaactccacatccatgtatctagtgagcggcggcttaaacaacaccgtgaacatatgggacctgaaatccaagagagtacacaggtcactcaaggatcacaaagaccaggtgacatgtgtgacttacaactggaacgactgttatatcgcatcaggctccttgagcggagagatcattctgcattcagtgaccaccaacctgagctcaacaccctttggacacgggagcaaccaaagtgtctag

SEQ ID NO: 50445 - DNA, 306 bp, Artificial Sequence
  derived and/or modified sequence
atgcaggagaacctgcgctttgccagcagtggagatgacatcaagatctgggatgccagctccatgaccctggtggacaagttcaacccccacaccagcccccacggcatcagcagcatctgctggagcagcaacaacaacttcctggtgacagccagcagcagcggggacaagatcgtggtgagcagctgcaagtgcaagcctgtgcccctgctggagctggccgagggccagaagcagacctgtgtgaacctgaacagcacctccatgtacctggtgtctgggggcctgaacaacacagtgtag

SEQ ID NO: 50446 - DNA, 498 bp, Artificial Sequence
  derived and/or modified sequence
atgcaggagaacctgcgctttgccagcagtggagatgacatcaagatctgggatgccagctccatgaccctggtggacaagttcaacccccacaccagcccccacggcatcagcagcatctgctggagcagcaacaacaacttcctggtgacagccagcagcagcggggacaagatcgtggtgagcagctgcaagtgcaagcctgtgcccctgctggagctggccgagggccagaagcagacctgtgtgaacctgaacagcacctccatgtacctggtgtctgggggcctgaacaacacagtgaacatctgggacctgaagagcaagagggtgcacaggagcctgaaggaccacaaggaccaggtgacctgtgtgacctacaactggaatgactgctacatcgccagcggcagcctgagcggggagatcatcctgcacagcgtgaccaccaacctgagcagcaccccatttggacatggcagcaaccagagcgtgtag

SEQ ID NO: 50447 - DNA, 306 bp, Artificial Sequence
  derived and/or modified sequence
atgcaggagaacctgcggttcgccagcagcggcgacgacatcaagatttgggacgctagcagcatgactctggtcgacaagttcaatcctcatactagtcctcatggaattagcagcatctgctggtcgtctaataacaacttcctagtgacagcttcatctagtggggacaagatcgtcgtgagcagttgtaagtgcaagcctgttcccctgttggaactggcggaagggcagaagcagacttgcgtgaatcttaattccacctccatgtacctcgtcagtggcggcctcaacaataccgtgtag

SEQ ID NO: 50448 - DNA, 498 bp, Artificial Sequence
  derived and/or modified sequence
atgcaggagaacctgcggttcgccagcagcggcgacgacatcaagatctgggatgcctccagcatgaccttagtggataagttcaacccacatacttctcctcacggaattagcagtatttgttggtcttccaacaataatttcctcgtgactgcctcatcatccggcgataagatcgtggtctcttcttgtaaatgcaaacccgttcctcttcttgaactcgccgagggacagaaacagacttgcgtgaacctgaattcaacgagcatgtacctggtttccggggggttgaataataccgtgaatatctgggatcttaagtccaagagagtgcaccggagccttaaagaccataaagaccaggtcacttgtgtcacgtacaactggaatgattgctacatagctagtggcagtctttcgggagaaattatccttcacagtgtgacaaccaatctctcatcaacgccctttggacatggcagtaaccagtctgtctag

SEQ ID NO: 50449 - DNA, 581 bp, Artificial Sequence
  derived and/or modified sequence
agcgcggagccggccgcggccccctgttgtgttgctgcggagaggtacttggatgcattttacagcaaaagcagacatgtgtcaatttaaattctacatctatgtatttggtaagcggaggcctaaataacactgttaatatttgggatttaaaatcaaaaagagttcatcgatctcttaaggatcataaagatcaagtaacttgtgtaacatacaattggaatgattgctacattgcttctggatctcttagtggtgaaattattttacacagtgtaaccactaatttatctagtactccttttggccatggtagtaaccagtctgttcggcacttgaagtactccttgtttaagaaatcactactgggcagtgtttcggataatggaatagtaactctctgggatgtaaatagtcagagtccataccataactttgacagtgtacacaaagctccagcgtcaggcatctgtttttctcctgtcaatgaattgctctttgtaaccataggcttggataaaagaatcatcctctatgacacttcaagtaagaagctagtgaaaactttagtggctgacact

SEQ ID NO: 50450 - DNA, 306 bp, Artificial Sequence
  derived and/or modified sequence
atgcaggagaatctgcggttcgcatctagtggagatgatatcaaaatctgggacgcctcatccatgaccctcgtggataagtttaatccgcacactagccctcatggcatcagttctatttgctggtcttctaataacaattttttagtgacagcatcatccagcggggacaaaatcgtggtttcttcctgcaaatgcaagccagtgccgctgctggagctggcagagggccagaagcagacctgtgttaacctgaattccaccagcatgtacctggtgtctgggggattaaacaacactgtctag

SEQ ID NO: 50451 - DNA, 498 bp, Artificial Sequence
  derived and/or modified sequence
atgcaggaaaatttgcgtttcgcctcaagcggcgatgatattaaaatatgggacgcttcttctatgaccctggtagataagtttaatcctcacacctctccccacggtatctcaagtatctgttggtccagcaataataattttttagtaacagcaagttccagcggtgataagatcgtcgtgtcgtcttgcaagtgcaagccagtcccgctgctggagctggcagagggccagaaacagacatgtgtgaacctgaacagcacctccatgtacctagtcagcggaggccttaataacaccgtgaacatctgggacctgaaaagcaagcgggtccacagaagtttgaaggaccataaagaccaggtaacgtgtgtgacctacaactggaatgattgctacatcgcgagcggttctttgtcaggcgagattattctgcactcggtcaccactaatctgagcagcactcccttcggacatgggtcgaatcagtctgtgtag

SEQ ID NO: 50452 - DNA, 306 bp, Artificial Sequence
  derived and/or modified sequence
atgcaggagaacctgagattcgccagcagcggcgacgacatcaagatctgggacgccagcagcatgaccctggtggacaagttcaacccccacaccagcccccacggcatcagcagcatctgctggagcagcaacaacaacttcctggtgaccgccagcagcagcggcgacaagatcgtggtgagcagctgcaagtgcaagcccgtgcccctgctggagctggccgagggccagaagcagacctgcgtgaacctgaacagcaccagcatgtacctggtgagcggcggcctgaacaacaccgtgtag

SEQ ID NO: 50453 - DNA, 498 bp, Artificial Sequence
  derived and/or modified sequence
atgcaggagaacctgagattcgccagcagcggcgacgacatcaagatctgggacgccagcagcatgaccctggtggacaagttcaacccccacaccagcccccacggcatcagcagcatctgctggagcagcaacaacaacttcctggtgaccgccagcagcagcggcgacaagatcgtggtgagcagctgcaagtgcaagcccgtgcccctgctggagctggccgagggccagaagcagacctgcgtgaacctgaacagcaccagcatgtacctggtgagcggcggcctgaacaacaccgtgaacatctgggacctgaagagcaagagagtgcacagaagcctgaaggaccacaaggaccaggtgacctgcgtgacctacaactggaacgactgctacatcgccagcggcagcctgagcggcgagatcatcctgcacagcgtgaccaccaacctgagcagcacccccttcggccacggcagcaaccagagcgtgtag

SEQ ID NO: 50454 - protein, 360 aa, Artificial Sequence
  derived and/or modified sequence
MAELQQLQEFEIPTGREALRGNHSALLRVADYCEDNYVQATDKRKALEETMAFTTQALASVAYQVGNLAGHTLRMLDLQGAALRQVEARMVNMHMEKVARREIGTLATVQRLPPGQKVIAPENLPPLTPYCRRPLNFGCLDDIGHGIKDLSTQLSRTGTLSRKSIKAPATPASATLGRPPRIPEPVHLPVVPDGRLSAASSAFSLASAGSAEGVGGAPTPKGQAAPPAPPLPSSLDPPPPPAAVEVFQRPPTLEELSPPPPDEELPLPLDLPPPPPLDGDELGLPPPPPGFGPDEPSWVPASYLEKVVTLYPYTSQKDNELSFSEGTVICVTRRYSDGWCEGVSSEGTGFFPGNYVEPSC

SEQ ID NO: 50455 - DNA, 1083 bp, Artificial Sequence
  derived and/or modified sequence
atggccgagctgcagcagctgcaggagttcgagatccccaccggcagagaggccctgagaggcaaccacagcgccctgctgagagtggccgactactgcgaggacaactacgtgcaggccaccgacaagagaaaggccctggaggagaccatggccttcaccacccaggccctggccagcgtggcctaccaggtgggcaacctggccggccacaccctgagaatgctggacctgcagggcgccgccctgagacaggtggaggccagaatggtgaacatgcacatggagaaggtggccagaagagagatcggcaccctggccaccgtgcagagactgccccccggccagaaggtgatcgcccccgagaacctgccccccctgaccccctactgcagaagacccctgaacttcggctgcctggacgacatcggccacggcatcaaggacctgagcacccagctgagcagaaccggcaccctgagcagaaagagcatcaaggcccccgccacccccgccagcgccaccctgggcagaccccccagaatccccgagcccgtgcacctgcccgtggtgcccgacggcagactgagcgccgccagcagcgccttcagcctggccagcgccggcagcgccgagggcgtgggcggcgcccccacccccaagggccaggccgccccccccgccccccccctgcccagcagcctggaccccccccccccccccgccgccgtggaggtgttccagagaccccccaccctggaggagctgagcccccccccccccgacgaggagctgcccctgcccctggacctgcccccccccccccccctggacggcgacgagctgggcctgcccccccccccccccggcttcggccccgacgagcccagctgggtgcccgccagctacctggagaaggtggtgaccctgtacccctacaccagccagaaggacaacgagctgagcttcagcgagggcaccgtgatctgcgtgaccagaagatacagcgacggctggtgcgagggcgtgagcagcgagggcaccggcttcttccccggcaactacgtggagcccagctgctag

SEQ ID NO: 50456 - DNA, 1083 bp, Artificial Sequence
  derived and/or modified sequence
atggcagagcttcagcaactgcaggaattcgagatcccaaccggccgcgaggctctgagaggaaatcatagtgcgctgcttagagtggctgactactgtgaagacaattacgtgcaggcaactgacaaaaggaaagcattggaagagacaatggcgtttactactcaggctctggcgagcgttgcgtaccaggtgggtaatttggcggggcatacattgagaatgcttgatctgcagggcgcagctcttcggcaggtggaggcccgaatggtcaatatgcatatggaaaaggttgcaaggcgcgagatcgggacactggccaccgtgcagagattgccccccggacaaaaagtcattgccccagagaacctgcctccccttacaccttactgccgcagacccctgaatttcggctgtttagacgatatcggacacggcattaaggatctgagtacacagctttcgaggacaggcacactgagcaggaaaagtataaaagcaccagccacgccagcttcagccacgctcggtcgtcccccgagaatccccgagcctgttcacctcccagtcgtgcctgacggacggcttagcgctgcgagcagtgccttctcactggcgagtgccggaagtgccgaaggcgttggaggagccccaacgcccaaaggccaagccgcgcctcctgcgcctccactgcctagctccctggacccacccccccctccagctgctgtggaagtttttcaacggcctcctacactggaagaactcagtcctcccccacctgacgaggagctgcctctcccgctggacctaccccctcctcctccactggatggcgatgaactggggctccctcccccccccccaggctttggacccgacgagccaagctgggtgcccgcatcatacctggagaaggtagtcaccctctacccctatacgtctcagaaagacaatgaactatccttctccgaaggcaccgtgatttgtgtaactcgacgatatagtgatggatggtgcgaaggcgtctcttcagaaggaacaggttttttccccggcaactatgtggagccctcctgctag

SEQ ID NO: 50457 - DNA, 1083 bp, Artificial Sequence
  derived and/or modified sequence
atggccgagctgcagcagctgcaggagtttgagatccccaccggccgggaggccctgcggggcaaccacagcgccctgctgcgggtggccgactactgtgaggacaactacgtgcaggccacagacaagaggaaggccctggaggagaccatggccttcaccacccaggccctggcctctgtggcctaccaggtgggcaacctggccggccacaccctgaggatgctggacctgcagggcgccgccctgcggcaggtggaggccaggatggtgaacatgcacatggagaaggtggcccggcgggagatcggcaccctggccaccgtgcagaggctgcccccaggccagaaggtgattgcccctgagaacctgccccccctgaccccctactgccggcggcccctgaactttggctgcctggatgacattggacatggcatcaaggacctgagcacccagctgagcaggacaggcaccctgagcaggaagagcatcaaggccccagccaccccagccagcgccaccctgggccggcccccacgcatccctgagcctgtgcacctgcctgtggtgcctgatggccgcctgtctgctgccagcagcgccttcagcctggccagcgctggcagcgctgagggcgtgggcggggcccccacccccaagggccaggccgcccccccagccccacccctgcccagcagcctggaccccccacctcctcctgctgctgtggaggtgttccagaggcctcccaccctggaggagctgagccccccacctccagatgaggagctgcccctgcccctggacctgcccccacctccacccctggatggagatgagctgggcctgcccccacctcctcctggctttggaccagatgagcccagctgggtgcctgccagctacctggagaaggtggtgaccctgtacccctacaccagccagaaggacaatgagctgtccttcagcgagggcaccgtcatctgtgtgacccggcgctacagtgatggctggtgtgagggcgtgtcctctgagggcaccggcttcttccctggcaactacgtggagcccagctgctag

SEQ ID NO: 50458 - DNA, 1083 bp, Artificial Sequence
  derived and/or modified sequence
atggccgagctgcagcagctgcaggagttcgagatccccaccggccgggaggccttaaggggcaaccactccgctctcctgcgcgttgccgattactgcgaggacaactatgtgcaagcaacggataaacggaaggccttagaagagactatggctttcaccacacaagccctggcttcagtggcttatcaggtgggcaacttagctggtcacacactgaggatgttggacctacagggggcagctctaaggcaggtggaagctcggatggtgaatatgcacatggagaaagtggcccgaagagaaatcggaactctcgcaaccgtgcagcgcttgccacctgggcaaaaagtgatcgcccctgaaaacctgcctcctttaactccatattgccgacgccccttgaatttcgggtgtctggatgatattggccacggaataaaggacctgtccacgcagctcagccgcacaggcacactaagcagaaagagcatcaaggcccccgccactccagcttcagccacactgggccgccccccacgcataccagagcccgtccacctgcctgttgtccctgacggtcgcctttccgcagctagctccgcattcagcctcgcctctgccggaagcgcagagggggtaggtggagcccctactcctaagggacaagccgctcctcctgcccccccccttcctagctcactcgatccacccccacccccagctgcagtcgaagtgtttcagcggccacctacccttgaagaactatcccctcctccccctgatgaggagttgcccctgcctctggatctgccgccgccccctccccttgatggggatgaactcgggttgcctcctccaccgcccgggttcggacccgatgaaccctcctgggtccctgcttcctacttagaaaaggtggtaacgctgtatccctatacgtcccagaaagataacgagctgtccttctccgagggcacagttatttgcgtgactcgtcggtacagcgatggatggtgcgagggcgtatcatctgagggaactggcttctttccaggaaattatgtcgagccatcctgttag

SEQ ID NO: 50459 - DNA, 1718 bp, Artificial Sequence
  derived and/or modified sequence
ccaggaccagggagcaatcacagctgccccgaccttggcttcctctgctgggtgggattgggggctgggcccccaaatgggcccctggcttcccccttcctctgggcaggggacagagagacacaggctcggggagcaggactgacttcctcttgtcccggaatgagcatgcctgccctttgcaagcaggtttgggtctcacgcagaggaaaccaaaagcaataagagggagggaaggcagagcaaccaatcaagggcagggtgagactcaaaacgagcgggctccctggggagccagacagaggctgggggtgatggcggagctacagcagctgcaggagtttgagatccccactggccgggaggctctgaggggcaaccacagtgccctgctgcgggtcgctgactactgcgaggacaactatgtgcaggccacagacaagcggaaggcgctggaggagaccatggccttcactacccaggcactggccagcgtggcctaccaggtgggcaacctggccgggcacactctgcgcatgttggacctgcagggggccgccctgcggcaggtggaagcccgtatggtgaacatgcatatggagaaggtggcccgaagggagatcggcaccttagccactgtccagcggctgccccccggccagaaggtcatcgccccagagaacctaccccctctcacgccctactgcaggagacccctcaactttggctgcctggacgacattggccatgggatcaaggacctcagcacgcagctgtcaagaacaggcaccctgtctcgaaagagcatcaaggcccctgccacacccgcctccgccaccttggggagaccaccccggattcccgagccagtgcacctgccggtggtgcccgacggcagactctccgccgcctcctctgcgttttccctggcctcggccggcagcgccgaaggtgtcggtggggcccccacgcccaaggggcaggcagcacctccagccccacctctccccagctccttggacccacctcctccaccagcagccgtcgaggtgttccagcggcctcccacgctggaggagttgtccccacccccaccggacgaagagctgcccctgccactggacctgcctcctcctccacccctggatggagatgaattggggctgcctccacccccaccaggatttgggcctgatgagcccagctgggtgcctgcctcatacttggagaaagtggtgacactgtacccatacaccagccagaaggacaatgagctctccttctctgagggcactgtcatctgtgtcactcgccgctactccgatggctggtgcgagggcgtcagctcagaggggactggattcttccctgggaactatgtggagcccagctgctgacagcccagggctctctgggcagctgatgtctgcactgagtgggtttcatgagccccaagccaaaaccagctccagtcacagctggactgggtctgcccacctcttgggctgtgagctgtgttctgtccttcctcccatcggagggagaaggggtcctggggagagagaatttatccagaggcctgctgcagatggggaagagctggaaaccaagaagtttgtcaacagaggacccctactccatgcaggacagggtctcctgctgcaagtcccaactttgaataaaacagatgatgtcctgtgactgccccacagagataa

SEQ ID NO: 50460 - DNA, 1083 bp, Artificial Sequence
  derived and/or modified sequence
atggccgagctccaacagctacaggagttcgagatccccactggccgagaggctctgcggggtaatcacagcgcgcttcttagggttgcagattattgcgaagacaattacgtccaagccacagacaagagaaaggccctggaggaaacgatggcatttacgacccaggccctggcaagcgtggcttatcaagtcggcaacctggcaggtcacactcttcgaatgttggacctgcagggagccgctcttcggcaggtcgaggcacgcatggtgaatatgcatatggagaaagtcgcgcgacgagaaatcgggactctggcgaccgtgcagcgcctgcccccagggcagaaggtaattgcaccggagaacttaccaccgctaaccccatactgccgcaggcccttaaattttggctgcttggacgatatcgggcacgggataaaggatctcagcacccagctgtcccggaccgggacactgtctcgtaagtcgatcaaggctcctgccacccccgctagcgcaacacttggtaggcccccaagaattcctgagccagtacatctccctgtggtgccagatgggcgattgtcggccgctagtagcgctttcagccttgcctctgccggtagcgctgagggtgtagggggagcacccacacccaaaggacaagcagctcctccagcaccaccgcttcccagtagtctcgacccgccacctccgccagctgctgtcgaggtgttccaacggcctccaacactggaagaactcagtcctccgcctccagacgaggagctgcctttacccctggatctgccccctcccccacccctggatggagacgaactcggtttgccaccgccacccccaggtttcggtcctgacgaaccctcctgggtgcctgcatcatacctggagaaagtcgtgactctgtatccctacacctcccagaaagacaacgaactgtctttctctgagggtactgttatctgtgtcactagacgatactcggacggttggtgtgagggtgtgtcctccgagggcaccggcttttttccaggtaactatgttgaaccatcctgttag

SEQ ID NO: 50461 - protein, 584 aa, Artificial Sequence
  derived and/or modified sequence
MAASAKRKQEEKHLKMLRDMTGLPHNRKCFDCDQRGPTYVNMTVGSFVCTSCSGSLRGLNPPHRVKSISMTTFTQQEIEFLQKHGNEVCKQIWLGLFDDRSSAIPDFRDPQKVKEFLQEKYEKKRWYVPPEQAKVVASVHASISGSSASSTSSTPEVKPLKSLLGDSAPTLHLNKGTPSQSPVVGRSQGQQQEKKQFDLLSDLGSDIFAAPAPQSTATANFANFAHFNSHAAQNSANADFANFDAFGQSSGSSNFGGFPTASHSPFQPQTTAFRMLSSSCSFGEFTSAFPLQATHSGSAASVNANFAHFDNFPKSSSADFGTFNTSQSHQTASAVSKVSTNKAGLQTADKYAALANLDNIFSAGQGGDQGSGFGTTGKAPVGSVVSVPSQSSASSDKYAALAELDSVFSSAATSSNAYTSTSNASSNVFGTVPVVASAQTQPASSSVPAPFGATPSTNPFVAAAGPSVASSTNPFQTNARGATAATFGTASMSMPTGFGTPAPYSLPTSFSGSFQQPAFPAQAAFPQQTAFSQQPNGFAAFGQTKPVVTPFGQVAAAGVSSNPFMTGAPTGQFPTGSSSTNPFL

SEQ ID NO: 50462 - protein, 569 aa, Artificial Sequence
  derived and/or modified sequence
MLRDMTGLPHNRKCFDCDQRGPTYVNMTVGSFVCTSCSGSLRGLNPPHRVKSISMTTFTQQEIEFLQKHGNEVCKQIWLGLFDDRSSAIPDFRDPQKVKEFLQEKYEKKRWYVPPEQAKVVASVHASISGSSASSTSSTPEVKPLKSLLGDSAPTLHLNKGTPSQSPVVGRSQGQQQEKKQFDLLSDLGSDIFAAPAPQSTATANFANFAHFNSHAAQNSANADFANFDAFGQSSGSSNFGGFPTASHSPFQPQTTAFRMLSSSCSFGEFTSAFPLQATHSGSAASVNANFAHFDNFPKSSSADFGTFNTSQSHQTASAVSKVSTNKAGLQTADKYAALANLDNIFSAGQGGDQGSGFGTTGKAPVGSVVSVPSQSSASSDKYAALAELDSVFSSAATSSNAYTSTSNASSNVFGTVPVVASAQTQPASSSVPAPFGATPSTNPFVAAAGPSVASSTNPFQTNARGATAATFGTASMSMPTGFGTPAPYSLPTSFSGSFQQPAFPAQAAFPQQTAFSQQPNGFAAFGQTKPVVTPFGQVAAAGVSSNPFMTGAPTGQFPTGSSSTNPFL

SEQ ID NO: 50463 - DNA, 1755 bp, Artificial Sequence
  derived and/or modified sequence
atggccgccagcgccaagagaaagcaggaggagaagcacctgaagatgctgagagacatgaccggcctgccccacaacagaaagtgcttcgactgcgaccagagaggccccacctacgtgaacatgaccgtgggcagcttcgtgtgcaccagctgcagcggcagcctgagaggcctgaaccccccccacagagtgaagagcatcagcatgaccaccttcacccagcaggagatcgagttcctgcagaagcacggcaacgaggtgtgcaagcagatctggctgggcctgttcgacgacagaagcagcgccatccccgacttcagagacccccagaaggtgaaggagttcctgcaggagaagtacgagaagaagagatggtacgtgccccccgagcaggccaaggtggtggccagcgtgcacgccagcatcagcggcagcagcgccagcagcaccagcagcacccccgaggtgaagcccctgaagagcctgctgggcgacagcgcccccaccctgcacctgaacaagggcacccccagccagagccccgtggtgggcagaagccagggccagcagcaggagaagaagcagttcgacctgctgagcgacctgggcagcgacatcttcgccgcccccgccccccagagcaccgccaccgccaacttcgccaacttcgcccacttcaacagccacgccgcccagaacagcgccaacgccgacttcgccaacttcgacgccttcggccagagcagcggcagcagcaacttcggcggcttccccaccgccagccacagccccttccagccccagaccaccgccttcagaatgctgagcagcagctgcagcttcggcgagttcaccagcgccttccccctgcaggccacccacagcggcagcgccgccagcgtgaacgccaacttcgcccacttcgacaacttccccaagagcagcagcgccgacttcggcaccttcaacaccagccagagccaccagaccgccagcgccgtgagcaaggtgagcaccaacaaggccggcctgcagaccgccgacaagtacgccgccctggccaacctggacaacatcttcagcgccggccagggcggcgaccagggcagcggcttcggcaccaccggcaaggcccccgtgggcagcgtggtgagcgtgcccagccagagcagcgccagcagcgacaagtacgccgccctggccgagctggacagcgtgttcagcagcgccgccaccagcagcaacgcctacaccagcaccagcaacgccagcagcaacgtgttcggcaccgtgcccgtggtggccagcgcccagacccagcccgccagcagcagcgtgcccgcccccttcggcgccacccccagcaccaaccccttcgtggccgccgccggccccagcgtggccagcagcaccaaccccttccagaccaacgccagaggcgccaccgccgccaccttcggcaccgccagcatgagcatgcccaccggcttcggcacccccgccccctacagcctgcccaccagcttcagcggcagcttccagcagcccgccttccccgcccaggccgccttcccccagcagaccgccttcagccagcagcccaacggcttcgccgccttcggccagaccaagcccgtggtgacccccttcggccaggtggccgccgccggcgtgagcagcaaccccttcatgaccggcgcccccaccggccagttccccaccggcagcagcagcaccaaccccttcctgtag

SEQ ID NO: 50464 - DNA, 1710 bp, Artificial Sequence
  derived and/or modified sequence
atgctgagagacatgaccggcctgccccacaacagaaagtgcttcgactgcgaccagagaggccccacctacgtgaacatgaccgtgggcagcttcgtgtgcaccagctgcagcggcagcctgagaggcctgaaccccccccacagagtgaagagcatcagcatgaccaccttcacccagcaggagatcgagttcctgcagaagcacggcaacgaggtgtgcaagcagatctggctgggcctgttcgacgacagaagcagcgccatccccgacttcagagacccccagaaggtgaaggagttcctgcaggagaagtacgagaagaagagatggtacgtgccccccgagcaggccaaggtggtggccagcgtgcacgccagcatcagcggcagcagcgccagcagcaccagcagcacccccgaggtgaagcccctgaagagcctgctgggcgacagcgcccccaccctgcacctgaacaagggcacccccagccagagccccgtggtgggcagaagccagggccagcagcaggagaagaagcagttcgacctgctgagcgacctgggcagcgacatcttcgccgcccccgccccccagagcaccgccaccgccaacttcgccaacttcgcccacttcaacagccacgccgcccagaacagcgccaacgccgacttcgccaacttcgacgccttcggccagagcagcggcagcagcaacttcggcggcttccccaccgccagccacagccccttccagccccagaccaccgccttcagaatgctgagcagcagctgcagcttcggcgagttcaccagcgccttccccctgcaggccacccacagcggcagcgccgccagcgtgaacgccaacttcgcccacttcgacaacttccccaagagcagcagcgccgacttcggcaccttcaacaccagccagagccaccagaccgccagcgccgtgagcaaggtgagcaccaacaaggccggcctgcagaccgccgacaagtacgccgccctggccaacctggacaacatcttcagcgccggccagggcggcgaccagggcagcggcttcggcaccaccggcaaggcccccgtgggcagcgtggtgagcgtgcccagccagagcagcgccagcagcgacaagtacgccgccctggccgagctggacagcgtgttcagcagcgccgccaccagcagcaacgcctacaccagcaccagcaacgccagcagcaacgtgttcggcaccgtgcccgtggtggccagcgcccagacccagcccgccagcagcagcgtgcccgcccccttcggcgccacccccagcaccaaccccttcgtggccgccgccggccccagcgtggccagcagcaccaaccccttccagaccaacgccagaggcgccaccgccgccaccttcggcaccgccagcatgagcatgcccaccggcttcggcacccccgccccctacagcctgcccaccagcttcagcggcagcttccagcagcccgccttccccgcccaggccgccttcccccagcagaccgccttcagccagcagcccaacggcttcgccgccttcggccagaccaagcccgtggtgacccccttcggccaggtggccgccgccggcgtgagcagcaaccccttcatgaccggcgcccccaccggccagttccccaccggcagcagcagcaccaaccccttcctgtag

SEQ ID NO: 50465 - DNA, 1755 bp, Artificial Sequence
  derived and/or modified sequence
atggctgctagcgctaaacgcaaacaggaggagaaacatctcaagatgctgcgagatatgacaggcctacctcataacagaaagtgtttcgactgcgatcagcggggccccacttacgtgaacatgacagttgggtcgtttgtgtgtacgtcctgttctggaagccttcgaggtctgaaccctccacatcgagttaaatcaatctcaatgactacctttacacaacaggagatagaatttttgcaaaaacacggcaacgaagtatgcaaacagatttggctcggcctttttgatgatcgcagttcggctatacctgattttcgggacccgcagaaggtcaaggagttcttacaagaaaaatacgagaaaaagagatggtatgttccacctgaacaagcaaaagtggtggcctcggtgcacgctagcattagcggtagctccgcaagctcaacctcttcgacacccgaggtgaagccactgaaaagccttctcggggactcagccccaactttacacttaaacaaaggcactcctagccaatcccctgttgttgggcgctcacagggacagcagcaagagaagaaacaatttgacctgttaagcgacttaggtagcgacattttcgcagccccagcaccacagtcaacggctaccgccaacttcgcaaattttgctcattttaactctcacgccgcccagaattctgcaaacgcagattttgccaactttgatgctttcggccagtcctcaggctcttcaaattttgggggattccccaccgcatcccacagtccttttcagccacagaccactgcttttaggatgctgtcctccagctgctccttcggggaatttacctcggcgtttcctctacaggctactcactctggttctgcagcttcggttaatgcgaactttgcccattttgacaacttcccaaaatcctcatccgctgattttgggactttcaacacatcccagtcccatcagaccgcctctgcagtgagcaaggtgagtacaaataaagccggcttgcagactgccgataaatatgctgcgttggcaaacctggataacattttctctgccgggcagggaggagaccagggctctggattcggaactaccggaaaagcaccggtcggctcagtggtctctgttccttcccagagtagtgcaagtagcgacaagtatgccgcattagcagaattggattccgtgttctcaagcgctgccacctcttctaacgcttacacctccacctctaatgcctcttcaaatgtgttcgggaccgttcctgtggttgctagtgcccagacacaacccgcctcttccagcgttccagctccattcggggcaaccccttctactaatccttttgtcgccgccgctgggccgtcagtggccagttcgaccaacccttttcagaccaatgcaagaggcgcgaccgcagccacctttggcactgcttccatgagtatgcccactggatttggaactcctgccccatactcactacctaccagtttttctggaagcttccagcagcccgcctttcccgcacaggctgcattcccacagcaaacggccttttcccagcagccaaatggcttcgcagcctttgggcagacaaagccggttgtcacaccattcgggcaggtcgccgccgcaggagtaagctctaatcctttcatgacgggtgcaccaactgggcagttccccactggcagctcttcaaccaatccattcttgtag

SEQ ID NO: 50466 - DNA, 1710 bp, Artificial Sequence
  derived and/or modified sequence
atgcttcgggacatgactggacttccccacaaccggaaatgtttcgactgcgatcaacggggacccacgtacgtcaatatgacagtcggctccttcgtgtgcaccagttgtagcgggtccctccgcggattaaatcccccgcatagggtgaaaagcatcagcatgaccacgtttacccagcaggagatcgagttcctccagaagcacgggaatgaggtttgcaagcagatatggctggggctctttgatgatcggtcgagcgccatccccgatttccgagacccacaaaaagtgaaagagtttttacaggaaaaatatgagaagaagagatggtacgtcccgcctgagcaggcaaaagtcgtggctagcgtgcacgcaagcatatcaggatcctcagcatcctcaacaagctctacccccgaagttaaacccttgaagagtctcctcggcgatagcgccccgaccctgcatttgaataagggcacccctagccagtcacctgttgtgggtcggtctcagggccagcagcaagaaaagaagcaatttgaccttttatcagatctagggtcagatatttttgctgcacctgcaccgcagagcacagccaccgccaattttgccaattttgcccacttcaacagtcatgctgcacaaaatagcgccaacgctgattttgccaacttcgatgctttcggccagtcctctggatcgagcaattttggtgggttccccacagcttcacacagtcctttccagccgcagaccacagccttccggatgctgtcctccagttgtagctttggggagtttactagtgcttttccgttgcaagcgactcattctggatccgcagcaagcgtgaacgccaacttcgctcacttcgataatttcccaaagtcaagctccgcagactttgggaccttcaacacttcacagagtcatcagaccgcgtctgcagtgtccaaagtgtctactaataaggctggactacagacagctgacaaatacgccgcattggccaacttggataacatcttttccgccggacagggtggcgatcagggatctgggttcggcaccaccggtaaggccccggttggctctgttgtgagcgtaccttcacagagctctgcgtcaagtgataagtacgctgccctcgccgaattagatagcgtattcagtagtgctgcaaccagcagcaatgcctacacctctacctctaacgcctctagcaatgtgtttggaacagtgccagtagttgcaagcgcacaaacgcaaccagcatcgtcctcagtccctgctccatttggagctacaccgagcaccaacccttttgtggccgcagcaggtcccagcgtggccagctccactaacccattccagacaaacgcacggggagcaactgccgctacatttggaacagcttctatgtccatgccaaccggtttcggtactcctgccccctattctcttcccaccagcttttctgggtccttccaacagcccgcctttcccgcgcaggccgcttttccccagcagactgcattttctcagcagcccaatggattcgctgcctttgggcagaccaagcccgttgtgacgcccttcgggcaggtggccgcggcaggcgtaagtagcaatccgtttatgaccggggctccaaccggccagtttccaaccgggtcttcgagcactaaccccttcctgtag

SEQ ID NO: 50467 - DNA, 1755 bp, Artificial Sequence
  derived and/or modified sequence
atggccgccagcgccaagaggaagcaggaggagaagcacctgaagatgctgcgggacatgacaggcctgccccacaacaggaagtgctttgactgtgaccagaggggccccacctacgtgaacatgacagtgggcagctttgtgtgcaccagctgcagcggcagcctgcggggcctgaaccccccccaccgggtgaagagcatctccatgaccaccttcacccagcaggagattgagttcctgcagaagcacggcaatgaggtgtgcaagcagatctggctgggcctgtttgatgacaggagcagcgccatcccagacttccgggacccccagaaggtgaaggagttcctgcaggagaagtatgagaagaagcgctggtacgtgcccccagagcaggccaaggtggtggcctctgtgcacgccagcatcagcggcagcagcgccagcagcaccagcagcaccccagaggtgaagcccctgaagagcctgctgggggacagcgcccccaccctgcacctgaacaagggcacccccagccagagccctgtggtgggccgcagccagggccagcagcaggagaagaagcagtttgacctgctgagtgacctgggcagtgacatctttgctgccccagccccccagagcacagccacagccaactttgccaactttgcccacttcaacagccatgctgcccagaacagcgccaatgctgactttgccaactttgatgccttcggccagagcagcggcagcagcaactttggaggcttccccacagccagccacagccccttccagccccagaccacagccttcaggatgctgagcagcagctgcagctttggagagttcaccagcgccttccccctgcaggccacccacagcggcagcgctgcctctgtgaatgccaactttgcccactttgacaacttccccaagagcagcagcgctgactttggcaccttcaacaccagccagagccaccagacagccagcgctgtgtccaaggtgtccaccaacaaggccggcctgcagacagctgacaagtatgctgccctggccaacctggacaacatcttctctgctggccagggcggggaccagggcagcggcttcggcaccaccgggaaggcccctgtgggctctgtggtgtctgtgcccagccagagcagcgccagcagtgacaagtatgctgccctggccgagctggacagcgtcttcagcagcgctgccaccagcagcaatgcctacaccagcaccagcaatgccagcagcaatgtgtttggaacagtgcctgtggtggccagcgcccagacccagcctgccagcagctctgtgcctgccccctttggagccacccccagcaccaacccctttgtggccgccgccggccccagcgtggccagcagcaccaaccccttccagaccaatgcccggggggccacagctgccacctttggaacagcctccatgtccatgcccaccggcttcggcaccccagccccctacagcctgcccaccagcttcagcggcagcttccagcagcctgccttccctgcccaggccgccttcccccagcagacagccttcagccagcagcccaacggctttgctgccttcggccagaccaagcctgtggtgaccccatttggccaggtggccgctgctggggtgagcagcaaccccttcatgaccggggcccccaccggccagttccccaccggcagcagcagcaccaaccccttcctgtag

SEQ ID NO: 50468 - DNA, 1710 bp, Artificial Sequence
  derived and/or modified sequence
atgctgcgggacatgacaggcctgccccacaacagaaaatgttttgactgtgaccagaggggccccacctacgtgaacatgacagtgggcagctttgtgtgcaccagctgcagcggcagcctgcggggcctgaaccccccccaccgggtgaagagcatctccatgaccaccttcacccagcaggagattgagttcctgcagaagcatggaaatgaggtgtgcaagcagatctggctgggcctgtttgatgacaggagcagcgccatcccagacttccgggacccccagaaggtgaaggagttcctgcaggagaagtatgagaagaagcgctggtacgtgcccccagagcaggccaaggtggtggcctctgtgcacgccagcatcagcggcagcagcgccagcagcaccagcagcaccccagaggtgaagcccctgaagagcctgctgggggacagcgcccccaccctgcacctgaacaagggcacccccagccagagccctgtggtgggccgcagccagggccagcagcaggagaagaagcagtttgacctgctgagtgacctgggcagtgacatctttgctgccccagccccccagagcacagccacagccaactttgccaactttgcccacttcaacagccacgccgcccagaacagcgccaatgctgactttgccaactttgatgccttcggccagagcagcggcagcagcaactttggaggcttccccacagccagccacagccccttccagccccagaccacagccttcaggatgctgagcagcagctgcagctttggagagttcaccagcgccttccccctgcaggccacccacagcggcagcgctgcctctgtgaatgccaactttgcccactttgacaacttccccaagagcagcagcgctgactttggcaccttcaacaccagccagagccaccagacagccagcgctgtgtccaaggtgtccaccaacaaggccggcctgcagacagctgacaagtatgctgccctggccaacctggacaacatcttctctgctggccagggcggggaccagggcagcggcttcggcaccaccgggaaggcccctgtgggctctgtggtgtctgtgcccagccagagcagcgccagcagtgacaagtatgctgccctggccgagctggacagcgtcttcagcagcgctgccaccagcagcaatgcctacaccagcaccagcaatgccagcagcaatgtgtttggcaccgtgcctgtggtggccagcgcccagacccagcctgccagcagctctgtgcctgccccctttggagccacccccagcaccaacccctttgtggccgctgctggccccagcgtggccagcagcaccaaccccttccagaccaatgcccggggggccacagctgccaccttcggcacagcctccatgtccatgcccactggatttggcaccccagccccctacagcctgcccaccagcttcagcggcagcttccagcagcctgccttccctgcccaggccgccttcccccagcagacagccttcagccagcagcccaatggatttgctgccttcggccagaccaagcctgtggtgacccccttcggccaggtggccgccgccggcgtgagcagcaaccccttcatgactggagcccccaccggccagttccccaccggcagcagcagcaccaaccccttcctgtag

SEQ ID NO: 50469 - DNA, 1755 bp, Artificial Sequence
  derived and/or modified sequence
atggccgccagcgccaagcggaagcaggaggagaagcacctgaagatgctccgggacatgaccgggcttccacataaccggaagtgtttcgattgcgatcagcgtgggcccacttacgtgaatatgacagtgggctcatttgtctgtactagctgttcaggtagcctgcgaggtctgaatccgccccaccgagtgaaaagtatatcaatgacgacctttacacagcaggagatcgagtttttacaaaaacacggtaacgaagtttgtaaacagatctggctgggtctgttcgatgatcgttcaagtgccatacccgatttccgggatccgcagaaggtcaaggagtttttgcaagaaaagtatgagaaaaagagatggtatgtgcccccggagcaggccaaagtcgtggcctcagtccacgcaagcatttcaggcagtagtgcctcaagcacctcctcaactccagaagttaagcctcttaagagccttctgggggatagcgcgcctacccttcatttgaacaagggcactccttcacagtcaccagtagtaggccggtcacaaggccaacagcaggagaagaagcaatttgatcttctgtcagacctgggctccgacatttttgcagctccagccccacagtctaccgccactgcgaacttcgccaactttgcccacttcaacagccatgctgcacagaattccgcaaacgcggattttgcaaatttcgatgctttcggacagagcagcggttcaagcaactttggggggtttccaaccgcatcacatagccccttccagccccagaccaccgccttcagaatgcttagcagttcttgcagcttcggtgagttcactagcgcctttcctctacaggccacacactcaggttctgctgcatctgtcaacgccaattttgcccatttcgataactttcccaagagtagttcagccgatttcggcacattcaataccagccagagccatcagaccgctagcgctgtaagcaaagtgagcactaataaagcagggctgcagacggccgacaagtatgccgcactagctaacctcgataatatatttagcgcaggacaaggtggggaccaggggagcggcttcggaaccaccgggaaggcccccgtcgggagcgtggtgagcgtcccctctcagtccagtgcttcctctgataagtacgccgccctggcagaactggatagcgtgttcagcagcgcagcaaccagtagcaatgcctacactagcaccagtaacgccagcagcaatgtctttggtaccgtgcccgtggtggccagtgcacagacgcagcccgcctcctcctccgtgccagcaccattcggcgcaaccccatcaactaaccccttcgtggcagccgccggtccctctgtggcgagctcaactaatccttttcagaccaacgccagaggcgccactgctgccacttttggaacagcctccatgtctatgccaacaggtttcggaacccctgcaccttactctttacctacatccttctcaggctcattccagcagcccgccttcccggctcaagcagctttcccacagcaaacggctttctcacagcagcctaatgggtttgctgccttcgggcagacgaagcctgtcgttacaccctttggccaggtggcagcagctggtgtgagcagcaatccgttcatgaccggtgcaccgacagggcaattcccaaccggaagttccagcacaaatccatttctttag

SEQ ID NO: 50470 - DNA, 2089 bp, Artificial Sequence
  derived and/or modified sequence
ttttcccctcaggagaagtcgggaaggtggcggcggcggcggcggttgtcccggctgtgccggttggtgtggcccgtcagcccgcgtaccacagcgcccgggccgcgtcgagcccagtacagccaagccgctgcggccgggtccggcgcgggcggcgcgcgcagacggagggcggcggccgcggccagggcggcccgtgggaccgcgggcccccggcgcagcgctgcccggctcccggccctgccggcctcctcccttggcgccgcggccatggcggccagcgcgaagcggaagcaggaggagaagcacctgaagatgctgcgggacatgaccggcctcccgcacaaccgaaagtgcttcgactgcgaccagcgcggccccacctacgttaacatgacggtcggctccttcgtgtgtacctcctgctccggcagcctgcgaggattaaatccaccacacagggtgaaatctatctccatgacaacattcacacaacaggaaattgaattcttacaaaaacatggaaatgaagtctgtaaacagatttggctaggattatttgatgatagatcttcagcaattccagacttcagggatccacaaaaagtgaaagagtttctacaagaaaagtatgaaaagaaaagatggtatgtcccgccagaacaagccaaagtcgtggcatcagttcatgcatctatttcagggtcctctgccagtagcacaagcagcacacctgaggtcaaaccactgaaatctcttttaggggattctgcaccaacactgcacttaaataagggcacacctagtcagtccccagttgtaggtcgttctcaagggcagcagcaggagaagaagcaatttgaccttttaagtgatctcggctcagacatctttgctgctccagctcctcagtcaacagctacagccaattttgctaactttgcacatttcaacagtcatgcagctcagaattctgcaaatgcagattttgcaaactttgatgcatttggacagtctagtggttcgagtaattttggaggtttccccacagcaagtcactctccttttcagccccaaactacagcatttagaatgctttcatctagctgcagttttggtgaatttacttcagcttttcctcttcaggctacccacagtggaagtgctgcatcagtaaatgctaattttgctcattttgataacttccccaaatcctccagtgctgattttggaaccttcaatacttcccagagtcatcaaacagcatcagctgttagtaaagtttcaacgaacaaagctggtttacagactgcagacaaatatgcagcacttgctaatttagacaatatcttcagtgccgggcaaggtggtgatcagggaagtggctttgggaccacaggtaaagctcctgttggttctgtggtttcagttcccagtcagtcaagtgcatcttcagacaagtatgcagctctggcagaactagacagcgttttcagttctgcagccacctccagtaatgcgtatacttccacaagtaatgctagcagcaatgtttttggaacagtgccagtggttgcttctgcacagacacagcctgcttcatcaagtgtgcctgctccatttggagctacgccttccacaaatccatttgttgctgctgctggtccttctgtggcatcttctacaaacccatttcagaccaatgccagaggagcaacagcggcaacctttggcactgcatccatgagcatgcccacaggattcggcactcctgctccctacagtcttcccaccagctttagtggcagctttcagcagcctgcctttccagcccaagcagctttccctcaacagacagctttttctcaacagcccaatggttttgcagcatttggacaaacaaagccagtagtaaccccttttggtcaagttgcagctgctggagtatctagtaatccttttatgactggtgcaccaacaggacaatttccaacaggaagctcatcaaccaatcctttcttatagccttatatagacaatttactggaacgaacttttatgtggtcacattacatctctccacctcttg

SEQ ID NO: 50471 - DNA, 1710 bp, Artificial Sequence
  derived and/or modified sequence
atgctgcgggacatgaccggcctgccccacaaccggaagtgcttcgattgtgaccagaggggccccacttatgtgaacatgactgttggaagtttcgtttgcacatcctgtagcggatctctgcggggactcaatcctcctcacagagttaaatctatttcgatgacaacgttcacccagcaagaaattgaatttcttcagaaacatgggaatgaggtgtgcaagcagatttggcttggccttttcgacgatagatcctctgcaatccctgactttagggatccgcagaaggtcaaagaatttctgcaggagaagtatgaaaaaaaacggtggtacgtcccccccgaacaggccaaggtcgtggcctctgtgcatgcctcaatctcaggctcgtccgccagtagtacatctagtacccctgaggtgaagcccctcaagtccctgctgggcgatagcgcacctactctccacctcaacaaaggaacccctagccagagccccgtagtaggaagatcgcagggacagcagcaggagaagaagcagtttgacctcctatccgatcttggtagcgacatctttgctgctccagccccccagtcaaccgccacggcaaatttcgcaaactttgcacactttaatagccatgcagcccagaatagcgctaatgccgattttgcaaatttcgacgctttcggccaatcatctggaagtagtaactttggagggtttcctactgcatcccactcacccttccagccacaaaccacagctttccggatgctctcttcttcctgcagttttggagagttcacaagtgcgttccccctgcaggccacgcattctggctctgccgccagcgtaaacgctaattttgcccattttgacaatttcccaaagagtagttctgccgatttcggaacttttaatacctcgcagtcacatcagaccgcatctgctgtaagcaaagtgtccacgaacaaagcagggcttcagacggccgataagtatgctgccttagccaacttggacaatattttctctgctgggcagggcggcgaccaggggtcaggcttcggcactaccgggaaggctccagtggggtctgtggtgagcgtgcccagccagtcttcagccagtagtgacaagtacgccgcgcttgcggaacttgatagtgttttttcatcagccgcaacctccagcaacgcatatacgtccacaagcaacgcatcatccaacgtgttcggcacagtgccagtggtggcttcagcgcagacgcagcccgcgtccagcagcgtgccagctcccttcggagctacaccttctacaaacccctttgtggctgccgcaggcccgagcgttgctagtagcactaaccctttccagacaaatgcacgaggcgcaacggccgccacatttggtactgcgtctatgagtatgcctacggggttcggtacacctgcaccctacagtctgcccacgagcttttccggatcttttcagcaacccgcattccctgcccaggccgctttccctcagcaaacagccttttcccagcaacctaacggcttcgccgcatttggccaaaccaagcctgtggtgaccccttttggccaggtggccgcagccggggtgagctctaatccctttatgaccggtgcccccacagggcaatttccaacagggtcatcgtctacgaatccttttctgtag

SEQ ID NO: 50472 - DNA, 1755 bp, Artificial Sequence
  derived and/or modified sequence
atggctgccagtgcaaagaggaaacaggaggagaaacacctgaagatgctcagagacatgaccggtctcccccacaaccgcaagtgtttcgattgtgaccagcgaggacctacatacgtgaatatgaccgtggggagtttcgtgtgcacatcctgcagtggatcattgcgaggattgaatcccccacatagagttaagagtattagcatgactacgttcacccagcaggaaatcgagttcctccagaagcatggtaatgaagtgtgcaaacagatttggctgggtctttttgatgatcgaagttctgccataccagacttccgtgatccacaaaaagtgaaggaattcctccaggagaaatatgaaaagaaaaggtggtatgttccgcctgagcaggccaaggtggtggctagcgtgcacgcatcgatcagcggcagctccgcttcgtccacatcaagcacccctgaggtgaaaccactgaaatcattgttgggggattccgcaccaaccctgcacctcaataagggaactccaagccagtcgcccgtggtgggccgttctcagggccagcagcaggagaaaaagcagtttgacctgttatctgatcttggatcggacattttcgccgctcccgctccccagtctacggccacagccaacttcgccaatttcgcgcactttaacagtcatgcggctcagaactccgccaacgcagattttgccaacttcgatgcttttggccagagtagcggatctagcaatttcggtggcttccctacagcgtctcactcaccctttcaacctcagactacagcattccggatgttatcaagctcctgcagcttcggggagtttacatctgcctttcctctgcaggcaacccactccggatcagccgcaagtgtgaatgctaatttcgcccacttcgacaatttccctaaaagcagtagcgcggattttggtactttcaacacttcccagagccatcagaccgcgtcagccgtgtcaaaagttagtaccaacaaggctggcctgcagactgccgataaatatgccgcactcgctaatctggataatatatttagtgccggacagggcggagaccagggatccgggttcggcacaacagggaaggcccctgtgggttctgtggtgagcgtcccctctcagtcctccgcctcttctgacaagtacgccgcactggctgagctggatagtgtgttttcatccgccgctaccagctctaacgcctacacttcaacctctaatgctagctcaaacgtctttgggaccgtgcccgtggtggccagtgcacaaacgcagcctgcatcatctagcgtgccggctcccttcggcgctaccccaagtaccaatccatttgttgctgccgctgggccatccgtggcatcctctaccaatccttttcagaccaacgctcggggagctacagcagcaaccttcggaacagcctcaatgagtatgcccactggattcggcacacctgcgccatactcactgccgacatctttctctggctctttccagcagcccgcattccccgcacaggctgccttcccccaacagactgccttctctcagcagcctaacggattcgctgcattcgggcagacaaaaccagtggtaacaccatttgggcaggtcgctgccgcaggcgtctcctccaatccctttatgactggagctcctaccggtcagtttcccactggttcctcctctaccaatcccttcctctag

SEQ ID NO: 50473 - DNA, 1710 bp, Artificial Sequence
  derived and/or modified sequence
atgcttcgggatatgactggactgcctcacaatcgaaagtgctttgactgtgaccagcggggtccaacgtacgtaaacatgacggttggttcctttgtatgtacgagttgctccggatccttgcgagggttaaatccgcctcatagggtgaaaagcatctctatgaccacattcacccagcaagaaatcgagttcctacagaaacatggcaatgaggtttgtaaacagatctggctgggcctcttcgacgatcgaagttccgccatacccgatttccgcgacccgcagaaagtgaaggaatttctgcaggaaaagtatgaaaaaaaacgatggtatgtgccccctgagcaagccaaggtggtggccagtgtgcacgcgagcatatcgggctcctctgcttcctctacaagcagcactccagaggtgaaacctctgaagtcattgctgggagattccgctcccacactgcatctgaacaaggggactccgtcacagagcccggtagtaggacgatctcagggccaacaacaggagaagaagcagttcgacttactgagcgacttgggatcggacatttttgccgctcctgcacctcagagtacagctaccgccaatttcgcaaattttgcacacttcaactcccatgctgctcagaactccgctaacgcagattttgctaattttgacgctttcggacagtccagcggaagctccaactttggcggattccccaccgccagccacagccccttccagccacagactaccgcattcaggatgctcagctccagctgctcttttggcgaatttacatccgcctttcctctgcaagccacacactctggttccgccgcttcggtgaatgctaacttcgctcattttgacaatttcccaaaaagttcctccgccgatttcggcacatttaacaccagtcagtcacatcagactgcatcagctgtcagcaaagtgtcaaccaacaaggccggactgcagaccgcagacaaatacgccgctctggccaacctggacaacattttcagcgctggccagggtggtgatcaagggtccggcttcgggacaactggaaaagcgccagtaggaagtgttgtatcggtgccatcgcagtcgagtgcgagtagtgacaagtacgctgcattggccgagctcgactctgtgttctccagtgccgcaacatcctctaatgcctatacttctaccagtaatgcctcgtccaacgtctttggtactgtgcctgtcgttgcatcagcacagacccagcccgcatcatccagcgtcccggctccatttggcgcaacccccagtactaaccccttcgtcgccgcagcaggcccaagcgtcgcatccagcacaaaccccttccaaacaaatgctcgcggagccacagctgccaccttcgggaccgcctcaatgtcaatgccaaccggttttggcaccccagctccgtatagccttcccacatctttcagcgggagtttccaacaacccgcatttcccgctcaggcagcctttccacaacagaccgcttttagccagcaacctaatgggtttgcggcattcggacagacgaaacccgtcgttactcccttcgggcaggtagccgcagcgggagtttcctcaaaccctttcatgacaggggctcctaccggtcagttccctactggtagttcttccactaacccgtttctgtag

SEQ ID NO: 50474 - DNA, 1959 bp, Artificial Sequence
  derived and/or modified sequence
cccctcaggagaagtcgggaaggtggcggcggcggcggcggttgtcccggctgtgccggttggtgtggcccgtcagcccgcgtaccacagcgcccgggccgcgtcgagcccagtacagccaagccgctgcggccgggtccggcgcgggcggcgcgaagcggaagcaggaggagaagcacctgaagatgctgcgggacatgaccggcctcccgcacaaccgaaagtgcttcgactgcgaccagcgcggccccacctacgttaacatgacggtcggctccttcgtgtgtacctcctgctccggcagcctgcgaggattaaatccaccacacagggtgaaatctatctccatgacaacattcacacaacaggaaattgaattcttacaaaaacatggaaatgaagtctgtaaacagatttggctaggattatttgatgatagatcttcagcaattccagacttcagggatccacaaaaagtgaaagagtttctacaagaaaagtatgaaaagaaaagatggtatgtcccgccagaacaagccaaagtcgtggcatcagttcatgcatctatttcagggtcctctgccagtagcacaagcagcacacctgaggtcaaaccactgaaatctcttttaggggattctgcaccaacactgcacttaaataagggcacacctagtcagtccccagttgtaggtcgttctcaagggcagcagcaggagaagaagcaatttgaccttttaagtgatctcggctcagacatctttgctgctccagctcctcagtcaacagctacagccaattttgctaactttgcacatttcaacagtcatgcagctcagaattctgcaaatgcagattttgcaaactttgatgcatttggacagtctagtggttcgagtaattttggaggtttccccacagcaagtcactctccttttcagccccaaactacagcatttagaatgctttcatctagctgcagttttggtgaatttacttcagcttttcctcttcaggctacccacagtggaagtgctgcatcagtaaatgctaattttgctcattttgataacttccccaaatcctccagtgctgattttggaaccttcaatacttcccagagtcatcaaacagcatcagctgttagtaaagtttcaacgaacaaagctggtttacagactgcagacaaatatgcagcacttgctaatttagacaatatcttcagtgccgggcaaggtggtgatcagggaagtggctttgggaccacaggtaaagctcctgttggttctgtggtttcagttcccagtcagtcaagtgcatcttcagacaagtatgcagctctggcagaactagacagcgttttcagttctgcagccacctccagtaatgcgtatacttccacaagtaatgctagcagcaatgtttttggaacagtgccagtggttgcttctgcacagacacagcctgcttcatcaagtgtgcctgctccatttggagctacgccttccacaaatccatttgttgctgctgctggtccttctgtggcatcttctacaaacccatttcagaccaatgccagaggagcaacagcggcaacctttggcactgcatccatgagcatgcccacaggattcggcactcctgctccctacagtcttcccaccagctttagtggcagctttcagcagcctgcctttccagcccaagcagctttccctcaacagacagctttttctcaacagcccaatggttttgcagcatttggacaaacaaagccagtagtaaccccttttggtcaagttgcagctgctggagtatctagtaatccttttatgactggtgcaccaacaggacaatttccaacaggaagctcatcaaccaatcctttcttatagccttatatagacaatttactggaacgaacttttatgtggtcacattacatctctccacctcttg

SEQ ID NO: 50475 - protein, 560 aa, Artificial Sequence
  derived and/or modified sequence
MAASAKRKQEEKHLKMLRDMTGLPHNRKCFDCDQRGPTYVNMTVGSFVCTSCSGSLRGLNPPHRVKSISMTTFTQQEIEFLQKHGNEVCKQIWLGLFDDRSSAIPDFRDPQKVKEFLQEKYEKKRWYVPPEQAKVVASVHASISGSSASSTSSTPEVKPLKSLLGDSAPTLHLNKGTPSQSPVVGRSQGQQQEKKQFDLLSDLGSDIFAAPAPQSTATANFANFAHFNSHAAQNSANADFANFDAFGQSSGSSNFGGFPTASHSPFQPQTTGGSAASVNANFAHFDNFPKSSSADFGTFNTSQSHQTASAVSKVSTNKAGLQTADKYAALANLDNIFSAGQGGDQGSGFGTTGKAPVGSVVSVPSQSSASSDKYAALAELDSVFSSAATSSNAYTSTSNASSNVFGTVPVVASAQTQPASSSVPAPFGATPSTNPFVAAAGPSVASSTNPFQTNARGATAATFGTASMSMPTGFGTPAPYSLPTSFSGSFQQPAFPAQAAFPQQTAFSQQPNGFAAFGQTKPVVTPFGQVAAAGVSSNPFMTGAPTGQFPTGSSSTNPFL

SEQ ID NO: 50476 - DNA, 1683 bp, Artificial Sequence
  derived and/or modified sequence
atggccgccagcgccaagagaaagcaggaggagaagcacctgaagatgctgagagacatgaccggcctgccccacaacagaaagtgcttcgactgcgaccagagaggccccacctacgtgaacatgaccgtgggcagcttcgtgtgcaccagctgcagcggcagcctgagaggcctgaaccccccccacagagtgaagagcatcagcatgaccaccttcacccagcaggagatcgagttcctgcagaagcacggcaacgaggtgtgcaagcagatctggctgggcctgttcgacgacagaagcagcgccatccccgacttcagagacccccagaaggtgaaggagttcctgcaggagaagtacgagaagaagagatggtacgtgccccccgagcaggccaaggtggtggccagcgtgcacgccagcatcagcggcagcagcgccagcagcaccagcagcacccccgaggtgaagcccctgaagagcctgctgggcgacagcgcccccaccctgcacctgaacaagggcacccccagccagagccccgtggtgggcagaagccagggccagcagcaggagaagaagcagttcgacctgctgagcgacctgggcagcgacatcttcgccgcccccgccccccagagcaccgccaccgccaacttcgccaacttcgcccacttcaacagccacgccgcccagaacagcgccaacgccgacttcgccaacttcgacgccttcggccagagcagcggcagcagcaacttcggcggcttccccaccgccagccacagccccttccagccccagaccaccggcggcagcgccgccagcgtgaacgccaacttcgcccacttcgacaacttccccaagagcagcagcgccgacttcggcaccttcaacaccagccagagccaccagaccgccagcgccgtgagcaaggtgagcaccaacaaggccggcctgcagaccgccgacaagtacgccgccctggccaacctggacaacatcttcagcgccggccagggcggcgaccagggcagcggcttcggcaccaccggcaaggcccccgtgggcagcgtggtgagcgtgcccagccagagcagcgccagcagcgacaagtacgccgccctggccgagctggacagcgtgttcagcagcgccgccaccagcagcaacgcctacaccagcaccagcaacgccagcagcaacgtgttcggcaccgtgcccgtggtggccagcgcccagacccagcccgccagcagcagcgtgcccgcccccttcggcgccacccccagcaccaaccccttcgtggccgccgccggccccagcgtggccagcagcaccaaccccttccagaccaacgccagaggcgccaccgccgccaccttcggcaccgccagcatgagcatgcccaccggcttcggcacccccgccccctacagcctgcccaccagcttcagcggcagcttccagcagcccgccttccccgcccaggccgccttcccccagcagaccgccttcagccagcagcccaacggcttcgccgccttcggccagaccaagcccgtggtgacccccttcggccaggtggccgccgccggcgtgagcagcaaccccttcatgaccggcgcccccaccggccagttccccaccggcagcagcagcaccaaccccttcctgtag

SEQ ID NO: 50477 - DNA, 1683 bp, Artificial Sequence
  derived and/or modified sequence
atggccgcaagtgcaaagcggaaacaggaagagaaacacctcaaaatgctgagggacatgactggcttaccacataatcgcaaatgcttcgattgtgatcaacgcggcccaacctacgtgaacatgacagtgggaagcttcgtgtgtacgtcctgctcaggcagcctaaggggtttgaaccctccacatagagtaaagtccattagtatgacaactttcacacagcaggagattgagtttctgcaaaaacacggcaatgaggtgtgtaagcagatatggttggggctgtttgacgatcgtagctccgccatccccgacttccgagacccacagaaggtcaaagaattcctgcaagagaaatacgagaagaagcggtggtacgtgccccctgagcaggcgaaggtggtagcctctgtgcacgcgtctataagtggaagctccgcatcatctacttcctccacacctgaagtgaaacccctgaaaagccttctgggggacagcgcgcctacccttcatttaaataagggtacaccaagccagtcccccgtggtcggccgaagtcagggacagcagcaggagaagaagcaatttgacttgctcagcgacctggggagcgatatcttcgctgctccagctccacagtctaccgcaactgcaaactttgctaacttcgcacactttaattctcatgcagcccaaaattctgccaatgccgatttcgcgaacttcgacgccttcggtcagagctcaggttcaagcaatttcggcgggtttcctaccgctagccatagccctttccagccgcagaccactggaggttctgccgcgagcgttaacgctaactttgcccacttcgacaatttcccaaaaagttctagcgctgactttggcacgttcaacacatcacagagccaccagacggcgagtgctgtctcgaaggtaagcaccaataaggccggactccaaactgcagacaaatatgcagcgctggccaacctcgacaatattttcagcgcaggccagggtggcgaccaggggagcggatttggcaccacagggaaggcgcctgtgggttcagtggtctcagtgcccagccagagctccgccagctctgataagtatgccgccctggctgaactcgacagtgtgttcagttccgccgcaacctcctccaatgcttatacctcaacctcaaatgcatcatcaaatgtgtttggcacagtccccgtggtagcgagcgcgcaaactcagccagcctcctcctcagtgcctgcgcccttcggggctactccgtccactaacccttttgtggctgcagcgggcccctccgtggcctcatccaccaatccgtttcagacaaacgcccggggtgcaaccgccgccacattcggaactgcttccatgtccatgcctaccggattcggaacccctgctccttacagcctgccgacttcgttttcaggaagtttccagcaaccagccttcccagcgcaagctgcatttccacaacagactgcctttagccagcaacccaacggatttgcagcttttggccaaactaaaccggtggttaccccgtttggccaagttgcggcagcaggcgtgtcctctaaccctttcatgaccggtgctcctacggggcagttcccaacaggaagttcctctactaacccatttttatag

SEQ ID NO: 50478 - DNA, 1683 bp, Artificial Sequence
  derived and/or modified sequence
atggccgccagcgccaagaggaagcaggaggagaagcacctgaagatgctgcgggacatgacaggcctgccccacaacaggaagtgctttgactgtgaccagaggggccccacctacgtgaacatgacagtgggcagctttgtgtgcaccagctgcagcggcagcctgcggggcctgaaccccccccaccgggtgaagagcatctccatgaccaccttcacccagcaggagattgagttcctgcagaagcacggcaatgaggtgtgcaagcagatctggctgggcctgtttgatgacaggagcagcgccatcccagacttccgggacccccagaaggtgaaggagttcctgcaggagaagtatgagaagaagcgctggtacgtgcccccagagcaggccaaggtggtggcctctgtgcacgccagcatcagcggcagcagcgccagcagcaccagcagcaccccagaggtgaagcccctgaagagcctgctgggggacagcgcccccaccctgcacctgaacaagggcacccccagccagagccctgtggtgggccgcagccagggccagcagcaggagaagaagcagtttgacctgctgagtgacctgggcagtgacatctttgctgccccagccccccagagcacagccacagccaactttgccaactttgcccacttcaacagccatgctgcccagaacagcgccaatgctgactttgccaactttgatgccttcggccagagcagcggcagcagcaactttggaggcttccccacagccagccacagccccttccagccccagaccactggaggcagcgctgcctctgtgaatgccaactttgcccactttgacaacttccccaagagcagcagcgctgactttggcaccttcaacaccagccagagccaccagacagccagcgctgtgtccaaggtgtccaccaacaaggccggcctgcagacagctgacaagtatgctgccctggccaacctggacaacatcttctctgctggccagggcggggaccagggcagcggcttcggcaccaccgggaaggcccctgtgggctctgtggtgtctgtgcccagccagagcagcgccagcagtgacaagtatgctgccctggccgagctggacagcgtcttcagcagcgctgccaccagcagcaatgcctacaccagcaccagcaatgccagcagcaatgtgtttggaacagtgcctgtggtggccagcgcccagacccagcctgccagcagctctgtgcctgccccctttggagccacccccagcaccaacccctttgtggccgccgccggccccagcgtggccagcagcaccaaccccttccagaccaatgcccggggggccacagctgccacctttggaacagcctccatgtccatgcccaccggcttcggcaccccagccccctacagcctgcccaccagcttcagcggcagcttccagcagcctgccttccctgcccaggccgccttcccccagcagacagccttcagccagcagcccaacggctttgctgccttcggccagaccaagcctgtggtgaccccatttggccaggtggccgctgctggggtgagcagcaaccccttcatgaccggggcccccaccggccagttccccaccggcagcagcagcaccaaccccttcctgtag

SEQ ID NO: 50479 - DNA, 1683 bp, Artificial Sequence
  derived and/or modified sequence
atggccgccagcgccaagcggaagcaggaggagaagcacctgaagatgttaagggatatgaccggcctccctcacaaccggaagtgttttgattgtgatcagaggggaccaacatatgtcaacatgaccgtgggatcattcgtttgcacctcctgtagtggatctttaagaggccttaatccccctcacagagttaagagcatctcaatgactacattcactcagcaggagatcgaattcctgcagaagcatggcaatgaagtatgcaagcaaatctggcttggacttttcgatgaccggagttccgcgataccagacttcagagacccccaaaaggtcaaagagtttcttcaggagaagtatgagaagaaacgctggtacgtgccacctgagcaggcgaaggtggtggcaagcgtgcacgcctccatctctgggtctagcgcgtcttccacatccagcactccagaggtcaaacctctgaagagtctgctgggggactccgcgcccacccttcatctgaataagggcaccccaagtcagtcaccggtggtcggcaggagtcaaggccaacagcaggagaagaagcagtttgacctgttgtctgatctgggttctgacatttttgccgcgccagcaccacaaagcacagcaaccgctaattttgccaattttgcccacttcaattcccacgcagcacagaactccgcaaacgctgatttcgctaactttgatgcttttggccagtccagtggctcgtccaacttcggaggtttcccaaccgctagccattctcccttccagcctcaaacaacaggagggtctgccgcttctgtgaacgcgaatttcgctcacttcgacaacttccccaagtcatcctctgctgatttcggaacattcaacaccagccagtctcaccagactgcaagcgccgtgtccaaggtcagtacaaataaggcgggactgcagacagcagacaagtatgcggcattagccaatctggataacatctttagcgctggtcaaggaggtgatcagggtagtgggttcggcacgacaggaaaagcacctgttggctcagtggtgtctgtgcctagccagagtagcgccagcagcgacaaatacgccgccttagctgagctggacagcgttttcagctccgccgccacctcctctaacgcctatacaagcacctcaaacgcttcatccaacgtgttcgggacggtgccagtagtggcctcagctcagacgcagcctgcctcctccagcgtacccgcaccctttggggctacccccagtactaacccatttgtggcggctgctggtcccagcgtggcatccagcaccaatccattccagacaaatgccaggggagccaccgcagccaccttcgggacggccagcatgagcatgcctactgggtttggtactccggccccttattccctgccaacttcgttcagtggtagcttccaacaaccagcattcccggctcaagctgcattccctcagcagactgcctttagccagcaacccaacggcttcgctgctttcggacagacaaagcctgttgtcactcctttcggacaggtagctgccgcgggcgtgtcttcaaacccattcatgacaggggcccctactggccaatttccaactgggtcctcctcgactaacccatttctctag

SEQ ID NO: 50480 - DNA, 1783 bp, Artificial Sequence
  derived and/or modified sequence
gcgctgcccggctcccggccctgccggcctcctcccttggcgccgcggccatggcggccagcgcgaagcggaagcaggaggagaagcacctgaagatgctgcgggacatgaccggcctcccgcacaaccgaaagtgcttcgactgcgaccagcgcggccccacctacgttaacatgacggtcggctccttcgtgtgtacctcctgctccggcagcctgcgaggattaaatccaccacacagggtgaaatctatctccatgacaacattcacacaacaggaaattgaattcttacaaaaacatggaaatgaagtctgtaaacagatttggctaggattatttgatgatagatcttcagcaattccagacttcagggatccacaaaaagtgaaagagtttctacaagaaaagtatgaaaagaaaagatggtatgtcccgccagaacaagccaaagtcgtggcatcagttcatgcatctatttcagggtcctctgccagtagcacaagcagcacacctgaggtcaaaccactgaaatctcttttaggggattctgcaccaacactgcacttaaataagggcacacctagtcagtccccagttgtaggtcgttctcaagggcagcagcaggagaagaagcaatttgaccttttaagtgatctcggctcagacatctttgctgctccagctcctcagtcaacagctacagccaattttgctaactttgcacatttcaacagtcatgcagctcagaattctgcaaatgcagattttgcaaactttgatgcatttggacagtctagtggttcgagtaattttggaggtttccccacagcaagtcactctccttttcagccccaaactacaggtggaagtgctgcatcagtaaatgctaattttgctcattttgataacttccccaaatcctccagtgctgattttggaaccttcaatacttcccagagtcatcaaacagcatcagctgttagtaaagtttcaacgaacaaagctggtttacagactgcagacaaatatgcagcacttgctaatttagacaatatcttcagtgccgggcaaggtggtgatcagggaagtggctttgggaccacaggtaaagctcctgttggttctgtggtttcagttcccagtcagtcaagtgcatcttcagacaagtatgcagctctggcagaactagacagcgttttcagttctgcagccacctccagtaatgcgtatacttccacaagtaatgctagcagcaatgtttttggaacagtgccagtggttgcttctgcacagacacagcctgcttcatcaagtgtgcctgctccatttggagctacgccttccacaaatccatttgttgctgctgctggtccttctgtggcatcttctacaaacccatttcagaccaatgccagaggagcaacagcggcaacctttggcactgcatccatgagcatgcccacaggattcggcactcctgctccctacagtcttcccaccagctttagtggcagctttcagcagcctgcctttccagcccaagcagctttccctcaacagacagctttttctcaacagcccaatggttttgcagcatttggacaaacaaagccagtagtaaccccttttggtcaagttgcagctgctggagtatctagtaatccttttatgactggtgcaccaacaggacaatttccaacaggaagctcatcaaccaatcctttcttatagccttatatagacaatttactggaacgaacttttatgtggtcacattacat

SEQ ID NO: 50481 - DNA, 1683 bp, Artificial Sequence
  derived and/or modified sequence
atggcagcctccgcaaagcggaaacaagaggaaaaacatctgaagatgttgcgcgacatgacaggcctacctcacaaccggaagtgctttgattgcgatcagaggggaccaacttacgtgaacatgacagtcggctcatttgtctgtacgtcatgttctggaagccttagaggccttaacccacctcatcgagttaagagcatctccatgacaaccttcacccagcaggagattgaatttctgcaaaagcacggaaacgaggtgtgcaaacagatctggctgggactgttcgacgatagaagttctgcaatacccgacttccgggacccacagaaggttaaggagttcctccaggagaaatacgaaaagaaacgttggtacgtccctcctgagcaagccaaagtagtggcttccgttcacgcaagcatctcaggtagttccgcaagctcaacctcttctaccccagaagtgaaaccgttgaagtcgctcttgggagattctgcgccaactctccacctgaataaaggtacacccagccagagccccgttgtcggacggtcccaaggacaacagcaagaaaaaaaacagttcgacctgctctctgacctgggttccgatatctttgcagccccagcccctcagtcaaccgccaccgctaattttgcaaactttgcccatttcaactctcatgcagctcagaactccgcaaacgccgactttgcgaattttgacgcgttcggtcagtcttctggcagcagtaattttggaggttttcccacggcgagccattctcctttccagccacagactactggaggttctgcggctagcgtgaatgccaacttcgctcacttcgataattttccaaagtcgagctcagccgacttcgggaccttcaatacgagtcaatcacatcagactgcatccgccgttagcaaagtgtccaccaataaggccggtttgcagactgctgataagtacgccgcattggccaatctagacaacatcttctctgccggtcaggggggagatcaaggatctggtttcggtactaccggaaaggctcccgtgggctccgttgtgagcgtgccatcacagagcagtgcaagttcagacaagtacgctgcccttgctgagcttgacagcgtcttcagttccgcagccacctcaagcaatgcatacacctccacctcaaatgcctcgtctaacgtgttcggaacagttccagtggtggcaagcgcccagacacaaccggcttctagcagcgtacccgctccctttggcgctacaccatctacaaatccctttgttgccgctgcgggtcccagcgtcgcttcctcaaccaaccctttccaaacgaatgcccgaggcgctactgcagccacattcggaaccgcaagcatgtccatgcctacggggtttggtacacccgctccttactcacttcccacaagctttagcggcagttttcaacagccggcattcccagcccaggccgcttttccgcagcagactgctttttctcagcagcctaatgggtttgcagcctttgggcagactaagcctgttgtgacaccttttggccaggtggcagctgcaggagtttcatcaaatccctttatgaccggggcacccacgggccagtttcctacagggtcttcctccaccaacccctttctgtag

SEQ ID NO: 50482 - protein, 522 aa, Artificial Sequence
  derived and/or modified sequence
MAASAKRKQEEKHLKMLRDMTGLPHNRKCFDCDQRGPTYVNMTVGSFVCTSCSGSLRGLNPPHRVKSISMTTFTQQEIEFLQKHGNEVCKQIWLGLFDDRSSAIPDFRDPQKVKEFLQEKYEKKRWYVPPEQAKVVASVHASISGSSASSTSSTPEVKPLKSLLGDSAPTLHLNKGTPSQSPVVGRSQGQQQEKKQFDLLSDLGSDIFAAPAPQSTATANFANFAHFNSHAGGSAASVNANFAHFDNFPKSSSADFGTFNTSQSHQTASAVSKVSTNKAGLQTADKYAALANLDNIFSAGQGGDQGSGFGTTGKAPVGSVVSVPSQSSASSDKYAALAELDSVFSSAATSSNAYTSTSNASSNVFGTVPVVASAQTQPASSSVPAPFGATPSTNPFVAAAGPSVASSTNPFQTNARGATAATFGTASMSMPTGFGTPAPYSLPTSFSGSFQQPAFPAQAAFPQQTAFSQQPNGAGFAAFGQTKPVVTPFGQVAAAGVSSNPFMTGAPTGQFPTGSSSTNPFL

SEQ ID NO: 50483 - DNA, 1569 bp, Artificial Sequence
  derived and/or modified sequence
atggccgccagcgccaagagaaagcaggaggagaagcacctgaagatgctgagagacatgaccggcctgccccacaacagaaagtgcttcgactgcgaccagagaggccccacctacgtgaacatgaccgtgggcagcttcgtgtgcaccagctgcagcggcagcctgagaggcctgaaccccccccacagagtgaagagcatcagcatgaccaccttcacccagcaggagatcgagttcctgcagaagcacggcaacgaggtgtgcaagcagatctggctgggcctgttcgacgacagaagcagcgccatccccgacttcagagacccccagaaggtgaaggagttcctgcaggagaagtacgagaagaagagatggtacgtgccccccgagcaggccaaggtggtggccagcgtgcacgccagcatcagcggcagcagcgccagcagcaccagcagcacccccgaggtgaagcccctgaagagcctgctgggcgacagcgcccccaccctgcacctgaacaagggcacccccagccagagccccgtggtgggcagaagccagggccagcagcaggagaagaagcagttcgacctgctgagcgacctgggcagcgacatcttcgccgcccccgccccccagagcaccgccaccgccaacttcgccaacttcgcccacttcaacagccacgccggcggcagcgccgccagcgtgaacgccaacttcgcccacttcgacaacttccccaagagcagcagcgccgacttcggcaccttcaacaccagccagagccaccagaccgccagcgccgtgagcaaggtgagcaccaacaaggccggcctgcagaccgccgacaagtacgccgccctggccaacctggacaacatcttcagcgccggccagggcggcgaccagggcagcggcttcggcaccaccggcaaggcccccgtgggcagcgtggtgagcgtgcccagccagagcagcgccagcagcgacaagtacgccgccctggccgagctggacagcgtgttcagcagcgccgccaccagcagcaacgcctacaccagcaccagcaacgccagcagcaacgtgttcggcaccgtgcccgtggtggccagcgcccagacccagcccgccagcagcagcgtgcccgcccccttcggcgccacccccagcaccaaccccttcgtggccgccgccggccccagcgtggccagcagcaccaaccccttccagaccaacgccagaggcgccaccgccgccaccttcggcaccgccagcatgagcatgcccaccggcttcggcacccccgccccctacagcctgcccaccagcttcagcggcagcttccagcagcccgccttccccgcccaggccgccttcccccagcagaccgccttcagccagcagcccaacggcgccggcttcgccgccttcggccagaccaagcccgtggtgacccccttcggccaggtggccgccgccggcgtgagcagcaaccccttcatgaccggcgcccccaccggccagttccccaccggcagcagcagcaccaaccccttcctgtag

SEQ ID NO: 50484 - DNA, 1569 bp, Artificial Sequence
  derived and/or modified sequence
atggcagcctcagctaaacgcaagcaggaggagaagcacctgaagatgctgagagatatgacggggctgccacataaccgaaagtgttttgactgtgaccagcgggggccaacttacgtaaacatgaccgtcggctcattcgtgtgtacaagctgctccggatcattgcggggactgaaccccccgcaccgagtcaaaagcatctcaatgactacattcacgcagcaagagatcgaattccttcagaagcacggcaacgaagtttgcaagcaaatatggctgggactgttcgatgatcggagctctgcaatccctgatttcagagacccacagaaagtgaaagaatttctgcaagaaaagtacgaaaaaaagaggtggtatgttccccccgagcaggccaaagtggtggccagtgtccacgccagcattagtgggagcagcgctagctccacttcatcaacgccagaggtgaagccgctgaaatcattgttgggtgattctgcaccaaccctacacctgaacaagggcacacctagccagtccccagtggttgggcggagtcaggggcagcaacaggaaaaaaagcagttcgaccttctctctgacctagggtcagatatttttgcggctcctgccccccaaagtactgctacagcaaactttgctaattttgcgcactttaatagccacgcaggtggaagcgccgccagcgtgaatgcgaattttgcgcactttgataattttcctaagtccagcagcgcagattttggcacctttaatacatcccagagtcatcagacagcttcagcagtgtcaaaagtaagtacaaataaagctgggctacagacggcagacaaatacgccgccctggccaacctggataatattttcagcgctggacagggtggggaccagggtagcggattcgggactacaggcaaagcccccgtggggagtgtggtgtctgtcccctctcaatcttcagcttcttccgacaagtatgccgccctggccgagctcgactcggtcttctcgagtgctgccactagtagcaatgcttatacgtctacctccaacgcgagcagtaacgttttcggaaccgtccccgttgtggcctctgcccagactcagccagcgtcctcttctgtgccggccccttttggcgccacgccctcaacgaaccccttcgtcgccgccgctggcccatctgtggcttcctccacaaatccatttcagaccaatgcacggggcgcaacagctgcaacttttggcacagcatcaatgagcatgcctacaggcttcggcacccccgcaccttactcccttcctacatccttttctggttctttccagcagccagccttccccgcacaggccgctttccctcagcagaccgcattctcccagcagcccaatggagcggggtttgccgcattcggacagacaaagcccgtggtcacgccgtttgggcaagtggccgccgctggtgtcagcagcaatcctttcatgaccggagcacccactggtcagtttcctacaggatcatcttccactaacccatttctgtag

SEQ ID NO: 50485 - DNA, 1669 bp, Artificial Sequence
  derived and/or modified sequence
gcgctgcccggctcccggccctgccggcctcctcccttggcgccgcggccatggcggccagcgcgaagcggaagcaggaggagaagcacctgaagatgctgcgggacatgaccggcctcccgcacaaccgaaagtgcttcgactgcgaccagcgcggccccacctacgttaacatgacggtcggctccttcgtgtgtacctcctgctccggcagcctgcgaggattaaatccaccacacagggtgaaatctatctccatgacaacattcacacaacaggaaattgaattcttacaaaaacatggaaatgaagtctgtaaacagatttggctaggattatttgatgatagatcttcagcaattccagacttcagggatccacaaaaagtgaaagagtttctacaagaaaagtatgaaaagaaaagatggtatgtcccgccagaacaagccaaagtcgtggcatcagttcatgcatctatttcagggtcctctgccagtagcacaagcagcacacctgaggtcaaaccactgaaatctcttttaggggattctgcaccaacactgcacttaaataagggcacacctagtcagtccccagttgtaggtcgttctcaagggcagcagcaggagaagaagcaatttgaccttttaagtgatctcggctcagacatctttgctgctccagctcctcagtcaacagctacagccaattttgctaactttgcacatttcaacagtcatgcaggtggaagtgctgcatcagtaaatgctaattttgctcattttgataacttccccaaatcctccagtgctgattttggaaccttcaatacttcccagagtcatcaaacagcatcagctgttagtaaagtttcaacgaacaaagctggtttacagactgcagacaaatatgcagcacttgctaatttagacaatatcttcagtgccgggcaaggtggtgatcagggaagtggctttgggaccacaggtaaagctcctgttggttctgtggtttcagttcccagtcagtcaagtgcatcttcagacaagtatgcagctctggcagaactagacagcgttttcagttctgcagccacctccagtaatgcgtatacttccacaagtaatgctagcagcaatgtttttggaacagtgccagtggttgcttctgcacagacacagcctgcttcatcaagtgtgcctgctccatttggagctacgccttccacaaatccatttgttgctgctgctggtccttctgtggcatcttctacaaacccatttcagaccaatgccagaggagcaacagcggcaacctttggcactgcatccatgagcatgcccacaggattcggcactcctgctccctacagtcttcccaccagctttagtggcagctttcagcagcctgcctttccagcccaagcagctttccctcaacagacagctttttctcaacagcccaatggtgcaggttttgcagcatttggacaaacaaagccagtagtaaccccttttggtcaagttgcagctgctggagtatctagtaatccttttatgactggtgcaccaacaggacaatttccaacaggaagctcatcaaccaatcctttcttatagccttatatagacaatttactggaacgaacttttatgtggtcacattacat

SEQ ID NO: 50486 - DNA, 1569 bp, Artificial Sequence
  derived and/or modified sequence
atggccgccagcgccaagaggaagcaggaggagaagcacctgaagatgctgcgggacatgacaggcctgccccacaacaggaagtgctttgactgtgaccagaggggccccacctacgtgaacatgacagtgggcagctttgtgtgcaccagctgcagcggcagcctgcggggcctgaaccccccccaccgggtgaagagcatctccatgaccaccttcacccagcaggagattgagttcctgcagaagcacggcaatgaggtgtgcaagcagatctggctgggcctgtttgatgacaggagcagcgccatcccagacttccgggacccccagaaggtgaaggagttcctgcaggagaagtatgagaagaagcgctggtacgtgcccccagagcaggccaaggtggtggcctctgtgcacgccagcatcagcggcagcagcgccagcagcaccagcagcaccccagaggtgaagcccctgaagagcctgctgggggacagcgcccccaccctgcacctgaacaagggcacccccagccagagccctgtggtgggccgcagccagggccagcagcaggagaagaagcagtttgacctgctgagtgacctgggcagtgacatctttgctgccccagccccccagagcacagccacagccaactttgccaactttgcccacttcaacagccatgctgggggcagcgctgcctctgtgaatgccaactttgcccactttgacaacttccccaagagcagcagcgctgactttggcaccttcaacaccagccagagccaccagacagccagcgctgtgtccaaggtgtccaccaacaaggccggcctgcagacagctgacaagtatgctgccctggccaacctggacaacatcttctctgctggccagggcggggaccagggcagcggcttcggcaccaccgggaaggcccctgtgggctctgtggtgtctgtgcccagccagagcagcgccagcagtgacaagtatgctgccctggccgagctggacagcgtcttcagcagcgctgccaccagcagcaatgcctacaccagcaccagcaatgccagcagcaatgtgtttggaacagtgcctgtggtggccagcgcccagacccagcctgccagcagctctgtgcctgccccctttggagccacccccagcaccaacccctttgtggccgccgccggccccagcgtggccagcagcaccaaccccttccagaccaatgcccggggggccacagctgccacctttggaacagcctccatgtccatgcccaccggcttcggcaccccagccccctacagcctgcccaccagcttcagcggcagcttccagcagcctgccttccctgcccaggccgccttcccccagcagacagccttcagccagcagcccaacggggccggctttgctgccttcggccagaccaagcctgtggtgaccccatttggccaggtggccgctgctggggtgagcagcaaccccttcatgaccggggcccccaccggccagttccccaccggcagcagcagcaccaaccccttcctgtag

SEQ ID NO: 50487 - DNA, 1569 bp, Artificial Sequence
  derived and/or modified sequence
atggccgccagcgccaagcggaagcaggaggagaagcacctgaagatgctccgtgatatgacgggtctccctcataacagaaagtgcttcgattgcgaccagagggggccaacctacgtgaatatgaccgtgggcagttttgtctgcaccagctgtagtggatcactgaggggtcttaaccctccccatcgggtgaagtcaattagtatgaccactttcacccagcaggaaattgagtttctccagaaacacggtaatgaagtttgtaagcagatttggctcggcctcttcgacgatagatcctcagctatacccgacttcagagatccccagaaggtgaaggagtttctgcaagaaaaatacgaaaagaagaggtggtatgtgccccccgaacaagctaaagtggtcgcctccgtgcatgctagtatttctgggtccagcgcaagcagcacatccagtacccccgaagtgaaaccactaaagagcttgctcggggacagcgctcccaccctgcacctgaataagggcacccctagccagagcccggtggtcggccgatctcaaggccagcagcaggaaaagaagcagttcgacctgttaagcgacctcggaagtgatatctttgctgctcctgcccctcagtcaacggcaacagctaactttgccaattttgcccatttcaattcccacgcaggaggctccgccgcgagcgtcaatgctaattttgcccatttcgataatttccccaaatcttcatctgccgacttcggcacgtttaacacgagtcagtcccaccaaactgcgtccgctgtctcaaaggtatccaccaataaggccgggctgcagactgctgacaagtacgctgccttagctaatctggacaatatttttagcgccgggcagggtggcgatcaaggatccggcttcggtactactggcaaggcaccagtgggatctgttgtgtccgtgccatcccagagcagcgccagtagtgataaatatgccgctctcgccgagcttgattccgtattttcctctgcggcgaccagtagtaatgcatacacttcaacttccaacgcaagctcaaatgtttttggaacagtgcccgtggttgccagcgcacaaactcagccagcctcttcatctgtgcccgcaccctttggagctacccccagcacaaatccattcgtcgccgcagccggacctagcgtggcctcttccactaacccttttcaaactaacgccaggggcgcaactgccgctaccttcggcacagcctcaatgagcatgcccacagggttcggaacgcctgcaccctatagcctgccgactagcttttccggaagctttcagcaacctgccttccctgctcaggctgcatttccgcagcagactgcattctcccagcagcccaacggagccggattcgccgccttcgggcaaaccaaaccagtggttacaccatttggtcaggtggccgccgccggcgtctcgtctaatccctttatgaccggtgcaccaactggccaatttcccactgggagtagcagcacaaacccattcctttag

SEQ ID NO: 50488 - DNA, 1569 bp, Artificial Sequence
  derived and/or modified sequence
atggccgctagcgcaaaacggaaacaggaggaaaaacatttgaaaatgctccgggatatgaccggcctcccccacaaccgaaaatgttttgattgtgaccagagggggcctacatacgtcaatatgactgtggggagctttgtgtgcacttcgtgcagcggttcactgcgtggtctgaatccaccccaccgagtaaagtctatctctatgacaactttcacacagcaggagattgagtttctgcagaagcacggaaatgaggtgtgtaagcaaatctggttaggtctattcgatgaccggagttcggctatcccagacttcagagacccccaaaaggttaaagaattcctgcaggagaaatatgagaagaaaagatggtatgtacctccagagcaggccaaggtagtggcgtctgtacacgcgagtatcagcggaagtagcgcttcttcaactagtagtacaccagaggtgaaaccgctaaagagcctgctcggcgactctgcacccacactgcaccttaataagggcaccccctctcagagccccgtcgtaggcaggagccagggccagcaacaggagaaaaagcagttcgaccttctaagcgatcttggcagtgacatttttgcggctccggcaccccagagcaccgcaaccgccaacttcgccaatttcgcgcatttcaactcccacgctggcggaagcgccgcaagcgttaacgcaaatttcgcccacttcgacaacttccctaaaagctccagcgccgactttggcacctttaatactagtcagtcccatcagacggctagtgccgtgtcaaaggttagcaccaacaaagcgggacttcagacagccgataagtacgccgcactggcgaacttggacaacatcttttcagccggacagggaggcgatcaggggtccggattcggcactactggcaaagcccctgtgggctctgtcgtgagtgttccctctcagagtagcgcctcaagcgataagtacgcggctcttgccgagctggatagcgtgtttagcagcgctgcaaccagctccaacgcgtacacatccacatctaacgcttcttctaatgttttcggcaccgttcccgtggttgcgtcggcccagacacagcctgcaagttcttccgtgcctgcgccattcggcgctacgcctagcacgaaccctttcgtcgccgcagcagggccatctgtcgcaagctcaacgaatccatttcagacgaacgccagaggggcaacagctgcgacattcggcactgcaagtatgagcatgcccaccggattcggcactcccgcaccttatagcctgccgacttctttttctggatcttttcagcagccagctttccctgcccaagccgcttttccacagcagactgcattttctcagcagcctaacggtgccggatttgctgcttttggacagacgaagccagtcgtcaccccttttggccaggtggccgcagccggtgtatcttccaatccattcatgaccggcgctccaactggccagttccccacaggcagttcctcgactaacccgttcctgtag

SEQ ID NO: 50489 - protein, 1133 aa, Artificial Sequence
  derived and/or modified sequence
MTKKEEPPPSRVPRAVRVASLLSEGEELSGDDQGDEEEDDHAYEGVPNGGWHTSSLSLSLPSTIAAPHPMDGPPGGSTPVTPVIKAGWLDKNPPQGSYIYQKRWVRLDTDHLRYFDSNKDAYSKRFISVACISHVAAIGDQKFEVITNNRTFAFRAESDVERKEWMQALQQAMAEQRARARLSSAYLLGVPGSEQPDRAGSLELRGFKNKLYVAVVGDKVQLYKNLEEYHLGIGITFIDMSVGNVKEVDRRSFDLTTPYRIFSFSADSELEKEQWLEAMQGAIAEALSTSEVAERIWAAAPNRFCADCGAPQPDWASINLCVVICKRCAGEHRGLGAGVSKVRSLKMDRKVWTETLIEALCAAVTTTDLAETQALLGCGAGINCFSGDPEAPTPLALAEQAGQTLQMEFLRNNRTTEVPRLDSMKPLEKHYSVVLPTVSHSGFLYKTASAGKLLQDRRAREEFSRRWCVLGDGVLSYFENERAVTPNGEIRASEIVCLAVPPPDTHGFEHTFEVYTEGERLYLFGLESAEQAHEWVKCIAKAFVPPLAEDLLARDFERLGRLPYKAGLSLQRAQEGWFSLSGSELRAVFPEGPCEEPLQLRKLQELSIQGDSENQVLVLVERRRTLYIQGERRLDFMGWLGAIQKAAASMGDTLSEQQLGDSDIPVIVYRCVDYITQCGLTSEGIYRKCGQTSKTQRLLESLRQDARSVHLKEGEQHVDDVSSALKRFLRDLPDGLFTRAQRLTWLEASEIEDEEEKVSRYRELLVRLPPVNRATVKALISHLYCVQCFSDTNQMNVHNLAIVFGPTLFQTDGQDYKAGRVVEDLINHYVVVFSVDEEELRKQREEITAIVKMRVAGTASGTQHAGDFICTVYLEEKKAETEQHIKVPASMTAEELTLEILDRRNVGIREKDYWTCFEVNEREEAERPLHFAEKVLPILHGLGTDSHLVVKKHQAMEAMLLYLASRVGDTKHGMMKFREDRSLLGLGLPSGGFHDRYFILNSSCLRLYKEVRSHRPEKEWPIKSLKVYLGVKKKLRPPTCWGFTVVHETEKHEKQQWYLCCDTQMELREWFATFLFVQHDGLVWPSEPSRVSRAVPEVRLGSVSLIPLRGSENEMRRSVAAFTADPLSLLRNV

SEQ ID NO: 50490 - DNA, 3402 bp, Artificial Sequence
  derived and/or modified sequence
atgacaaagaaagaagagcctcctcccagtcgagttccaagagccgtacgggtagcctccctcctgtctgagggtgaagagctgtccggtgatgaccagggggacgaagaagaggatgaccacgcatacgaaggagtacccaacggagggtggcacacaagctctctgtccttatctctacccagcacaattgcagctccacacccaatggacgggccgccgggagggagtacgcccgtgacacccgtgattaaggctggttggctagacaaaaaccccccgcagggaagctacatttatcaaaagagatgggtgagattggacaccgaccaccttcgttactttgatagcaataaagatgcctatagcaagaggtttatttccgtcgcctgcataagccatgttgctgccattggagaccagaagttcgaggttattaccaacaacagaacattcgcattcagagcagagtccgatgtcgaacgtaaggagtggatgcaggccctgcagcaagcgatggccgaacagcgtgcaagggcgagactcagtagtgcgtacctgttaggggtcccggggagcgaacaacccgaccgtgccggtagtctggaactaagggggtttaaaaacaaactgtacgtagcagtggtcggcgataaagttcaactctacaaaaacctagaggaatatcacctgggcattggaatcacattcattgacatgtccgttggtaacgtgaaggaagtggatagacgtagttttgacctgactaccccgtatcggatctttagtttttccgcagatagtgagctggagaaggaacagtggctggaggccatgcagggagctatcgcggaagctcttagcacctccgaagtcgccgagcgcatttgggccgcagctccaaatcgtttttgcgccgactgtggcgcaccacagcctgattgggcctctattaacctatgcgtggtgatctgcaagcgctgcgccggcgagcatagaggacttggagctggcgtgtccaaggtgcgttctcttaaaatggatcgtaaagtgtggactgaaaccctcattgaagcactgtgcgcagcagtcaccactaccgaccttgcagagacgcaggctttgctcggatgcggcgctggcatcaattgtttcagtggtgaccccgaagcccctacaccattggcactcgcagagcaagccggtcagacactgcaaatggagttcttgcgaaataatcgcactacggaggtgccccgattagactccatgaagccccttgaaaagcactattcagtggttctgccaactgtgagtcacagtggctttctatataagaccgctagtgctggaaaactgcttcaggatagacgggcacgggaggaattttcccgccgctggtgcgtgcttggagatggggtcttgagttacttcgaaaacgagcgtgccgtgactccaaacggagaaatcagagccagcgagatcgtttgcttagccgtgcccccacccgatacgcatggcttcgagcacacattcgaggtatacaccgaaggagagcgactgtacttatttggcctggagagcgctgagcaggcacacgagtgggtcaaatgtatagccaaggccttcgtgccccctctggccgaggatctgctggctcgggacttcgaacgtttaggccgactcccctataaagccggattgagtttacagagagcacaggaaggctggtttagcctgtcgggcagcgaacttcgcgcagtgttccccgagggaccatgcgaggaacccctgcagctgcgtaaactgcaggagttgtcaatacagggagactcagagaaccaggtactcgtcctggtggagaggcggcgcactctgtacatccagggggaaagaaggcttgacttcatgggttggctgggcgccatccagaaagcagccgcctctatgggcgacactctcagcgaacagcagctgggagatagcgacatacctgtgatcgtgtatagatgtgtcgactatatcactcagtgtggcctgacatctgagggtatctatagaaagtgtggccagacatccaagacacaaagattgctggaatccctgagacaggacgcccgctcagtgcacttaaaagagggcgagcagcacgttgatgacgtcagttccgcactgaagcgatttttgcgggatctcccggacggactgtttaccagggcccagagactcacttggctggaggcatccgagattgaagacgaggaagaaaaagtgagccggtatcgggaactcctggtcagactgccaccggttaatagggctactgtgaaggctcttatttctcatctgtattgcgtccaatgcttctctgatactaaccagatgaatgtccataaccttgccatcgtcttcgggcccaccttgttccagaccgatggacaggattacaaggccggccgcgtggtggaggatctgattaatcactacgttgtcgtgttctctgtggatgaggaggaactcaggaagcaaagggaagaaatcaccgcgatcgtgaaaatgagggttgcaggaaccgcttctggtactcagcatgccggcgacttcatctgcactgtctatctcgaggaaaagaaggcggagaccgagcagcatatcaaagtgcccgcttcaatgaccgccgaagaactgactctggagatcctggaccgacgcaacgttggaataagagagaaggattactggacctgcttcgaagttaatgaacgtgaggaggcagaaagacctttgcattttgccgagaaagtgctgcccatacttcacggtttgggtacagacagtcacctggttgtgaaaaaacatcaggccatggaagctatgctgctgtatcttgcctcccgcgttggagatactaagcatggcatgatgaagtttagggaagatcgcagcctgcttgggctgggtctgccgtctggcggatttcacgaccgctacttcatcctcaacagcagctgtctacgcctctacaaagaagtgcgcagccatagacccgagaaggagtggccaatcaagtctctcaaggtctatctgggcgttaagaaaaaactcagacccccaacatgctggggcttcaccgttgtccacgaaacagaaaaacacgaaaagcagcagtggtatctttgctgtgacacacagatggaactgagagagtggtttgctacatttttgttcgtccagcacgacggattagtgtggccaagcgagccatcgagggtgagtcgcgcagtgccggaggtgaggctcggaagtgtgagcctaattccactgcgcggaagtgaaaacgaaatgcggcggagcgtcgccgccttcactgccgaccccctctccctgttgaggaatgtctag

SEQ ID NO: 50491 - DNA, 3402 bp, Artificial Sequence
  derived and/or modified sequence
atgaccaagaaggaggagcccccacccagccgggtgcccagggctgtgcgggtggccagcctgctgtctgagggggaggagctgtctggagatgaccagggagatgaggaggaggatgaccacgcctatgaaggagtgcccaacggcggctggcacaccagcagcctgagcctgagcctgcccagcaccatcgccgccccccaccccatggatggccccccaggcggcagcacccctgtgacccctgtgatcaaggccggctggctggacaagaaccccccccagggcagctacatctaccagaagcgctgggtgcggctggacacagaccacctgcgctactttgacagcaacaaggatgcctacagcaagcgcttcatctctgtggcctgcatcagccacgtggccgccatcggggaccagaagtttgaagtcatcaccaacaacagaacatttgccttccgggcagagagtgatgtggagaggaaggagtggatgcaggccctgcagcaggccatggccgagcagagggcccgggcccggctgagcagcgcctacctgctgggcgtgcccggcagcgagcagcctgacagagctggcagcctggagctgcggggcttcaagaacaagctgtatgtggccgtggtgggggacaaggtgcagctgtacaagaacctggaggagtaccacctgggcatcggcatcaccttcatcgacatgtctgtgggcaatgtgaaggaggtggaccggcgcagctttgacctgaccaccccctaccgcatcttctccttctctgctgacagcgagctggagaaggagcagtggctggaggccatgcagggcgccatcgccgaggccctgagcaccagcgaggtggccgagcgcatctgggccgccgcccccaaccgcttctgtgccgactgtggggccccccagcctgactgggccagcatcaacctgtgtgtggtgatctgcaagagatgtgccggggagcaccggggcctgggcgccggcgtgtccaaggtgcgcagcctgaagatggacaggaaggtgtggacagagaccctgattgaggccctgtgtgccgctgtgaccaccacagacctggccgagacccaggccctgctgggctgtggggccggcatcaactgcttcagcggggaccctgaggcccccacccccctggccctggccgagcaggccggccagaccctgcagatggagttcctgaggaacaacagaaccacagaggtgccccggctggacagcatgaagcccctggagaagcactacagcgtggtgctgcccaccgtgagccacagcggcttcctgtacaagacagccagcgctgggaagctgctgcaggacagaagagcccgggaggagttcagccgccgctggtgtgtgctgggagatggagtgctgagctactttgaaaatgaaagagctgtgaccccaaatggagagatccgggccagcgagatcgtgtgcctggccgtgcccccaccagacacccacggctttgagcacacctttgaggtgtacacagaaggagagcggctgtacctgtttggcctggagagcgctgagcaggcccacgagtgggtgaagtgcatcgccaaggcctttgtgccccccctggccgaggacctgctggcccgggactttgagcggctgggccgcctgccctacaaggccggcctgagcctgcagagggcccaggagggctggttcagcctgagcggcagcgagctgcgggctgtgtttcctgagggcccctgtgaggagcccctgcagctgaggaagctgcaggagctgagcatccagggcgacagcgagaaccaggtgctggtgctggtggagaggaggaggaccctgtacatccagggcgagcggcggctggacttcatgggctggctgggcgccatccagaaggctgctgcctccatgggagacaccctgtctgagcagcagctgggggacagcgacatccctgtgattgtgtaccgctgtgtggactacatcacccagtgtggcctgaccagcgagggcatctacagaaaatgtggccagaccagcaagacccagaggctgctggagagcctgcggcaggatgcccggtctgtgcacctgaaggagggggagcagcacgtggatgatgtgtcctctgccctgaagcgcttcctgcgggacctgcctgatggcctcttcacccgggcccagaggctgacctggctggaggccagcgagattgaagatgaggaggagaaggtgagccgctaccgggagctgctggtgcggctgccccctgtgaacagagccaccgtgaaggccctgatcagccacctgtactgtgtgcagtgcttcagtgacaccaaccagatgaatgtgcacaacctggccatcgtgtttggccccaccctcttccagacagatggccaggactacaaggccggccgggtggtggaggacctgatcaaccactacgtggtggtgttttctgtggatgaggaggagctgaggaagcagcgggaggagatcacagccatcgtgaagatgagggtggccggcacagccagcggcacccagcacgccggggacttcatctgcaccgtgtacctggaggagaagaaggccgagacagagcagcacatcaaggtgcctgcctccatgacagctgaggagctgaccctggagatcctggacagaagaaatgtgggcatccgggagaaggactactggacctgctttgaggtgaatgaaagagaggaggccgagcggcccctgcactttgctgagaaggtgctgcccatcctgcacggcctgggcacagacagccacctggtggtgaagaagcaccaggccatggaggccatgctgctgtacctggccagccgggtgggggacaccaagcacggcatgatgaagttcagagaagatagaagcctgctgggcctgggcctgcccagcggcggcttccatgaccgctacttcatcctgaacagcagctgcctgcggctgtacaaggaggtgcgcagccacaggcctgagaaggagtggcccatcaagagcctgaaggtgtacctgggcgtgaagaagaagctgcggccccccacctgctggggcttcaccgtggtgcatgaaacagagaagcatgagaagcagcagtggtacctgtgctgtgacacccagatggagctgcgggagtggtttgccaccttcctgtttgtgcagcatgatggcctggtgtggcccagcgagcccagccgggtgtccagagctgtgcctgaggtgcggctgggctctgtgtccctcatccccctgcggggctctgaaaatgagatgagaagatctgtggccgccttcaccgctgaccccctgagcctgctgagaaatgtgtag

SEQ ID NO: 50492 - DNA, 3402 bp, Artificial Sequence
  derived and/or modified sequence
atgaccaagaaggaggagcccccccccagccgggtgccccgggccgtccgtgtcgcttctttgctctccgagggggaagaactgtcaggggacgaccagggggacgaggaggaggatgatcatgcctatgaaggggttccaaacggaggttggcatacttcctccctgagcctgagtctgccatccaccattgctgcacctcatcctatggacggaccgcccggcggttcgactccagtcacaccggtgataaaggccgggtggctcgacaaaaatcctcctcaggggtcttacatttatcaaaagcggtgggtcaggttagatactgaccatctgaggtacttcgactccaacaaggatgcttatagtaaaagattcatctcagtagcttgcatttcacacgtcgccgcgataggggatcagaaatttgaggttataactaataatcggaccttcgccttccgtgccgaaagcgacgtagaacgaaaggaatggatgcaggccctccagcaggccatggccgagcagcgggctagagctcgtctgagtagcgcatatctgctgggcgtccccggatctgagcagccagacagggctggatccctagaactgagagggttcaagaacaagctctatgtcgcagtcgtgggcgataaggtgcaactttacaaaaatttggaagaataccacttggggatcgggataacgttcatcgacatgtctgtgggcaacgtaaaggaggtagatagacgctcctttgaccttactaccccttacagaatttttagctttagcgctgattccgagctggagaaggaacagtggctcgaggcgatgcagggtgcaatcgccgaagccctatcaacttccgaagtggccgaaaggatatgggccgccgcccctaatcgcttctgtgcggattgcggagctccgcagcccgactgggcgagcattaacctttgtgtggtgatttgcaaacgttgcgcgggagagcacagaggtctcggggccggcgtcagcaaggtgcgatcactcaaaatggatagaaaggtgtggactgagaccttgatagaagctctctgcgctgctgtcacaacaaccgacctggctgagacacaagcattgttaggctgtggcgccggcattaactgtttttctggagatccagaagcacctacaccgctcgccctcgccgagcaggccggccagactcttcaaatggagttcctgcggaataacagaactacagaggtcccacggctggacagcatgaaaccattggagaaacactactctgtggtgctgcccactgtgagccatagcggcttcctttataagactgccagtgcaggcaaactcctccaagaccggcgggcgcgcgaagagttctctaggagatggtgtgtgctcggagacggagtgctgtcctactttgagaatgagagagccgtgactcctaacggcgagatccgggcctctgagatagtctgcctggccgtcccgccaccagacacccatggttttgagcatacctttgaggtgtatacagaaggagaacggctgtacctgttcggcctggagtccgccgaacaggcccacgagtgggtcaaatgtatagcaaaggctttcgtcccaccactggccgaagatctgttggcccgcgattttgagcggttaggccggttgccatataaggccgggctgtcactgcagagggctcaggagggatggttctccctgtcggggtcggaacttcgagcggtttttcccgaggggccctgtgaagaacctctgcaacttaggaaactgcaagagctctccattcagggcgacagcgagaatcaggtgctggttcttgtggagagaaggcggacactctacatacaaggcgagcggaggctcgactttatggggtggttgggcgcgatccagaaagccgcagccagcatgggcgacaccctttctgaacagcagctaggcgatagtgacatccccgtgatcgtctaccgctgcgttgattatatcacacagtgcggcctgacttccgagggcatctataggaagtgtggccagacatctaagacacagaggctgctggaatccctaagacaggatgctagatctgtgcacctgaaggagggagaacagcatgtcgatgatgtcagtagcgccctcaagagattccttcgcgaccttccagatggtttatttactcgcgcacagcgactaacctggctcgaagcctctgagattgaagacgaggaggagaaggtttcaaggtaccgtgagctgctggtacggctacctcctgtgaaccgcgcgactgttaaggccttaattagccatctctattgtgttcaatgtttttctgatactaatcagatgaacgtgcataatcttgccatcgtattcggccctactctattccagactgacggccaggattataaagccggaagagtcgtggaggacctcataaaccactacgtggtcgtgttttcagttgatgaagaggagctgaggaagcagcgggaggaaatcaccgcgattgtgaagatgcgagttgcagggactgcctccggcacccagcacgccggagactttatatgcaccgtgtacttggaagagaaaaaggcggagaccgagcaacatatcaaagtaccagcctctatgactgctgaggaactgaccctggaaattttagataggagaaacgtcgggatccgcgagaaagactattggacatgtttcgaagttaacgagcgtgaagaggccgaaagacctttacattttgccgaaaaggtgctgccaattttgcacgggctcggcaccgactctcacttggtggtcaagaaacatcaggcaatggaagccatgctgctctatcttgctagtcgggttggcgacacaaagcacggcatgatgaagtttcgggaagaccgttcgttgctgggtctgggactccccagtggaggattccacgatcgatatttcatcctgaactccagctgtcttaggctttacaaggaggtcaggtctcacagacctgaaaaggaatggccaatcaaatctctcaaagtctacctgggtgtgaagaagaagctgaggccccccacctgttggggatttacagtcgtacacgagaccgaaaagcacgagaaacaacagtggtacctgtgctgcgatactcagatggaactaagggaatggtttgccacttttctgtttgtgcagcatgacgggctagtgtggccatcagaaccttcacgggtgagcagagcagtacctgaggtgaggctgggcagtgtgagcctcatccccctgagaggaagcgaaaacgagatgaggaggagtgttgccgccttcaccgctgaccctctaagtctgcttaggaacgtctag

SEQ ID NO: 50493 - DNA, 3402 bp, Artificial Sequence
  derived and/or modified sequence
atgacgaagaaagaggagccccctccctccagggtgccacgagccgtgagagttgcctcacttctcagcgagggagaggaactgagcggggatgaccagggggacgaagaggaggatgatcacgcttacgaaggcgtcccaaacggtggatggcacacatcgtctctgtccctttcgcttccttcaactatcgccgcaccccacccaatggacggacctccaggcggatccacgccggtaacacccgttatcaaggccggatggctcgataagaatcccccacagggttcctacatctatcagaagagatgggtgcggttggataccgaccatctgcgctacttcgatagcaacaaagatgcatattcgaaaaggttcatatccgtggcgtgcatatcccatgtggcagctattggcgaccaaaaattcgaagtaatcactaacaataggacatttgcgttcagggccgaatccgatgttgagcgcaaagagtggatgcaggcactgcagcaggccatggcagaacagagagctagggctcggctaagttcagcctatctgctgggagttccaggcagcgagcagcccgatagagcgggttcactagaactgagaggattcaaaaacaagttatatgttgccgtcgttggcgacaaagtccagctgtacaagaacctcgaggagtatcacctgggcattggcataacgtttatcgacatgtccgtcggtaatgtgaaagaagtggaccgcagaagcttcgacctcacgactccatataggatttttagtttttctgctgacagtgagcttgagaaagagcagtggcttgaagctatgcagggagctattgcagaggccctgagtacatcagaagtcgctgaacggatatgggctgctgctccgaatcgcttttgtgccgactgcggggctcctcagccagattgggcctcaataaacctgtgtgtggtgatttgtaagaggtgcgctggcgagcaccggggtttgggcgcaggggtatcgaaggtacggtcgctgaagatggaccggaaggtctggaccgaaaccctcattgaagcattgtgcgcggcagtaactacgactgatcttgcggaaactcaggctcttctgggttgcggagcgggtatcaactgtttctctggagaccctgaagcccctactcctctggccctggccgaacaggcgggacagactctgcaaatggaattcctgcggaataatcggacaactgaggttcccagacttgacagtatgaaacccctggagaagcactatagtgtggtgctaccgacagtttctcattccggctttctgtacaaaaccgccagcgccggtaagcttctgcaagatcggcgagccagagaagaattcagccgcagatggtgtgttctcggggacggggttctttcttactttgagaacgagcgtgcggtaacgccaaatggcgaaatccgcgctagtgagattgtttgcctagcggtgccccctcccgatacccacggattcgaacatacctttgaggtgtacacagagggagaacgtctctatctgtttggcctcgaaagtgccgagcaggctcatgagtgggtcaaatgtattgccaaggccttcgtcccacccctggcggaggacctgctcgctcgggacttcgaacggctgggacggctgccatacaaagccggattaagtcttcaacgggctcaggaaggatggtttagcctgtccggctctgagctgagagccgtgttccccgagggcccatgcgaggaaccactgcagttgcgaaagctgcaggaactgtctatccaaggcgactctgaaaaccaggtgctcgtgctggttgaacgcaggcggaccctgtacatacagggggagaggcggctggactttatgggttggttgggagccatccagaaggcagccgcaagcatgggcgacacattgagtgagcagcagctgggcgattcagacataccagttatcgtgtaccgctgcgtggattatattacccagtgtggtcttacatctgaagggatctatcggaagtgcggccagacatcaaagacccagcggctcctagagtccttgagacaagacgccagatccgtgcatctgaaggagggagagcaacatgttgacgatgtgtcttcagccctgaaaaggttcttgcgggaccttccagacggtcttttcacacgagctcagcggcttacatggttagaagccagcgaaattgaggacgaggaggagaaagttagtcggtaccgtgaactgttggtgagactcccccctgtcaatagggctactgtgaaggccctgatctcccacctgtattgcgtgcagtgtttctcagacaccaaccagatgaacgtgcataatttggcgatcgtgtttggacccaccctcttccagacggatggccaggactacaaggctggccgtgtggttgaggacctgatcaatcactacgtagtggtgttttccgtggacgaagaagaactgaggaagcagagagaggagattaccgccattgtcaagatgagagttgctggaacagccagcggtacccaacatgcaggcgacttcatctgcacagtctatctggaggagaagaaagcggaaacagagcagcacatcaaggttccggcatctatgactgcagaagagctgacgttggagattctggacagacgcaacgttggcatccgggaaaaagactactggacttgtttcgaagttaatgagcgggaggaggctgagagaccattgcatttcgccgagaaagtgttacccatcctgcatggcttggggaccgacagtcatctggtggtgaaaaagcatcaggcaatggaggctatgctgctctacctggcgagtagagtgggcgacaccaaacatggaatgatgaagtttagggaggaccgctcccttctgggcttgggacttcccagtgggggattccatgaccgctacttcattctcaactcctcttgcctgcggctctacaaggaggtgaggtcccataggcccgaaaaagaatggccaatcaaatcactgaaggtatatcttggggtgaaaaagaagctgagaccccctacctgttggggcttcaccgtagtccatgagacggagaagcatgaaaaacaacagtggtatctgtgctgcgatacacaaatggaattgcgagagtggttcgcaacctttctgtttgtgcagcacgacggtcttgtgtggccgagtgaaccgtcaagggtctctagggcagttcccgaggtccgactcggcagcgtgagcctgatccccttaagaggaagtgagaatgagatgcggaggtctgtagccgcttttacggcagaccctttaagcctgcttaggaatgtgtag

SEQ ID NO: 50494 - DNA, 3883 bp, Artificial Sequence
  derived and/or modified sequence
acctccaagagaacgcagcctcagacccacccaggggccaggggccaggctgtttgcgagaccagcccaggcgggacccaggcttgcacgggcaggtacacgacattcttgggcatacgcagcccgcctggccggagctgtgggagtcctcagccccaagacccagcaggcgtctgaggcctgcccactaaggaggaggagtcattgctgccatcattatcatcccctccccagccacagtctgaggagcccctgtccaccctcccccaggggcctccccagcctccctctccacctccctgccccccggagatacctccaaagccggtacgcctgttcccagagttcgatgactctgactacgatgaggtcccagaggaggggccgggggccccagccagagtgatgaccaagaaggaggagcccccaccgagccgagtcccacgggccgtgcgcgtggccagtctgctgagcgagggagaggaactgtctggggacgaccaaggggatgaggaagaggatgaccacgcctatgagggcgtccccaatggcggatggcataccagcagcctgagcttgtccttgcccagcacaatagctgcgccacaccccatggacgggccgcctgggggctccacccccgtcacaccagtcatcaaggctggctggctggacaagaacccaccgcagggatcttacatctatcagaaacgatgggtgagactggatactgatcacctgcgatactttgacagtaacaaggacgcttactctaagcgctttatctctgtggcctgcatctcccacgtggctgccatcggggaccagaagtttgaagtgatcacaaacaaccgaacctttgccttccgggcagagagtgatgtggagcggaaggagtggatgcaggccctgcagcaggccatggctgagcagcgtgcccgggcccggctctctagcgcttatctgctgggagttccaggctcagagcagcctgaccgcgctggcagcctggagcttcgtggcttcaagaataagctgtacgtggccgtggtcggggacaaagtgcagctctacaagaatctagaggagtaccacctgggcattggcatcaccttcatcgacatgagcgtgggcaacgtgaaggaagtggaccggcgcagcttcgacctcaccacgccctaccgcatcttcagcttctctgctgactcagagctagagaaggagcagtggttggaggccatgcagggagccatcgctgaggccctgtctacctcggaggtggccgagcgcatctgggctgcagcccccaacaggttctgtgctgactgcggggctcctcagcctgactgggcctccatcaacctctgtgttgttatctgcaagcgctgtgcaggggagcaccgtggcctgggcgctggcgtctccaaggtgcggagcctgaagatggacaggaaggtgtggacagaaacacttatcgaggccctgtgtgctgcagtcaccaccacagacctggctgagacccaggcgctcctgggctgtggggctgggatcaactgcttctcgggggaccctgaggcccccacgcccctggctcttgcagagcaggcggggcagacgctgcagatggaattccttcggaacaaccggaccacagaggtgcctcggctggactcgatgaagcccctggaaaagcactactcagttgtcctgccgaccgtgagccacagtggcttcctctacaagactgcctctgccggcaagctgctacaggaccgccgggcccgggaagagttcagccggcgctggtgtgtccttggtgacggggtcctgagctactttgagaatgagcgggcagtgacccccaatggagagattcgggccagcgagattgtgtgcctggcagtgccccctcctgacacccatggctttgagcacacctttgaggtgtacacggagggagaacggctgtacctgtttgggctggagagtgcggagcaggctcatgagtgggtcaagtgtattgctaaggcattcgtgcctcccctagccgaggatctgctggcccgggattttgagcggctgggacgcctaccctacaaagctggcctgagcctacagcgggcccaggagggctggttctctctcagtggctcggagctccgtgctgtcttcccggaggggccctgcgaagagccgctgcaactacggaaactgcaggagctttccatccagggggacagtgagaaccaggtgctggtgctggtggagcgaaggaggacactgtacatacagggcgagcggcggctggacttcatgggttggctgggggccatccagaaagcagccgccagcatgggggacacgctgtcggagcagcagcttggggactcggatatcccggtgatcgtgtaccgctgtgtggactacatcacgcagtgcggcctgacctccgagggcatctaccgcaagtgtgggcagacatcgaagacacagcggctgctggagagcctgcggcaggatgcgcgctctgtgcacctcaaggagggcgagcagcacgtggatgatgtttcctcggcgctcaagcgcttcctgcgcgacctgcctgatgggctcttcactcgcgcccagcgcctaacctggctggaggcctcagagattgaggacgaggaggagaaggtctccaggtaccgagagctgctggtgcggctgccccctgtcaaccgggccacagtgaaggcccttatcagccacctgtactgtgttcagtgcttctcagacacgaaccagatgaacgtgcacaacctggcaattgtgtttgggcccacgctcttccagacagatgggcaggactacaaggctggccgtgtggtggaagacctcattaaccactatgtggtggtgtttagtgtggatgaggaagagctcaggaagcagcgggaggagatcactgccattgtgaagatgcgcgtggctggcactgccagtgggacccagcatgccggtgacttcatctgcacagtgtatctggaagagaagaaggcagagactgagcagcatatcaaggtcccagcatccatgactgctgaggagctcaccctggagatcctggatcgccggaacgtgggcatcagggagaaggactattggacctgctttgaggtcaacgagagggaggaggcagagcgccccctgcactttgcggagaaggtgctgcccatcctgcacgggctgggcacggacagccacctggtggtgaagaagcaccaggccatggaggccatgctgctgtacctggccagccgtgtcggtgacaccaagcatggcatgatgaagttccgtgaggaccgcagcctcctgggcctgggcctgccctcaggtggcttccacgatcgctacttcatcctcaacagcagctgcttgcggctctacaaggaggtccggagtcaccggcctgagaaggagtggcctattaagagtctcaaagtctacctgggagtgaagaagaaactcaggccacccacctgctggggcttcacagtggtgcatgagacagagaaacatgagaagcagcagtggtacctctgctgtgacacacagatggagctccgggagtggttcgctacctttctgtttgtgcagcatgacggcctggtgtggccctcagagccctcacgcgtgtcccgggcagtgcctgaggtccggctgggtagtgtgtcactgatcccccttcgaggtagtgaaaatgaaatgcgccggagtgtggctgccttcaccgcggaccctctgtctcttctgcgcaacgtctgagcacaggagcccatccttggctctaggattccgccgctggaagccttctgttcagacaccccttatgctccaaggc

SEQ ID NO: 50495 - DNA, 3402 bp, Artificial Sequence
  derived and/or modified sequence
atgaccaagaaggaggagcccccccccagcagagtgcccagagccgtgagagtggccagcctgctgagcgagggcgaggagctgagcggcgacgaccagggcgacgaggaggaggacgaccacgcctacgagggcgtgcccaacggcggctggcacaccagcagcctgagcctgagcctgcccagcaccatcgccgccccccaccccatggacggcccccccggcggcagcacccccgtgacccccgtgatcaaggccggctggctggacaagaaccccccccagggcagctacatctaccagaagagatgggtgagactggacaccgaccacctgagatacttcgacagcaacaaggacgcctacagcaagagattcatcagcgtggcctgcatcagccacgtggccgccatcggcgaccagaagttcgaggtgatcaccaacaacagaaccttcgccttcagagccgagagcgacgtggagagaaaggagtggatgcaggccctgcagcaggccatggccgagcagagagccagagccagactgagcagcgcctacctgctgggcgtgcccggcagcgagcagcccgacagagccggcagcctggagctgagaggcttcaagaacaagctgtacgtggccgtggtgggcgacaaggtgcagctgtacaagaacctggaggagtaccacctgggcatcggcatcaccttcatcgacatgagcgtgggcaacgtgaaggaggtggacagaagaagcttcgacctgaccaccccctacagaatcttcagcttcagcgccgacagcgagctggagaaggagcagtggctggaggccatgcagggcgccatcgccgaggccctgagcaccagcgaggtggccgagagaatctgggccgccgcccccaacagattctgcgccgactgcggcgccccccagcccgactgggccagcatcaacctgtgcgtggtgatctgcaagagatgcgccggcgagcacagaggcctgggcgccggcgtgagcaaggtgagaagcctgaagatggacagaaaggtgtggaccgagaccctgatcgaggccctgtgcgccgccgtgaccaccaccgacctggccgagacccaggccctgctgggctgcggcgccggcatcaactgcttcagcggcgaccccgaggcccccacccccctggccctggccgagcaggccggccagaccctgcagatggagttcctgagaaacaacagaaccaccgaggtgcccagactggacagcatgaagcccctggagaagcactacagcgtggtgctgcccaccgtgagccacagcggcttcctgtacaagaccgccagcgccggcaagctgctgcaggacagaagagccagagaggagttcagcagaagatggtgcgtgctgggcgacggcgtgctgagctacttcgagaacgagagagccgtgacccccaacggcgagatcagagccagcgagatcgtgtgcctggccgtgcccccccccgacacccacggcttcgagcacaccttcgaggtgtacaccgagggcgagagactgtacctgttcggcctggagagcgccgagcaggcccacgagtgggtgaagtgcatcgccaaggccttcgtgccccccctggccgaggacctgctggccagagacttcgagagactgggcagactgccctacaaggccggcctgagcctgcagagagcccaggagggctggttcagcctgagcggcagcgagctgagagccgtgttccccgagggcccctgcgaggagcccctgcagctgagaaagctgcaggagctgagcatccagggcgacagcgagaaccaggtgctggtgctggtggagagaagaagaaccctgtacatccagggcgagagaagactggacttcatgggctggctgggcgccatccagaaggccgccgccagcatgggcgacaccctgagcgagcagcagctgggcgacagcgacatccccgtgatcgtgtacagatgcgtggactacatcacccagtgcggcctgaccagcgagggcatctacagaaagtgcggccagaccagcaagacccagagactgctggagagcctgagacaggacgccagaagcgtgcacctgaaggagggcgagcagcacgtggacgacgtgagcagcgccctgaagagattcctgagagacctgcccgacggcctgttcaccagagcccagagactgacctggctggaggccagcgagatcgaggacgaggaggagaaggtgagcagatacagagagctgctggtgagactgccccccgtgaacagagccaccgtgaaggccctgatcagccacctgtactgcgtgcagtgcttcagcgacaccaaccagatgaacgtgcacaacctggccatcgtgttcggccccaccctgttccagaccgacggccaggactacaaggccggcagagtggtggaggacctgatcaaccactacgtggtggtgttcagcgtggacgaggaggagctgagaaagcagagagaggagatcaccgccatcgtgaagatgagagtggccggcaccgccagcggcacccagcacgccggcgacttcatctgcaccgtgtacctggaggagaagaaggccgagaccgagcagcacatcaaggtgcccgccagcatgaccgccgaggagctgaccctggagatcctggacagaagaaacgtgggcatcagagagaaggactactggacctgcttcgaggtgaacgagagagaggaggccgagagacccctgcacttcgccgagaaggtgctgcccatcctgcacggcctgggcaccgacagccacctggtggtgaagaagcaccaggccatggaggccatgctgctgtacctggccagcagagtgggcgacaccaagcacggcatgatgaagttcagagaggacagaagcctgctgggcctgggcctgcccagcggcggcttccacgacagatacttcatcctgaacagcagctgcctgagactgtacaaggaggtgagaagccacagacccgagaaggagtggcccatcaagagcctgaaggtgtacctgggcgtgaagaagaagctgagaccccccacctgctggggcttcaccgtggtgcacgagaccgagaagcacgagaagcagcagtggtacctgtgctgcgacacccagatggagctgagagagtggttcgccaccttcctgttcgtgcagcacgacggcctggtgtggcccagcgagcccagcagagtgagcagagccgtgcccgaggtgagactgggcagcgtgagcctgatccccctgagaggcagcgagaacgagatgagaagaagcgtggccgccttcaccgccgaccccctgagcctgctgagaaacgtgtag

SEQ ID NO: 50496 - protein, 961 aa, Artificial Sequence
  derived and/or modified sequence
MPDQISVSEFVAETHEDYKAPTASSFTTRTAQCRNTVAAIEEALDVDRMVLYKMKKSVKAINSSGLAHVENEEQYTQALEKFGGNCVCRDDPDLGSAFLKFSVFTKELTALFKNLIQNMNNIISFPLDSLLKGDLKGVKGDLKKPFDKAWKDYETKITKIEKEKKEHAKLHGMIRTEISGAEIAEEMEKERRFFQLQMCEYLLKVNEIKIKKGVDLLQNLIKYFHAQCNFFQDGLKAVESLKPSIETLSTDLHTIKQAQDEERRQLIQLRDILKSALQVEQKEDSQIRQSTAYSLHQPQGNKEHGTERNGSLYKKSDGIRKVWQKRKCSVKNGFLTISHGTANRPPAKLNLLTCQVKTNPEEKKCFDLISHDRTYHFQAEDEQECQIWMSVLQNSKEEALNNAFKGDDNTGENNIVQELTKEIISEVQRMTGNDVCCDCGAPDPTWLSTNLGILTCIECSGIHRELGVHYSRMQSLTLDVLGTSELLLAKNIGNAGFNEIMECCLPAEDSVKPNPGSDMNARKDYITAKYIERRYARKKHADNAAKLHSLCEAVKTRDIFGLLQAYADGVDLTEKIPLANGHEPDETALHLAVRSVDRTSLHIVDFLVQNSGNLDKQTGKGSTALHYCCLTDNAECLKLLLRGKASIEIANESGETPLDIAKRLKHEHCEELLTQALSGRFNSHVHVEYEWRLLHEDLDESDDDMDEKLQPSPNRREDRPISFYQLGSNQLQSNAVSLARDAANLAKEKQRAFMPSILQNETYGALLSGSPPPAQPAAPSTTSAPPLPPRNVGKDPLTPTPPPPVAKTPSVMEALSQPSKPAPPGISQIRPPPLPPQPPSRLPQKKPAPGADKSTPLTNKGQPRGPVDLSATEALGPLSNAMVLQPPAPMPRKSQATKLKPKRVKALYNCVADNPDELTFSEGDVIIVDGEEDQEWWIGHIDGDPGRKGAFPVSFVHFIAD

SEQ ID NO: 50497 - DNA, 2886 bp, Artificial Sequence
  derived and/or modified sequence
atgcccgaccagatcagcgtgagcgagttcgtggccgagacccacgaggactacaaggcccccaccgccagcagcttcaccaccagaaccgcccagtgcagaaacaccgtggccgccatcgaggaggccctggacgtggacagaatggtgctgtacaagatgaagaagagcgtgaaggccatcaacagcagcggcctggcccacgtggagaacgaggagcagtacacccaggccctggagaagttcggcggcaactgcgtgtgcagagacgaccccgacctgggcagcgccttcctgaagttcagcgtgttcaccaaggagctgaccgccctgttcaagaacctgatccagaacatgaacaacatcatcagcttccccctggacagcctgctgaagggcgacctgaagggcgtgaagggcgacctgaagaagcccttcgacaaggcctggaaggactacgagaccaagatcaccaagatcgagaaggagaagaaggagcacgccaagctgcacggcatgatcagaaccgagatcagcggcgccgagatcgccgaggagatggagaaggagagaagattcttccagctgcagatgtgcgagtacctgctgaaggtgaacgagatcaagatcaagaagggcgtggacctgctgcagaacctgatcaagtacttccacgcccagtgcaacttcttccaggacggcctgaaggccgtggagagcctgaagcccagcatcgagaccctgagcaccgacctgcacaccatcaagcaggcccaggacgaggagagaagacagctgatccagctgagagacatcctgaagagcgccctgcaggtggagcagaaggaggacagccagatcagacagagcaccgcctacagcctgcaccagccccagggcaacaaggagcacggcaccgagagaaacggcagcctgtacaagaagagcgacggcatcagaaaggtgtggcagaagagaaagtgcagcgtgaagaacggcttcctgaccatcagccacggcaccgccaacagaccccccgccaagctgaacctgctgacctgccaggtgaagaccaaccccgaggagaagaagtgcttcgacctgatcagccacgacagaacctaccacttccaggccgaggacgagcaggagtgccagatctggatgagcgtgctgcagaacagcaaggaggaggccctgaacaacgccttcaagggcgacgacaacaccggcgagaacaacatcgtgcaggagctgaccaaggagatcatcagcgaggtgcagagaatgaccggcaacgacgtgtgctgcgactgcggcgcccccgaccccacctggctgagcaccaacctgggcatcctgacctgcatcgagtgcagcggcatccacagagagctgggcgtgcactacagcagaatgcagagcctgaccctggacgtgctgggcaccagcgagctgctgctggccaagaacatcggcaacgccggcttcaacgagatcatggagtgctgcctgcccgccgaggacagcgtgaagcccaaccccggcagcgacatgaacgccagaaaggactacatcaccgccaagtacatcgagagaagatacgccagaaagaagcacgccgacaacgccgccaagctgcacagcctgtgcgaggccgtgaagaccagagacatcttcggcctgctgcaggcctacgccgacggcgtggacctgaccgagaagatccccctggccaacggccacgagcccgacgagaccgccctgcacctggccgtgagaagcgtggacagaaccagcctgcacatcgtggacttcctggtgcagaacagcggcaacctggacaagcagaccggcaagggcagcaccgccctgcactactgctgcctgaccgacaacgccgagtgcctgaagctgctgctgagaggcaaggccagcatcgagatcgccaacgagagcggcgagacccccctggacatcgccaagagactgaagcacgagcactgcgaggagctgctgacccaggccctgagcggcagattcaacagccacgtgcacgtggagtacgagtggagactgctgcacgaggacctggacgagagcgacgacgacatggacgagaagctgcagcccagccccaacagaagagaggacagacccatcagcttctaccagctgggcagcaaccagctgcagagcaacgccgtgagcctggccagagacgccgccaacctggccaaggagaagcagagagccttcatgcccagcatcctgcagaacgagacctacggcgccctgctgagcggcagccccccccccgcccagcccgccgcccccagcaccaccagcgccccccccctgccccccagaaacgtgggcaaggaccccctgacccccaccccccccccccccgtggccaagacccccagcgtgatggaggccctgagccagcccagcaagcccgccccccccggcatcagccagatcagacccccccccctgcccccccagccccccagcagactgccccagaagaagcccgcccccggcgccgacaagagcacccccctgaccaacaagggccagcccagaggccccgtggacctgagcgccaccgaggccctgggccccctgagcaacgccatggtgctgcagccccccgcccccatgcccagaaagagccaggccaccaagctgaagcccaagagagtgaaggccctgtacaactgcgtggccgacaaccccgacgagctgaccttcagcgagggcgacgtgatcatcgtggacggcgaggaggaccaggagtggtggatcggccacatcgacggcgaccccggcagaaagggcgccttccccgtgagcttcgtgcacttcatcgccgactag

SEQ ID NO: 50498 - DNA, 2886 bp, Artificial Sequence
  derived and/or modified sequence
atgcctgatcagattagcgtgagcgaatttgtggccgagacacacgaagactataaggctcccaccgcatcttcttttaccaccaggactgcccagtgcaggaacaccgtagcggccatcgaagaggctctcgacgttgaccgcatggttctgtataaaatgaaaaagtctgtcaaggccatcaactcttccggtctggctcatgtcgaaaacgaggaacagtacacgcaggccctggaaaagtttggaggcaattgcgtatgtcgtgatgatcccgatttgggatcagcattcctcaaattctcagtttttacaaaggaactgaccgccctgttcaagaatttgatccagaacatgaacaatataattagctttcccctcgattcactgttgaagggggatctaaagggggtcaaaggggatctgaaaaaacccttcgataaggcctggaaagactacgagaccaagattacgaagatcgagaaggagaaaaaggagcacgcaaaactccacggcatgattcggaccgagatctctggcgccgagattgcagaagaaatggagaaagagaggcggttttttcagctccagatgtgtgagtatcttctaaaagtgaatgaaatcaaaatcaagaaaggcgtagatctgctgcagaacttaattaagtactttcacgctcaatgcaattttttccaggatggactcaaggctgtggaaagtctcaagccctcaatcgaaactttgtccaccgacttacatacgattaagcaggcccaggatgaagagcgtcggcagctgattcaattaagggatattctcaaatctgcacttcaagtggagcagaaggaagacagtcagattcgccagagcaccgcgtactcactgcatcagcctcagggcaacaaggagcatggaaccgaacgtaatggatccctatacaagaaatccgacggaatccgtaaagtttggcagaagaggaaatgttcggtgaagaatggttttctgactatatcacacgggacagccaatcgtcctcccgccaaactgaacctgttaacctgtcaagtgaagacgaaccctgaagaaaagaagtgctttgacttaataagccacgacaggacttaccacttccaggcagaggacgaacaggaatgtcagatctggatgagtgtgctgcagaactccaaggaagaggccctgaataatgccttcaagggggatgataataccggggaaaacaatattgtccaggaactgacaaaggagattatcagcgaggtgcagcggatgactggaaatgacgtgtgttgcgactgtggggcccctgatcctacctggctgagtaccaatctaggcatattaacctgtatagaatgttccgggattcatagggagctaggggtccactactcgcgtatgcagtctctaacactggacgtgctggggacaagcgagctactcctggcaaagaatatcgggaacgctggcttcaacgagatcatggaatgctgcctgccggctgaagactctgttaagcccaacccaggatcggacatgaatgcccgcaaggattacatcacagccaaatacatagagcggcggtatgcgcggaaaaagcatgctgacaacgccgctaaactgcatagcctctgtgaagcagttaaaacccgtgacatttttggacttctccaagcctacgctgatggtgtggatctgaccgagaagataccgctagcaaatggtcatgaacctgacgaaacagctttgcatctggcggtccggtctgtggatcggacttcacttcacattgtggattttcttgtgcagaacagcggtaacctggataaacagactggaaagggcagcaccgccctgcactactgttgcctcaccgacaacgccgagtgtctgaaattgttgcttcgggggaaggcatccattgaaatcgctaatgagtccggggagacccctctagacattgccaagcggctgaaacacgagcattgtgaggaactgctgacccaggccctcagcggaagattcaactctcacgtgcatgtggaatacgaatggcgcctcttacacgaagacttagacgagagcgacgatgatatggatgagaaactgcagccttccccgaaccgtcgggaggacaggcccattagcttctaccagctgggatcgaaccagttgcagtctaacgcggtgtcccttgcaagggacgccgccaacctggcaaaggaaaaacagcgcgccttcatgccgtctattctgcagaacgaaacctacggggccctgctatccggaagtcctcctcccgcccagccggctgccccttctaccaccagcgctcctccactccctccaagaaacgtaggcaaagatccacttacccccactcctcccccaccagtcgccaaaacccccagcgttatggaagctctctcacagccttccaaacccgccccccccggcattagccagattcgtcccccccctcttcccccccaacctccttcccgtctcccccagaagaaacccgcacccggggccgataagtctacccctcttactaataagggacagccacgtggcccagtcgatttgtcagctactgaggccctcggtccattgtcaaacgccatggtgctgcagccccctgcccccatgccccgcaagtcccaggctacaaagctgaagcctaagcgtgtgaaagccctctacaactgtgtggccgataacccggatgagctgactttctctgaaggcgatgttatcatcgtggacggggaagaggaccaggagtggtggattggtcacattgacggggatcccggtagaaagggagccttccctgtcagcttcgtccatttcatagcggactag

SEQ ID NO: 50499 - DNA, 2886 bp, Artificial Sequence
  derived and/or modified sequence
atgccagaccagatctctgtgtctgaatttgtggccgagacccatgaggactacaaggcccccacagccagcagcttcaccaccaggacagcccagtgcaggaacacagtggccgccatcgaggaggccctggatgtggacaggatggtgctgtacaagatgaagaagtctgtgaaggccatcaacagcagcggcctggcccacgtggagaatgaggagcagtacacccaggccctggagaagtttggaggcaactgtgtgtgcagagatgatcctgacctgggcagcgccttcctgaagttcagcgtcttcaccaaggagctgacagccctcttcaagaacctgatccagaacatgaacaacatcatctccttccccctggacagcctgctgaagggggacctgaagggcgtgaagggggacctgaagaagccctttgacaaggcctggaaggactatgagaccaagatcaccaagattgagaaggagaagaaggagcacgccaagctgcacggcatgatcagaacagagatctctggagctgagattgctgaggagatggagaaggagcggcgcttcttccagctgcagatgtgtgagtacctgctgaaggtgaatgagatcaagatcaagaagggcgtggacctgctgcagaacctgatcaagtacttccacgcccagtgcaacttcttccaggacggcctgaaggctgtggagagcctgaagcccagcattgagaccctgagcacagacctgcacaccatcaagcaggcccaggatgaggagcggcggcagctgatccagctgcgggacatcctgaagagcgccctgcaggtggagcagaaggaggacagccagatccggcagagcacagcctacagcctgcaccagccccagggcaacaaggagcacggcacagaaagaaatggcagcctgtacaagaagagtgatggcatcaggaaggtgtggcagaagaggaaatgttctgtgaagaatggcttcctgaccatcagccatggaacagccaacagacctccagccaagctgaacctgctgacctgccaggtgaagaccaaccctgaggagaagaagtgctttgacctgatcagccatgacaggacctaccacttccaggccgaggatgagcaggagtgccagatctggatgtctgtgctgcagaacagcaaggaggaggccctgaacaatgccttcaagggagatgacaacacaggagagaacaacatcgtgcaggagctgaccaaggagatcatcagcgaggtgcagaggatgactggaaatgatgtgtgctgtgactgtggggccccagaccccacctggctgagcaccaacctgggcatcctgacctgcatcgagtgcagcggcatccaccgggagctgggcgtgcactacagcaggatgcagagcctgaccctggatgtgctgggcaccagcgagctgctgctggccaagaacattggaaatgccggcttcaatgagatcatggagtgctgcctgcctgctgaggacagcgtgaagcccaaccctggcagtgacatgaatgccaggaaggactacatcacagccaagtacattgaaagaagatatgccaggaagaagcatgctgacaatgctgccaagctgcacagcctgtgtgaggccgtgaagacccgggacatcttcggcctgctgcaggcctatgcagatggagtggacctgacagagaagatccccctggccaacggccacgagccagatgaaacagccctgcacctggccgtgcgctctgtggacaggaccagcctgcacatcgtggacttcctggtgcagaacagcggcaacctggacaagcagacaggcaagggcagcacagccctgcactactgctgcctgacagacaatgcagaatgtctgaagctgctgctgcggggcaaggccagcattgaaattgccaatgaaagtggagagacccccctggacatcgccaagaggctgaagcatgagcactgtgaggagctgctgacccaggccctgagcggccgcttcaacagccacgtgcacgtggagtatgagtggaggctgctgcacgaggacctggatgaaagtgatgatgacatggatgagaagctgcagcccagccccaacagaagagaagatcggcccatctccttctaccagctgggcagcaaccagctgcagagcaatgctgtgtccctggccagagatgctgccaacctggccaaggagaagcagagggccttcatgcccagcatcctgcagaatgagacctatggagccctgctgagcggcagccccccaccagcccagcctgctgcccccagcaccaccagcgccccacccctgcccccaagaaatgtgggcaaggaccccctgacccccaccccacctcctcctgtggccaagacccccagcgtgatggaggccctgagccagcccagcaagccagcccctcctggcatcagccagatccggcccccacccctgcccccccagccccccagccggctgccccagaagaagccagcccctggagctgacaagagcacccccctgaccaacaagggccagccccggggccctgtggacctgagcgccacagaggccctgggccccctgagcaatgccatggtgctgcagcccccagcccccatgcccaggaagagccaggccaccaagctgaagcccaagagggtgaaggccctgtacaactgtgtggccgacaacccagatgagctgaccttctctgaaggagatgtgatcatcgtggatggagaggaggaccaggagtggtggattggccacattgatggagaccccggcaggaagggggccttccctgtgtcctttgtgcacttcatcgctgactag

SEQ ID NO: 50500 - DNA, 2886 bp, Artificial Sequence
  derived and/or modified sequence
atgcccgaccagatcagcgtgagcgagttcgtggccgagacccacgaagattacaaggccccaaccgctagttcctttacgacccggactgcccaatgtcgtaacacggtagctgctattgaagaggcactcgacgtggacagaatggttttgtataaaatgaagaagagcgtgaaagccataaattccagtggtctggcccatgtggagaacgaggagcagtacactcaggctcttgaaaaattcggggggaactgtgtgtgtcgcgacgatccagacctcggatcagcctttcttaagttctccgtgtttacaaaggagctaaccgccttatttaagaatttgatccaaaacatgaataatatcatttcgtttcctctcgactctcttctgaagggtgatctaaagggagtgaaaggcgacctgaaaaaaccctttgataaagcctggaaggattacgaaacaaagatcactaagattgaaaaggagaagaaagaacacgctaagctacatgggatgattcggacagagatttccggcgctgaaatcgcagaggagatggagaaagagcgtcggttttttcagctgcagatgtgtgagtacctgctaaaggtgaatgagattaagatcaagaagggagtcgacctgttgcaaaatctgattaaatactttcacgcgcaatgtaatttctttcaggatggcctgaaggctgtggaaagtctcaaaccttcgatcgagacactttccaccgatctgcataccatcaagcaagcacaggacgaagaacggagacaattgatacagctgagagacatcttgaagagcgcccttcaggtggagcagaaggaagattcacaaatccgccaatcaactgcttatagtctgcatcagcctcaaggaaataaagaacacgggactgagagaaacggctctctctataagaaatctgacgggatcagaaaggtgtggcagaaacgaaaatgtagtgttaagaatggttttctgacgattagccatggcacagccaatcgcccccccgctaaactgaatctcctgacatgccaagttaaaaccaatccagaggagaaaaagtgtttcgacctcatttctcacgaccggacataccactttcaggcggaggatgaacaggagtgccagatttggatgtcagtgttgcaaaatagcaaggaggaggccctgaacaatgccttcaagggcgacgacaatacaggcgaaaacaacattgtgcaagagctgacaaaggaaatcatcagcgaggttcagagaatgacaggcaatgatgtctgctgcgattgtggtgctcccgatcccacctggctatcaaccaacctgggaatcttaacttgcatagaatgtagcggaatccacagagaattaggtgtgcactacagcagaatgcagtcactgactctggacgtcttaggcacgtccgagttgctcctggccaagaacatcggtaacgctggtttcaatgagataatggaatgctgcttacccgccgaggatagtgtcaagcctaaccctggctccgatatgaacgctaggaaagattacattaccgcaaagtatatcgaaagacgctatgcacggaaaaagcacgccgacaacgccgctaagctgcactctctgtgtgaggctgtcaagactagagatatcttcggtctcctgcaggcctacgccgatggcgtggatctcacagagaagattccattggccaacggccatgagcccgacgaaacagctctccatctggcagtgcggtccgtggaccggacatctctccacatcgtggacttcttggtccagaacagcggcaacctcgataaacaaacgggaaagggatctactgcacttcactattgctgcctgaccgataatgcagagtgtcttaagctattactgcgcggcaaagcctctattgagattgccaacgaaagcggcgaaacgcctcttgacattgctaaaaggttgaagcatgagcactgcgaggaactgctgacacaggcactatctgggcgtttcaatagccacgtgcacgtagagtacgagtggcggttgctccacgaggacctggacgaatctgacgacgatatggacgagaaattgcagccctcgccaaataggagagaggatagacctatttccttctaccaactgggaagtaatcagctccagagcaacgccgtgtcacttgcgcgagacgcggccaatctggccaaggaaaaacagcgcgccttcatgcccagcatcttgcaaaacgaaacctatggtgctctgctaagtgggtcccctcctcccgcccagccagcggctccttccaccactagtgcgccccccctccctccacgaaacgtcggtaaggacccactgactccgactccacctcctccagttgcaaaaaccccgtccgtgatggaggcattatcccagcccagtaagccagcacccccaggcatttctcaaatcagacctcctcctcttccaccgcagccgccctcccgcttaccgcagaaaaagcctgcgcccggcgcggacaagtccacccccttgacaaataagggtcagcccagaggcccagtcgatctcagcgctaccgaagcattgggccctctgtccaacgcgatggtccttcaaccgcccgctcccatgccaagaaagtcccaagctactaagcttaagcccaagcgcgtcaaggccttatacaactgtgtggccgataatccagacgagctgaccttttcagagggagacgtaataattgttgacggggaggaggatcaagagtggtggatcggacacatcgacggggaccctggcagaaagggagcttttccagtctcctttgtgcactttatagcggattag

SEQ ID NO: 50501 - DNA, 5582 bp, Artificial Sequence
  derived and/or modified sequence
cgcccctctccgcgggaggcgtcggggcccgcggctgggtggcgggtagttcccgccggctgtgcgcgcccgcctcggggctcgctctgagaggacgcggcggcagcggactcggagccctcggcgcgcaggcgggcggaccggccgagctgcgcggggctgcgcgccgcccctgctccgccgccaggccccgcgcggctcccgcgcccggcgctcccctttgtccgcgggccggagcggcggcggcagcggcggtgtccgagcggcggtcggagcctgctgcggcagttgaggcggcggcgcccctgcggctgtgcgccagcgccctcgcgccgaggcgatgccggaccagatctccgtgtcggaattcgtggccgagacccatgaggactacaaggcgcccacggcctccagcttcaccacccgcacggcgcagtgccggaacactgtggcggccatcgaggaggctttggacgtggaccggatggttctttacaaaatgaagaaatccgtgaaagcaatcaacagctctgggctggctcacgtggaaaatgaagagcagtacacccaggctctggagaagtttggcggcaactgtgtatgcagagatgacccagatttaggaagtgcgttcctgaagttctcagtgtttacaaaggagttgacagcacttttcaaaaacctgattcagaatatgaacaacataatctccttccctttggacagtttgctgaagggggacctgaaaggagtgaaaggggatctgaaaaagccttttgataaagcttggaaggactatgaaacaaaaataaccaagatagaaaaggagaaaaaggaacacgccaagctccatgggatgattcggactgaaataagcggagcggaaattgccgaagagatggaaaaggagaggcgcttcttccagctacagatgtgcgagtatctgctgaaggtcaacgaaatcaagattaaaaagggagtagatttacttcagaatctgatcaaatactttcatgcccaatgcaatttttttcaggatggactcaaagccgtggaaagcctcaaaccttccattgaaacgctgtctacggatcttcacacgatcaaacaggcccaggatgaagaaagaaggcagttgatacagcttcgagatattttgaaatccgcattgcaggttgaacagaaagaggactcccaaattcgtcagagcacagcttatagcttacatcagcctcagggaaacaaggaacatgggaccgagcggaacggcagcctctacaagaagagtgacgggatccgaaaagtgtggcagaaaaggaaatgttcagttaaaaatggttttctgaccatatcccatggtaccgctaaccggcctcctgcaaagctcaacctgctaacctgccaggtgaagaccaaccctgaggagaagaagtgctttgacctcatttcacatgacagaacttaccactttcaagctgaagatgaacaggaatgtcaaatatggatgtctgtgctgcaaaatagcaaagaagaagctttaaacaatgcatttaagggggatgacaatactggagaaaataacatcgtccaagaactgacaaaggagatcatctcagaagtgcagaggatgacgggcaatgacgtctgctgtgactgtggggcgccagatcctacatggctttccaccaacctgggcatcctgacctgcatcgagtgttccggaatccaccgagagctgggggttcattattccaggatgcagtccctgaccttagatgtactgggaacatctgagctgctgctcgccaagaatattgggaatgcaggctttaatgagatcatggaatgttgcctaccagctgaggactcagtcaaacccaacccaggcagcgacatgaatgcaagaaaggactacatcacagccaagtacatcgagaggagatacgcaaggaagaagcacgcggataacgcggcgaagcttcacagtctttgcgaggccgtcaaaacgagagatatttttggattgctccaagcttatgctgatggtgtggatcttacggaaaaaatcccactggccaacggacatgagccggatgaaacggccctccaccttgcagtcagatccgtggatcgaacctctcttcacattgtagactttttagttcagaacagtgggaacctggataaacagacagggaaaggcagcacagccctgcactactgctgcctgaccgacaatgccgagtgcctcaagttgctcctgcgggggaaggcctccatcgagatagcaaacgagtcaggagagactccgctggacattgccaagcgcctcaagcacgagcactgtgaggagctgctgacccaagccttatctggaagatttaattctcacgttcacgttgaatatgaatggcgactactccacgaagacctggatgaaagtgatgacgacatggatgagaaattgcagcccagtcccaaccggcgggaagaccggcccatcagcttctaccagctgggctccaaccagcttcagtctaacgctgtatctttggccagagatgctgcaaaccttgccaaggagaagcagagggctttcatgcccagcatcttgcagaatgagacttacggagccctcctgagtggcagcccacctcccgcccagcctgcagcccccagcaccaccagcgcccccccgcttcctccacggaatgttggcaaagatcccctgacccccacgccgcccccacccgttgccaagacgcccagcgtaatggaagccttgagccagccgagcaagcctgccccgcctgggatctcacagatcaggcccccacctctgcccccacagccgcccagccgcctcccgcagaagaagcctgcgccgggggctgacaagtccaccccactgaccaacaaaggccaaccgagaggacctgtggatctctctgcaacggaagctctgggtcctctgtccaatgctatggtcctgcagccccctgcacccatgcctaggaagtcgcaggcaaccaagttgaagcctaagcgggtgaaagcgctctataactgtgtggctgacaaccccgatgagctcaccttctccgagggggatgtgatcatcgtggacggggaggaggaccaggagtggtggattggccacattgatggagatcctggtcgcaaaggcgcattcccggtgtcatttgtgcactttatcgctgactgaattgctactgaacaaaagcattaacagttatgttcctgtttcgttattggtaccaaaactcttgccagataaccagtttcatgaactgtttgtatggcagcccatgttctctaatgccactgctctgttttaaaaactcagaggcaatttttacatatcagtaattgtttttataatttgtggttttcatgaaacattgctatgcatttattaggaaaaactgaatttcccaacaggtgaactgaaaagttattttaactattatacataatcaagatcctgcctctacggaattagctaaacctaaaaatgtttgcattaatgaataaattcttcctgcattccttggcccagttctggagttggtgacctttatcacaattattattttaggcggccagtgaactgctgcttcagaagtccatagcccagctctgaactttctcgataaaatgccatcagttcacctttaaagacacacattcctttgaaatccacccagtgtttaaaaagcaacttggaaatttacacattagcattgtactttctagccctaatttgtgaggttgcagctatcattatattctgcatgtatgtataacctgttgtgaacaatcatacttaacaaaactactgatggtttatgacaacgtagggtaactacagttcattctgttccaggttatataaaactgcatttcctgaatttggttaaaaactaaggatgatggattgcaaaacagttcttttaaattagtttatatgctttaggtgttttggaatttgccttcttgaacttcctgagtcacacagaaagcaactgtacacagtagaattctgtggcgcagaccatgctgtattaacacatcacttgctgtttcctactgagtgtaccactgccttcccttctagcccaggagaatgtttactcagtttagtgtcttgtatttctataatactccaacaggaatggtagtcacactgtcttgaaattgaatctgtccatctgtttataatcaagaacatatcagaaatatataggtcccaggtaatactcccaaacatcccactttttactgtttcaggccatcatatcattcttaagctacttggggtggtagtagaggattaggttgtctattataaaaccaaaactcattcgtttaatgaacttgactgtcatacctctatttagtaattgcgagggtaagattcatagtaggaatattggaaattttggcactctgagaataaataggcatatgatacccacttggacttttaacaaaagtaaaggaataaatttgcatataggcttggaaagtgaggcagcaatgctgttaactgcatttgttgtgatggtgcatttgattgaagcagcttgtctttattatgcaagactgtgtagagttttttttttttttggcattgtactttttgtttttgttataaaggaagacagaacaaactggaatgttttatgatgttgtatagcaatcgctttttacctttcaaagttccgggtaaaaatgtgttatatctgtagttttttgtttttgtttttttttaaagcactacatctgttttcactaattgttaatttctgtttgaacccttcatttaattttctcatagatttaagtaaacagatgtattttgcacagtgcacttatgtctattttaacaatcctcctgcatctgtattttatagtcagccttttgaccacctggtgccagctatataaggaataaagttgattcatatcaacattagaactccagtcccaaactaatctgtcaggttcactggtacataaatacctaggaaatatttttccagtctacaatttggtgctattgtgcagtaactaatagtactcttaccagaggagaaattatattaacgaccctgctaatatcctttcttagttatttgctccttgcaaattaaaaaagcaactaagagaaagaaaaacattgtagatatctatttatatttaaagtttatgtttcatgaactgcagctgcaggattctggcattttgcatgccattctccatcagatctgggatgatggctcagaacatgtacacagactaagagtaactgtgtgatctgttaaggggtggataacataatatgcagcttaggatgctattttgagatgtatgatattcagttcattcacctgattactttggttgcagcacaactgtatatattgtataaccgaaattgattattttcattgtccttaatgcagtgatttataattagagcatgtttaataagtttactcttcttgttaactagtcatttgactggaaaaaaataaaatacttttaaatggacatgg

SEQ ID NO: 50502 - DNA, 2886 bp, Artificial Sequence
  derived and/or modified sequence
atgcctgatcagattagcgttagcgaatttgtagctgaaacgcatgaggactacaaggcccctacagcatctagcttcacaacacggactgcacagtgcaggaataccgtcgccgctattgaagaggccctcgatgtggaccgcatggttctgtacaagatgaaaaagtccgttaaagccatcaacagctccggcctggctcacgtcgagaacgaggagcagtatacgcaggctttagaaaagtttgggggaaactgtgtgtgtcgagatgaccctgacttgggctccgcgtttctcaaatttagtgtctttactaaggagcttactgccctttttaaaaaccttattcaaaatatgaataacatcataagtttcccactcgactcattactgaagggagacctgaagggcgtgaaaggagatctgaaaaagccttttgacaaagcctggaaggattacgagaccaagattaccaagattgagaaggagaaaaaggagcacgctaagttacatggcatgatccggacagaaatcagcggcgcagagatcgccgaggaaatggaaaaagagagaagattctttcaattacaaatgtgtgaatatctactgaaggtgaacgagattaaaattaagaagggcgtggacttgctacagaatttaatcaagtacttccacgcccagtgtaatttctttcaggatggactgaaagccgtggagtccctgaaaccttcaatagagaccctgtcgaccgatctccacacaattaagcaggcccaagacgaggaaaggcgccagctcattcagctgcgtgacatcctgaagagcgccttgcaggtcgagcagaaggaagacagccagattcgccagtccaccgcctattctctgcaccagccacagggaaataaagagcacggcaccgagagaaacggctcattgtacaagaaatctgatgggattcggaaggtgtggcagaagcggaaatgttctgtcaagaatggatttttgaccattagccatggcactgcaaacagaccacccgcaaagttgaatctgttaacctgtcaggtgaagaccaatcccgaggaaaaaaagtgttttgatctgatcagccatgaccgaacttaccacttccaggccgaagatgagcaagaatgccaaatttggatgtctgtgctccaaaattccaaggaggaagccctaaataacgccttcaaaggcgacgataacacaggagaaaataatatcgttcaggagcttacaaaggagatcatcagcgaagttcaacgcatgaccggaaacgacgtctgctgcgattgcggagctccagatcccacctggctctcaactaatctaggcattctgacatgcatcgagtgcagtggcatccacagagaactgggagtgcactatagtaggatgcaatctctgacactggacgtcctgggcacctccgaactgctgctggccaagaatatcggcaacgctggtttcaatgagatcatggagtgctgcctccccgctgaggactctgtgaaaccaaaccctgggtctgacatgaacgccaggaaggattatattaccgcaaaatatatcgagaggcgttatgcaaggaagaagcacgccgataatgctgccaaattgcattccctgtgtgaggcggtcaagacaagagatatattcggtctcttgcaagcctatgccgatggagtggatctgaccgagaaaataccactcgcaaatggccatgagcctgatgaaactgccctgcacttggccgtgcgcagcgtggataggacctccttgcacatagttgactttctggtccaaaacagcgggaacctggacaagcagacagggaaggggtccacagccttgcattactgttgtctgactgataatgctgaatgcctcaagctcttgcttaggggcaaagcctctatcgaaattgcaaatgagtcaggggagacacccttggacatagcaaagcggttaaagcacgagcattgtgaagaactgctgacacaggccctttccggccgattcaatagtcacgtgcacgtggagtacgaatggcgcctccttcacgaagacctggacgaaagtgacgacgatatggacgagaaactgcagccaagtccaaaccgtcgcgaggaccggccaattagcttttaccagttgggctccaaccagctgcagtctaacgctgtttctctggctagagacgcggcaaacctggccaaagagaaacagcgagccttcatgccatccattctccagaacgagacatacggtgcactactgtccggctctcccccaccggcacagccggctgcaccttcaacaacctcggcacctcctctgccacccaggaatgttggaaaggaccccctgactcctaccccccctccaccggtggccaagactccctcagtgatggaggccctgtcgcagccctcaaagcccgcacctccagggatttcccaaataagaccacctcctctgccaccacaacctcctagtagactaccacagaagaagccggctccaggcgctgacaagtctacgcccctgaccaacaagggccagcccaggggccctgttgatctgtcagccactgaggccctgggaccactgagtaacgcaatggtgctgcaacccccagccccaatgccccgtaagtctcaggcaaccaagctgaagccaaagagggtgaaggcgttgtacaattgcgtggctgataaccctgatgaactgacattcagcgaaggtgatgtcatcattgtggatggtgaagaggatcaggagtggtggataggccacattgacggcgatccagggcgtaagggtgctttccctgtttcctttgtccatttcattgctgactag

SEQ ID NO: 50503 - protein, 322 aa, Artificial Sequence
  derived and/or modified sequence
MSASSWPQNGMPPSSLYERLSQRMLDISGDRGVLKDVIREGAGDLVAPDASVLVKYSGYLEHMDRPFDSNYFRKTPRLMKLGEDITLWGMELGLLSMRRGELARFLFKPNYAYGTLGCPPLIPPNTTVLFEIELLDFLDCAESDKFCALSAEQQDQFPLQKVLKVAATEREFGNYLFRQNRFYDAKVRYKRALLLLRRRSAPPEEQHLVEAAKLPVLLNLSFTYLKLDRPTIALCYGEQALIIDQKNAKALFRCGQACLLLTEYQKARDFLVRAQKEQPFNHDINNELKKLASCYRDYVDKEKEMWHRMFAPCGDGSTAGES

SEQ ID NO: 50504 - DNA, 1446 bp, Artificial Sequence
  derived and/or modified sequence
atgtttcgtgcgcttccattacggatcatacctcgcacctcaccgcgtggcctctgtagttccagagctcgcgagggccagggccgttggcggcggttggaacgaaacgatgagtgcctcctcgtggccccagaatggaatgccgccgtcgtccctgtacgagcggttaagtcagaggatgctggacatctcgggggaccggggcgtgctgaaggacgtcatccgagaaggagctggagacctagtggcgcctgatgcttcggtgctagtgaaatactcgggatacctggaacacatggacagacccttcgattctaattactttaggaaaactcctcggctaatgaaacttggagaggatattacactgtggggcatggagctgggccttctgagcatgcggagaggagagctggccaggtttctgttcaaaccgaactacgcctatggaacgctgggctgccctcccttgatccccccaaacaccactgtcctgtttgagattgagctgcttgacttcctggactgtgctgagtcagacaagttttgtgctctctcagctgagcagcaagaccaatttccacttcagaaggtcctgaaagtggcagctacggaacgggagtttggcaactaccttttccgccagaatcgtttctatgatgccaaagtgagatataaaagggccctgttgcttctgcgccggcgatcagcaccccctgaagagcagcacctggtggaggccgccaagcttcctgttctcctgaacctgtcctttacatacctgaagctagaccgacccaccatagccctgtgctatggagagcaggctttgatcattgaccaaaagaatgccaaggccctcttcaggtgtggacaggcttgtcttctcctgactgagtatcaaaaggcccgggattttctagttcgagcccagaaggagcaacccttcaatcatgacatcaataatgagctgaagaaactggctagctgttacagggactatgtggataaagagaaagaaatgtggcaccgcatgttcgcgccctgtggcgatggttctacagcaggagaaagttgaaggttcttcacctaccaacgaggggagagagctgtggttctccatcattgggggagtggaagggagctcccagcgcagccgtggcagccaccttccaggagcaggggctggaatgtcctgtggccgcatctctcatggacgcggctgaaacgtgttttcacaggtgctgttttctgttttccgtgttcgtaacagaagggaggggaaagcgcagctactgacaagtagaacactgctactttttttaaggcagtttcttgtttttttagacggaattagtccttggcttccctcccagtcccagccctgcttccggctgcgaatgtccctgagtcaacaccaatagagattgctttgtgtattttgta

SEQ ID NO: 50505 - DNA, 969 bp, Artificial Sequence
  derived and/or modified sequence
atgtcagctagctcctggccccagaacggaatgccaccaagtagcctttacgagcgcttatctcagaggatgttggatatcagtggggatcggggtgtgcttaaagacgtgatcagagaaggtgcgggtgatctggtggccccagatgcatccgtgttggtaaagtactccggctatttggaacatatggatagaccatttgattcgaattattttaggaaaacaccgcgtctgatgaagctcggagaggatattaccctttgggggatggagttaggtttgctttccatgcgccggggcgaactggcccgctttctgtttaaacctaactacgcctatggcactctggggtgtccaccgctgataccccccaatacaactgtgctctttgagatcgagctcctcgacttcctggactgcgcggaaagcgataagttctgtgctctctctgcggagcagcaggatcagtttcctctgcagaaggtgttgaaggttgcggcaacagaacgggagtttggaaactatctgttcagacagaataggttttatgatgccaaggtcagatacaagagagcattattgctcctgcggcgtcgatcagcaccaccggaggagcagcaccttgtcgaggctgctaagctgcccgtgctgctcaacctgtcgttcacttacctcaaactagacaggcctaccattgcgctctgctatggcgagcaagccctcatcatcgaccagaagaacgccaaagccctcttccggtgtgggcaagcttgtctgctacttaccgagtaccagaaggccagggattttctcgtgcgcgctcagaaggagcagcctttcaatcatgacatcaacaatgaactcaaaaagctggcttcctgttatagagactatgtggataaggagaaagagatgtggcatcgaatgttcgccccatgcggcgatggctctaccgctggagaaagttag

SEQ ID NO: 50506 - DNA, 969 bp, Artificial Sequence
  derived and/or modified sequence
atgtctgccagctcctggccccagaatggcatgccacccagcagcctgtatgagcggctgagccagaggatgctggacatcagcggggaccggggcgtgctgaaggatgtgatccgggagggcgctggggacctggtggccccagatgcctctgtgctggtgaagtacagcggctacctggagcacatggaccggccctttgacagcaactacttcaggaagaccccccggctgatgaagctgggggaggacatcaccctgtggggcatggagctgggcctgctgtccatgagaagaggagagctggcccgcttcctgttcaagcccaactatgcctacggcaccctgggctgccccccactcatcccccccaacaccaccgtgctgtttgaaattgagctgctggacttcctggactgtgccgagagtgacaagttctgtgccctgtctgctgagcagcaggaccagttccccctgcagaaggtgctgaaggtggccgccacagagcgggagtttggaaactacctgttccggcagaaccgcttctatgatgccaaggtgcgctacaagagggccctgctgctgctgcggcggcgcagcgcccctcctgaggagcagcacctggtggaggccgccaagctgcctgtgctgctgaacctgtccttcacctacctgaagctggaccggcccaccatcgccctgtgctacggggagcaggccctgatcatcgaccagaagaatgccaaggccctcttccgctgtggccaggcctgcctgctgctgacagagtaccagaaggcccgggacttcctggtgcgggcccagaaggagcagcccttcaaccacgacatcaacaatgagctgaagaagctggccagctgctacagagattatgtggacaaggagaaggagatgtggcacaggatgtttgccccctgtggagatggcagcacagctggggagagctag

SEQ ID NO: 50507 - DNA, 969 bp, Artificial Sequence
  derived and/or modified sequence
atgagcgccagcagctggccccagaacggcatgccccccagcagcctttatgagcggttatcacagagaatgttggatatttccggagatagaggagttttgaaagacgtgattcgggagggggccggggacctggttgctccagacgcctccgttctggttaaatacagcgggtatttggaacacatggatcgacccttcgacagcaactacttccgcaagacccctagactgatgaagctcggggaagacattacgctctgggggatggagctgggactgctttcaatgagacgaggagaactagctagattcctgttcaagccaaactacgcctacggaaccttgggttgtccaccactgatcccccctaatacgaccgtgttattcgaaatcgagctgctagatttcttagactgcgccgaaagtgataaattctgcgctttgagcgcagaacagcaagaccagtttccgctgcagaaggtgttgaaggtcgcagccacagagcgcgagttcgggaactatctttttagacagaataggttttacgatgctaaagtccgctacaaacgcgcgctgttactactgcggagacggagcgcgccgcctgaagaacaacacctggtggaggcagcgaaactgcccgtgctcctgaatctgtcctttacctacctgaagttggatcggcccactattgcgctttgttacggcgagcaggctttgattattgaccagaaaaacgctaaggcactgtttaggtgtggtcaggcttgcctgcttctgacggagtatcagaaggcaagagattttcttgttcgcgcccaaaaagagcagcctttcaaccacgacatcaataacgagctgaagaaactggcttcatgttaccgagactacgttgacaaagaaaaagagatgtggcatcggatgtttgcaccctgcggcgatggcagcacagcgggcgaatcctag

SEQ ID NO: 50508 - DNA, 969 bp, Artificial Sequence
  derived and/or modified sequence
atgtctgcaagcagttggcctcaaaatgggatgcctccttcatcgctgtacgagcggctcagccaaaggatgttggatatcagcggggaccgcggagtcttaaaagacgtaatcagagaaggagccggagacctagtggcccctgatgcatctgtgcttgtgaagtactcaggctacctggagcatatggaccgcccttttgacagcaattattttaggaaaacgccacgactcatgaaactgggtgaggatatcaccctgtggggaatggaactgggcctgctctcgatgagaagaggcgaattggctagattcctctttaagccgaattatgcctacggaacattaggctgtcctcccctgataccacccaacactacagtcctgtttgagatagagctgctcgacttcttggattgcgctgaaagcgacaaattctgcgctctgtcagccgagcagcaggaccagtttccactccagaaggtgctgaaggtcgcagccaccgaaagggagtttggaaattatttgtttaggcagaacagattctacgatgccaaggtccggtataagcgtgccctgctgttgctgcggagacgttcagcgcctccagaagaacaacatctggtcgaggccgctaaactgcctgtcctgttgaatctatccttcacgtacctgaaactggatcgacctactattgctctttgttacggcgagcaggctttaatcatcgatcagaagaatgcaaaggcactgtttaggtgcggtcaggcctgcctgctacttaccgagtatcaaaaggccagggattttctggtccgggctcagaaggaacagccgttcaaccacgacattaacaatgaactcaaaaaattagcaagctgttaccgtgactacgtcgacaaagaaaaggaaatgtggcatagaatgttcgctccttgcggggatggatctacggctggcgagtcctag

SEQ ID NO: 50509 - DNA, 969 bp, Artificial Sequence
  derived and/or modified sequence
atgagcgccagcagctggccccagaacggcatgccccccagcagcctgtacgagagactgagccagagaatgctggacatcagcggcgacagaggcgtgctgaaggacgtgatcagagagggcgccggcgacctggtggcccccgacgccagcgtgctggtgaagtacagcggctacctggagcacatggacagacccttcgacagcaactacttcagaaagacccccagactgatgaagctgggcgaggacatcaccctgtggggcatggagctgggcctgctgagcatgagaagaggcgagctggccagattcctgttcaagcccaactacgcctacggcaccctgggctgcccccccctgatcccccccaacaccaccgtgctgttcgagatcgagctgctggacttcctggactgcgccgagagcgacaagttctgcgccctgagcgccgagcagcaggaccagttccccctgcagaaggtgctgaaggtggccgccaccgagagagagttcggcaactacctgttcagacagaacagattctacgacgccaaggtgagatacaagagagccctgctgctgctgagaagaagaagcgccccccccgaggagcagcacctggtggaggccgccaagctgcccgtgctgctgaacctgagcttcacctacctgaagctggacagacccaccatcgccctgtgctacggcgagcaggccctgatcatcgaccagaagaacgccaaggccctgttcagatgcggccaggcctgcctgctgctgaccgagtaccagaaggccagagacttcctggtgagagcccagaaggagcagcccttcaaccacgacatcaacaacgagctgaagaagctggccagctgctacagagactacgtggacaaggagaaggagatgtggcacagaatgttcgccccctgcggcgacggcagcaccgccggcgagagctag

SEQ ID NO: 50510 - protein, 221 aa, Artificial Sequence
  derived and/or modified sequence
MPKTMHFLFRFIVFFYLWGLFTAQRQKKEESTEEVKIEVLHRPENCSKTSKKGDLLNAHYDGYLAKDGSKFYCSRTQNEGHPKWFVLGVGQVIKGLDIAMTDMCPGEKRKVVIPPSFAYGKEGYEGKIPPDATLIFEIELYAVTKGPRSIETFKQIDMDNDRQLSKAEINLYLQREFEKDEKPRDKSYQDAVLEDIFKKNDHDGDGFISPKEYNVYQHDEL

SEQ ID NO: 50511 - DNA, 666 bp, Artificial Sequence
  derived and/or modified sequence
atgcccaagaccatgcacttcctgttcagattcatcgtgttcttctacctgtggggcctgttcaccgcccagagacagaagaaggaggagagcaccgaggaggtgaagatcgaggtgctgcacagacccgagaactgcagcaagaccagcaagaagggcgacctgctgaacgcccactacgacggctacctggccaaggacggcagcaagttctactgcagcagaacccagaacgagggccaccccaagtggttcgtgctgggcgtgggccaggtgatcaagggcctggacatcgccatgaccgacatgtgccccggcgagaagagaaaggtggtgatcccccccagcttcgcctacggcaaggagggctacgagggcaagatcccccccgacgccaccctgatcttcgagatcgagctgtacgccgtgaccaagggccccagaagcatcgagaccttcaagcagatcgacatggacaacgacagacagctgagcaaggccgagatcaacctgtacctgcagagagagttcgagaaggacgagaagcccagagacaagagctaccaggacgccgtgctggaggacatcttcaagaagaacgaccacgacggcgacggcttcatcagccccaaggagtacaacgtgtaccagcacgacgagctgtag

SEQ ID NO: 50512 - DNA, 666 bp, Artificial Sequence
  derived and/or modified sequence
atgcccaagaccatgcacttcctgttcagattcatcgtctttttttatctgtgggggttgttcactgcacagcgacagaaaaaagaggagtctaccgaagaagtaaaaatcgaggttttgcacagacctgaaaattgtagcaaaacttctaagaagggcgatctgctaaatgcccactatgatgggtacctggccaaggatggatccaaattctattgctcccgtacccaaaatgagggccacccgaaatggttcgtactaggggtgggtcaggtgataaaagggctcgacattgccatgactgatatgtgccctggcgaaaaaagaaaggtcgtgataccacccagcttcgcctacgggaaggaaggatacgaaggcaagatccctccagacgccactctgatctttgagatcgagttatatgcagtaaccaagggaccgagaagcatcgagacgtttaagcagattgacatggacaatgatagacagctatccaaggctgagatcaacctttacttacaacgagagtttgaaaaagacgaaaagcccagagacaagtcatatcaggacgcagtcttggaggatatttttaaaaaaaatgatcacgacggagacggcttcatctctcccaaggagtataatgtgtaccagcacgacgagctctag

SEQ ID NO: 50513 - DNA, 666 bp, Artificial Sequence
  derived and/or modified sequence
atgccaaaaaccatgcatttcttattcagattcattgttttcttttatctgtggggcctttttactgctcagagacaaaagaaagaggagagcaccgaagaagtgaaaatagaagttttgcatcgtccagaaaactgctctaagacaagcaagaagggagacctactaaatgcccattatgacggctacctggctaaagacggctcgaaattctactgcagccggacacaaaatgaaggccaccccaaatggtttgttcttggtgttgggcaagtcataaaaggcctagacattgctatgacagatatgtgccctggagaaaagcgaaaagtagttatacccccttcatttgcatacggaaaggaaggctatgaaggcaagattccaccggatgctacattgatttttgagattgaactttatgctgtgaccaaaggaccacggagcattgagacatttaaacaaatagacatggacaatgacaggcagctctctaaagccgagataaacctctacttgcaaagggaatttgaaaaagatgagaagccacgtgacaagtcatatcaggatgcagttttagaagatatttttaagaagaatgaccatgatggtgatggcttcatttctcccaaggaatacaatgtataccaacacgatgaactatag

SEQ ID NO: 50514 - DNA, 666 bp, Artificial Sequence
  derived and/or modified sequence
atgcccaagaccatgcacttcctgttccgcttcatcgtgttcttctacctgtggggcctcttcaccgcccagaggcagaagaaggaggagagcacagaggaggtgaagattgaggtgctgcacaggcctgagaactgcagcaagaccagcaagaagggggacctgctgaatgcccactatgatggctacctggccaaggatggcagcaagttctactgcagcaggacccagaatgaaggccaccccaagtggtttgtgctgggcgtgggccaggtgatcaagggcctggacatcgccatgacagacatgtgccctggagagaagaggaaggtggtgatcccccccagctttgcctacggcaaggagggctatgagggcaagatccccccagatgccaccctcatctttgaaattgagctgtatgctgtgaccaagggccccaggagcattgagaccttcaagcagattgacatggacaatgaccggcagctgagcaaggccgagatcaacctgtacctgcagcgggagtttgagaaggatgagaagccccgggacaagagctaccaggatgctgtgctggaggacatcttcaagaagaatgaccatgatggagatggcttcatcagccccaaggagtacaacgtgtaccagcatgatgagctgtag

SEQ ID NO: 50515 - DNA, 666 bp, Artificial Sequence
  derived and/or modified sequence
atgcccaagaccatgcacttcctgttccggttcatcgtgttcttctacctttggggactgttcactgcgcaacgccaaaaaaaggaagaatctaccgaggaagttaaaatagaagtactgcatagacctgagaactgtagcaagacctctaagaaaggagatttattaaatgctcactacgacgggtatttggccaaggatggctcgaagttttactgttctcgaacccagaatgaggggcatccaaagtggttcgttctgggtgtcggacaggtgatcaaggggctagatattgccatgactgacatgtgccctggcgagaagcggaaggtcgtgattccacctagctttgcctacgggaaagaggggtacgaaggcaagatccctcccgacgctactctgatttttgagatcgaactttacgccgttactaagggacctcggagcattgagaccttcaaacagatcgacatggacaacgatcgacagctctctaaggctgaaatcaatctgtacctgcagagagaattcgagaaggacgaaaagcctcgggataagtcctaccaggacgcagtcctcgaagacattttcaagaagaacgaccatgatggggatgggttcatctcacccaaggaatacaacgtttaccagcatgacgaactctag

SEQ ID NO: 50516 - DNA, 666 bp, Artificial Sequence
  derived and/or modified sequence
atgcctaagacaatgcactttctgtttagatttatagtgttcttttacttgtggggcctgtttacagctcagcgccagaaaaaggaagaaagcactgaagaagtgaagatcgaggtcttacataggccagaaaactgctcaaagaccagcaagaaaggcgacctactcaacgcccactatgacggctacttagctaaagacggttctaagttttattgttccaggacacagaacgaggggcatcccaagtggtttgtgctgggcgtcggccaggtcatcaaaggtttggatattgccatgacagatatgtgccccggagaaaagcggaaagttgtaatacctccctccttcgcttatggcaaggaaggttatgaagggaagatcccacccgatgccaccctgatcttcgaaatcgagctgtacgccgtgaccaagggcccacgatccattgagacgtttaagcagatagatatggacaatgacagacagttaagcaaagctgagatcaacctttatctccaacgcgagtttgagaaggacgagaagcctcgagataaaagctatcaggacgccgtgctggaagacatatttaagaaaaacgatcacgacggggatggctttatctccccaaaggaatataacgtatatcagcatgatgaactgtag

SEQ ID NO: 50517 - protein, 681 aa, Artificial Sequence [sequence omitted]

SEQ ID NO: 50518 - protein, 681 aa, Artificial Sequence
  derived and/or modified sequence
MSKRLRSSEVCADCSGPDPSWASVNRGTFLCDECCSVHRSLGRHISQVRHLKHTPWPPTLLQMVETLYNNGANSIWEHSLLDPASIMSGRRKANPQDKVHPNKAEFIRAKYQMLAFVHRLPCRDDDSVTAKDLSKQLHSSVRTGNLETCLRLLSLGAQANFFHPEKGNTPLHVASKAGQILQAELLAVYGADPGTQDSSGKTPVDYARQGGHHELAERLVEIQYELTDRLAFYLCGRKPDHKNGQHFIIPQMADRRLSLDLSELAKAAKKKLQSLSNHLFEELAMDVYDEVDRRETDAVWLATQNHSALVTETTVVPFLPVNPEYSSTRNQGRQKLARFNAHEFATLVIDILSDAKRRQQGSSLSGSKDNVELILKTINNQHSVESQDNDQPDYDSVASDEDTDLETTASKTNRQKLQTLQSENSNLRKQATTNVYQVQTGSEYTDTSNHSSLKRRPSARGSRPMSMYETGSGQKPYLPMGEASRPEESRMRLQPFPAHASRLEKQNSTPESDYDNTPNDMEPDGMGSSRKGRQRSMVWPGDGLVPDTAEPHVAPSPTLPSTEDVIRKTEQITKNIQELLRAAQENKHDSYIPCSERIHVAVTEMAALFPKKPKSDMVRTSLRLLTSSAYRLQSECKKTLPGDPGSPTDVQLVTQQVIQCAYDIAKAAKQLVTITTKENNN

SEQ ID NO: 50519 - DNA, 2046 bp, Artificial Sequence
  derived and/or modified sequence
atgagcaagcgcctccgttcatccgaagtgtgcgccgactgctcggggccggacccttcttgggcaagcgtgaatcgcggcacattcctgtgcgatgaatgttgcagtgtgcatcggagcctggggcgccatatctcacaggttcgacatctgaaacatacaccctggcccccaactttgctccagatggtggaaactctgtataataatggtgcaaatagcatctgggaacacagtttgctagatcctgcgagcattatgtccggaaggaggaaagctaaccctcaggataaagttcatcccaataaggcggagtttataagagccaagtaccaaatgctcgcttttgtgcatagactgccgtgcagggacgatgattctgtgaccgcgaaggacctgtctaagcagttacacagcagcgtaaggacaggtaaccttgagacttgtcttcgcctgctgagtctgggtgctcaggcgaactttttccatcccgaaaagggcaatactccactgcacgttgcctctaaggctggacagattctccaggctgaacttctcgctgtttacggagctgatccaggcacccaggactcttctggcaagacccctgtcgattacgcccggcaggggggccatcacgagctcgccgagagactcgtggagatccagtacgagctgaccgaccggttggccttttatctttgcgggcggaaaccagatcataagaacggccagcatttcataatcccccagatggctgatcggaggtcctctctggacctctcggaactagctaaggccgctaagaagaagctacaaagcttgagcaaccacctctttgaggaactcgctatggacgtctacgatgaggtggacagaagggagacggacgctgtgtggcttgcaacacaaaatcatagcgcacttgtaactgagaccactgtcgtgccgttcttaccggtcaaccctgaatacagctccacccgaaatcaagggcgccaaaaactagccaggttcaatgctcacgaattcgcgactttggtcatagatatactcagcgacgccaagcggcgacagcaggggtcctcattgagcgggtccaaagacaatgtcgagctgatcctaaagactatcaataatcaacattctgtggagtcccaggacaatgaccagccagactacgactcggttgcttctgacgaggatacagacctggagaccacagcttcgaaaactaatagacagaaactccagacgcttcaaagcgagaattcaaatctgcgcaagcaggctacaacgaatgtgtatcaagtgcaaactggatctgaatataccgatacctccaatcacagcagcctaaagaggagaccctccgcccgtgggtcaagacccatgtccatgtatgagacgggtagtggacagaaaccatacttgccaatgggcgaagcatcaagaccagaggaatcgaggatgcgcctccagccctttccagctcatgcttctcgcctggaaaagcagaattcaacccctgaaagtgattatgacaataccccaaatgacatggagcccgacggcatgggaagttcgcgcaagggtaggcagagaagtatggtgtggcccggagatgggttggtgcctgatactgcggaacctcatgtggctccttctcccacgttaccatcaaccgaagatgtcataagaaaaaccgagcagattacaaaaaacattcaagaacttttgcgcgccgcccaggagaacaagcacgattcctacatcccatgctctgaaaggatacatgtggcagtcaccgagatggctgccctgtttcccaaaaagccgaagagcgatatggtaagaacatcactacggctacttacatccagcgcctatcgtctccagagcgaatgcaagaaaacattaccaggcgaccctggttcacctactgatgtacagctcgtgacccaacaggtaatccagtgcgcatacgatatagccaaggctgcaaagcagctagtgactattactacaaaagagaataacaattag

SEQ ID NO: 50520 - DNA, 2046 bp, Artificial Sequence
  derived and/or modified sequence
atgagcaagcggctgcgcagctcagaagtatgcgccgattgttcagggcctgatccttcctgggcctctgtaaaccgcgggacattcctttgtgatgagtgctgctccgttcaccgttctctgggtcgccatatcagtcaagtccgacacttgaagcacaccccatggccacctacacttctgcagatggtggagactctgtataataatggagccaactctatttgggagcattcactgctggatcctgcatccatcatgagtggtcggcgcaaagctaatccacaggataaggtgcatccaaataaggcggagtttatcagggccaagtatcagatgttggcctttgtgcatcgtctgccttgccgcgacgatgactccgtcaccgccaaagatctaagtaaacaacttcacagcagcgtcaggaccggcaatttggaaacctgcctgcgcctcctgtctcttggtgcccaggcaaatttctttcaccccgaaaaagggaacacccccctgcacgtggccagtaaggccgggcagattctgcaggcagagctgcttgcagtgtacggagcagacccaggcacccaagatagctcgggcaagacacctgttgactatgcacggcagggcggccatcatgagctggcagagagactggtggagatccagtacgagctcacagaccggctggctttctatctatgtggacggaagcctgatcataaaaatggccagcactttattatcccacagatggccgataggaggctgagtcttgacctgagcgagcttgctaaggccgcaaagaagaaactccaatcactgtccaaccacctgtttgaggaactagccatggatgtatacgacgaggtggatagacgggaaacggatgcagtgtggctcgccacacagaaccactcagccctcgtgacggagactactgtggtcccattcttaccagttaaccctgagtactctagcacccggaaccaaggtcgtcagaagttagccagattcaacgcccatgaatttgcaacccttgttattgatatcctgagtgacgcaaagcggaggcaacagggctccagcctgtcgggtagcaaagacaacgtggagctaatactgaagactatcaataaccagcactcggtggagtcccaggacaatgaccaacccgactatgacagcgtagctagcgatgaggatacagatctcgagacaactgccagtaagacaaatcgccagaaactgcagaccttgcagagcgagaattctaatttacggaagcaggctactacaaatgtgtatcaggttcagacagggtccgagtacaccgacacctcgaatcactccagtctgaaaaggagaccctcagcgagaggctctcggcccatgtcaatgtacgagacaggcagcgggcagaagccctatctgcccatgggcgaggcttctagaccagaagagagtcggatgcggctgcagccctttccagcgcacgcaagccgattggagaagcagaattcaacccctgagagtgactatgacaacactcctaacgacatggagcccgatggaatgggaagctcacggaaggggcgccagcgtagcatggtgtggccaggcgatggcctggtccctgacacggcagaaccacacgtcgcaccatcccccactctgcctagcactgaagatgtgatcaggaagaccgaacagatcacaaagaatatccaggaacttttaagagctgctcaggaaaacaagcatgacagctatattccctgttctgagcgcattcacgtggccgtgaccgagatggccgccttgttcccgaagaagcccaaaagtgatatggtacgcacctcgctccgactcttaacttccagcgcctacagattacagagtgagtgtaagaaaaccctccccggagatccagggagccccaccgacgtgcagctcgtgacccagcaggtgatacaatgtgcatatgacattgccaaggctgctaaacagctggtaactattacgaccaaggagaacaataattag

SEQ ID NO: 50521 - DNA, 2046 bp, Artificial Sequence
  derived and/or modified sequence
atgagcaagaggctgcggagcagcgaggtgtgtgccgactgcagcggccctgaccccagctgggcctctgtgaacagaggcaccttcctgtgtgatgagtgctgcagcgtgcacaggagcctgggccgccacatcagccaggtgcgccacctgaagcacaccccctggccacccaccctgctgcagatggtggagaccctgtacaacaacggggccaacagcatctgggagcacagcctgctggaccctgccagcatcatgagcggccgcaggaaggccaacccccaggacaaggtgcaccccaacaaggccgagttcatccgggccaagtaccagatgctggcctttgtgcaccggctgccctgcagagatgatgattctgtgacagccaaggacctgagcaagcagctgcacagctctgtgaggactggaaacctggagacctgcctgcggctgctgagcctgggcgcccaggccaacttcttccaccctgagaagggcaacacccccctgcacgtggccagcaaggccggccagatcctgcaggccgagctgctggccgtgtatggagctgaccccggcacccaggacagcagcggcaagacccctgtggactatgcccggcagggcggccaccacgagctggccgagcggctggtggagatccagtatgagctgacagaccggctggccttctacctgtgtggcaggaagccagaccacaagaatggccagcacttcatcatcccccagatggctgacagaagaagcagcctggacctgtctgagctggccaaggccgccaagaagaagctgcagagcctgagcaaccacctgtttgaggagctggccatggatgtgtatgatgaggtggacagaagagaaacagatgctgtgtggctggccacccagaaccacagcgccctggtgacagagaccaccgtggtgcccttcctgcctgtgaaccctgagtacagcagcaccaggaaccagggccggcagaagctggcccgcttcaatgcccacgagtttgccaccctggtgattgacatcctgagtgatgccaagaggcggcagcagggcagcagcctgagcggcagcaaggacaacgtggagctgatcctgaagaccatcaacaaccagcacagcgtggagagccaggacaatgaccagcctgactatgacagcgtggccagtgatgaggacacagacctggagaccacagccagcaagaccaaccggcagaagctgcagaccctgcagagcgagaacagcaacctgaggaagcaggccaccaccaacgtgtaccaggtgcagacaggcagcgagtacacagacaccagcaaccacagcagcctgaagagaagacccagcgcccggggcagccggcccatgtccatgtatgagaccggcagcggccagaagccctacctgcccatgggagaggccagcaggcctgaggagagcaggatgaggctgcagcccttccctgcccacgccagccggctggagaagcagaacagcaccccagagagtgactatgacaacaccccaaatgacatggagccagatggcatgggcagcagcaggaagggccggcagaggtccatggtgtggccaggagatggcctggtgcctgacacagctgagccccacgtggcccccagccccaccctgcccagcacagaagatgtgatcaggaagacagagcagatcaccaagaacatccaggagctgctgcgggccgcccaggagaacaagcatgacagctacatcccctgcagcgagcgcatccacgtggccgtgacagagatggccgccctcttccccaagaagcccaagagtgacatggtgaggaccagcctgcggctgctgaccagcagcgcctaccgcctgcagagcgagtgcaagaagaccctgcccggggaccccggcagccccacagatgtgcagctggtgacccagcaggtgatccagtgtgcctatgacatcgccaaggccgccaagcagctggtgaccatcaccaccaaggagaacaacaactag

SEQ ID NO: 50522 - DNA, 2046 bp, Artificial Sequence
  derived and/or modified sequence
atgagcaagaggctgcggagcagcgaggtgtgtgccgactgcagcggccctgaccccagctgggcctctgtgaacagaggcaccttcctgtgtgatgagtgctgcagcgtgcacaggagcctgggccgccacatcagccaggtgcgccacctgaagcacaccccctggccacccaccctgctgcagatggtggagaccctgtacaacaacggggccaacagcatctgggagcacagcctgctggaccctgccagcatcatgagcggccgcaggaaggccaacccccaggacaaggtgcaccccaacaaggccgagttcatccgggccaagtaccagatgctggcctttgtgcaccggctgccctgcagagatgatgattctgtgacagccaaggacctgagcaagcagctgcacagctctgtgaggactggaaacctggagacctgcctgcggctgctgagcctgggcgcccaggccaacttcttccaccctgagaagggcaacacccccctgcacgtggccagcaaggccggccagatcctgcaggccgagctgctggccgtgtatggagctgaccccggcacccaggacagcagcggcaagacccctgtggactatgcccggcagggcggccaccacgagctggccgagcggctggtggagatccagtatgagctgacagaccggctggccttctacctgtgtggcaggaagccagaccacaagaatggccagcacttcatcatcccccagatggctgaccggcggctgagcctggacctgtctgagctggccaaggccgccaagaagaagctgcagagcctgagcaaccacctgtttgaggagctggccatggatgtgtatgatgaggtggacagaagagaaacagatgctgtgtggctggccacccagaaccacagcgccctggtgacagagaccaccgtggtgcccttcctgcctgtgaaccctgagtacagcagcaccaggaaccagggccggcagaagctggcccgcttcaatgcccacgagtttgccaccctggtgattgacatcctgagtgatgccaagaggcggcagcagggcagcagcctgagcggcagcaaggacaacgtggagctgatcctgaagaccatcaacaaccagcacagcgtggagagccaggacaatgaccagcctgactatgacagcgtggccagtgatgaggacacagacctggagaccacagccagcaagaccaaccggcagaagctgcagaccctgcagagcgagaacagcaacctgaggaagcaggccaccaccaacgtgtaccaggtgcagacaggcagcgagtacacagacaccagcaaccacagcagcctgaagagaagacccagcgcccggggcagccggcccatgtccatgtatgagaccggcagcggccagaagccctacctgcccatgggagaggccagcaggcctgaggagagcaggatgaggctgcagcccttccctgcccacgccagccggctggagaagcagaacagcaccccagagagtgactatgacaacaccccaaatgacatggagccagatggcatgggcagcagcaggaagggccggcagaggtccatggtgtggccaggagatggcctggtgcctgacacagctgagccccacgtggcccccagccccaccctgcccagcacagaagatgtgatcaggaagacagagcagatcaccaagaacatccaggagctgctgcgggccgcccaggagaacaagcatgacagctacatcccctgcagcgagcgcatccacgtggccgtgacagagatggccgccctcttccccaagaagcccaagagtgacatggtgaggaccagcctgcggctgctgaccagcagcgcctaccgcctgcagagcgagtgcaagaagaccctgcccggggaccccggcagccccacagatgtgcagctggtgacccagcaggtgatccagtgtgcctatgacatcgccaaggccgccaagcagctggtgaccatcaccaccaaggagaacaacaactag

SEQ ID NO: 50523 - DNA, 2046 bp, Artificial Sequence
  derived and/or modified sequence
atgagcaagcggctgcggagcagcgaggtgtgcgccgactgcagcggccctgatccttcttgggcctctgtcaatcgcggcacattcctgtgtgatgagtgttgctcagtgcaccgctcgctgggcagacatataagccaggtcaggcacctgaagcacactccctggccccccactctcctccagatggtcgaaacattgtacaacaacggtgccaacagtatttgggagcactcccttctggaccccgcctctataatgagcggtcggcgcaaggccaatccccaggacaaagtgcatcccaacaaagcagagtttatcagggctaaataccagatgctggccttcgtgcacaggctcccttgccgagatgatgacagcgtgaccgcaaaggacttaagcaagcaactgcattcatccgttagaaccggaaacctcgagacttgcctccggctgctctccctgggcgctcaggctaactttttccacccagagaagggcaacacccctctgcacgtcgccagtaaggcaggacagattctccaggcagagttactggctgtgtacggagcggaccctggtacacaggattcatctgggaaaactccggtggactatgcaagacaaggcggccatcacgaattggccgaaaggctggtggaaatccagtatgaactcacagaccgcctcgctttttacctctgtggacgcaaaccggaccacaagaacggccagcacttcattatcccccagatggccgacagaaggtcttctctggacctgagtgagcttgccaaggcagcaaagaaaaaactgcaatccctgtccaatcacctgttcgaggaactcgccatggacgtgtacgatgaagtggacagacgggagacagacgccgtctggctcgccactcaaaatcactcagccctggtcacagagaccacagtggtacccttcttgcctgtcaacccggaatattcctctaccagaaatcaggggcgccagaagttagcaaggttcaatgcccatgagttcgctaccttagtgattgacatcttgagcgacgcaaaacggcgtcagcaaggttcctccctttcaggaagcaaagataatgtggagttgattctaaaaactatcaataatcagcatagcgtcgaatcacaggacaatgaccaacccgattatgactcagtcgcaagcgacgaagataccgacttggaaacgaccgcttcaaagacaaaccgccaaaaactgcagaccctgcaatctgagaactcaaacctgaggaaacaagctaccaccaatgtttatcaggtacagaccggctctgagtacactgacacaagcaaccactcttccttaaagagacgccccagtgcaagaggaagcagaccaatgagcatgtacgaaacgggtagcgggcaaaagccatatctgccaatgggtgaggcctcccgccccgaagagagcagaatgcgattgcaaccattcccagctcatgcatcaaggctcgagaagcagaattccacccccgaaagcgattatgacaacacccccaacgacatggagcctgatggaatgggctctagcaggaagggtcggcagagatccatggtgtggccaggggatggtctggtgcccgataccgccgagccccacgtagctccctcccctacactgccctctactgaggacgtgatccgcaaaactgagcagatcacaaagaacatccaagagttgttgagagctgctcaggagaacaaacacgactcctacattccctgttccgaaagaatccacgtggccgtaactgaaatggctgctctgtttcccaaaaaacctaaatctgatatggtaagaaccagtctgaggctgctgacctctagtgcatatcgacttcaaagcgagtgcaagaaaactttacctggagatcccggcagtcccactgacgtgcagctagtcacacagcaggtgattcagtgtgcttacgacattgctaaggccgccaaacagcttgttactattaccaccaaagagaataataactag

SEQ ID NO: 50524 - DNA, 2046 bp, Artificial Sequence
  derived and/or modified sequence
atgagcaagcggctgcggagcagcgaggtgtgcgccgactgcagcggtcccgatccatcatgggcatccgtcaatcgcggcacttttctgtgtgatgagtgctgcagcgtacatagatccctcggaaggcacatttctcaagtacggcatctcaaacacactccgtggccaccaactttgctccagatggtcgagactttgtacaacaatggcgcaaatagcatctgggaacactcccttttggatcccgcatccatcatgtcaggaagaaggaaggctaatccccaagataaagtgcatcctaacaaagccgaatttatacgggcaaaatatcagatgctcgcgttcgtgcatcggttgccttgtcgcgacgatgatagtgtgacagccaaggatttgtctaagcagctacacagttcagtgcggacgggaaatcttgagacatgtctgcgactactgagcctaggagcgcaggccaactttttccatccagaaaagggaaataccccactgcatgtggcgagcaaagctgggcagatactgcaggccgaacttctcgcagtgtatggagctgacccaggcacccaggactcgtctggaaagaccccggtcgactacgcacgtcagggcggccaccatgagttggccgaaaggctggtagaaatccagtacgaattaacagataggctggctttttacctctgcggaaggaagcccgatcacaaaaacgggcagcactttatcataccccagatggccgatcggagactgagtctggatctaagcgagctggcaaaggctgccaaaaagaagctgcagagcctgtctaaccacctgttcgaagagctggcgatggatgtgtacgatgaggtggatcgccgagaaacggacgccgtgtggctggcaacacagaatcacagtgccttggtcacagagacaactgtggtccctttcctacccgtgaaccctgagtactcaagtacccgcaatcagggacggcaaaagcttgctcggttcaatgctcatgagttcgccaccctggttattgacatcctgtccgacgccaagcgcaggcaacaggggagcagcctctctggatccaaagataatgtggaattgatccttaagaccattaataatcagcatagtgttgagtcccaggacaacgaccaaccggactacgatagtgtggcaagtgacgaagacacggacttagaaactactgcttccaaaaccaaccgccagaaactgcagacacttcagtctgagaactctaacctgcgcaagcaggcaaccaccaacgtgtatcaggtgcagaccggctccgagtacaccgacactagcaatcattcttctctgaagaggcggccgtcggcaaggggaagtagacccatgtctatgtacgaaaccggttccggccaaaaaccttatctgccaatgggtgaggcctcacgtccagaagagtctcgaatgcggttgcaaccattccccgctcacgcctcccgtctcgagaagcagaattccacacccgaatctgattatgacaacacccctaacgacatggagccagacggaatggggtcgagtcgaaaaggacgtcagcgcagcatggtatggcctggagacgggctagttccagacacagccgagccacacgttgccccatccccaacactgccctccacagaggacgttatcagaaaaacagagcagatcacaaaaaacattcaggagttgctcagggccgcacaggaaaataaacacgacagctatatcccctgcagcgaaagaatacacgttgccgtgacggaaatggcagccttatttccgaagaaacccaagtccgacatggttcgcaccagtctgcgccttttgacatcctccgcctatagactgcagtcagagtgtaaaaaaactcttccaggagatccaggctctcctacggatgtccagctcgtgacacagcaagtgattcagtgcgcctacgatattgccaaggcggctaagcagctagtcacaattaccactaaggagaataacaattag

SEQ ID NO: 50525 - DNA, 2046 bp, Artificial Sequence
  derived and/or modified sequence
atgagcaaaaggctgaggagctctgaagtctgtgccgattgttcgggcccagatccaagctgggccagcgtaaaccgcggaaccttcctctgcgacgagtgttgtagtgtgcacagaagcttgggtcggcatatatcccaggttcgacaccttaaacacactccttggcctcctaccttgctgcagatggtggagaccctgtataataatggcgcaaacagtatttgggaacatagcctgctggaccccgctagtattatgtccggtcgcagaaaggcgaacccgcaagacaaggtccaccccaataaagcagagttcatccgagcaaagtatcagatgctggcatttgtgcatcgcttgccttgtagggatgatgattccgtgaccgcaaaagatctgagtaaacagttacacagttctgtccggacgggcaatctggagacctgtcttcgcctgctctcattaggagcgcaggcaaattttttccaccccgagaagggtaacaccccactacatgtagccagtaaggcgggacaaattctacaggcggaactgttggccgtctacggcgctgatcccggtacccaggatagttcaggcaaaactccagtagactatgctaggcaaggagggcaccatgagctagccgaacgtttggtcgagatccaatacgaactcacagatagacttgcattctacctttgtggtcggaaaccggaccacaagaatggccagcacttcatcatcccccagatggccgatcggagatcctccctggatctgtcagaattggcaaaggccgctaagaagaagttgcagtcactttcaaatcacttgttcgaggaattggccatggatgtatacgatgaggtggatcgcagggaaactgacgccgtatggctcgctactcagaaccattcggctctggtgaccgagacaaccgtcgtaccattcttgccagtcaaccctgagtatagtagcaccagaaatcagggtcggcaaaaactcgcacgctttaatgcccacgagttcgcaaccttagtaatcgacatcctatcagacgctaagcgccgtcaacaaggatcatccctctctgggtccaaagacaacgtggaattgatactgaagacaatcaataaccagcactctgtggaatcccaggataacgaccagcctgattatgactcagttgccagtgatgaagataccgacctggaaaccacagcctccaaaacaaaccgacaaaaactgcagacactgcaatctgaaaatagtaacctgagaaagcaggcaacaacaaacgtgtaccaggttcagacaggatccgaatacaccgacacctcgaatcactcctctctcaagcggcgacccagcgcacgcggatctcgccctatgtcaatgtacgaaacagggtccggccagaagccctacctcccaatgggagaggccagtagaccagaagaatcgcggatgcgactccagccttttcccgctcacgcttcaaggttagaaaagcaaaatagtactcctgagagtgattacgacaatacacctaacgacatggaaccagacggtatgggttctagtagaaagggcaggcagaggagcatggtctggcctggagatgggctcgtgcctgacactgctgagccccacgtcgctccaagccctaccctcccatccacagaggatgtgattcggaagacagaacagatcaccaagaacatacaggagctgctcagggctgcacaggagaataaacacgactcctatatcccctgttctgaacggatccacgtggcagtgacagaaatggccgctttattcccaaaaaagccaaagtccgacatggtccggacctcactcagattactcacctcctcggcctaccgactgcaatccgagtgcaaaaaaactcttcccggagacccaggatctccaaccgacgtccaactggtgactcagcaggttatccagtgcgcctacgatatcgcaaaagccgcaaagcagcttgtgaccatcaccaccaaagaaaacaacaactag

SEQ ID NO: 50526 - DNA, 2046 bp, Artificial Sequence
  derived and/or modified sequence
atgagcaagagactgaggtcgtccgaggtttgcgcggactgttccggacccgatccaagctgggcgagtgtgaaccggggtacatttctgtgcgacgagtgttgctccgttcatcggagcctgggcaggcacatttcgcaggtgaggcatttgaagcacactccgtggccccctacgctcctgcagatggtggagactctctacaacaacggtgcaaacagcatttgggaacacagcctactcgacccagccagtattatgagtggcaggaggaaggccaacccccaggacaaagtgcatccgaataaagctgagtttatccgggctaagtaccagatgcttgccttcgtgcatagactcccttgtagggatgatgactcagttactgccaaggacctctctaaacaactgcactcctcggtccgcacaggtaacctggagacttgcctgcgcctgctttcgttgggcgctcaggccaatttcttccaccctgagaagggcaacacccctctgcacgtcgcatccaaagctggtcagatcctccaggccgagctcctggccgtgtacggcgcagacccagggacccaggactccagcggaaagactcccgtcgattatgcccgtcaggggggtcaccacgaactggccgaacgcctggtcgaaatccagtatgagctgaccgataggcttgccttctacctctgcggtaggaagcccgatcacaagaacggccaacactttataatccctcaaatggccgatcgacgcttgagcttggatctctcggaattagccaaagctgctaagaagaagttgcagagtctgtccaatcaccttttcgaggaactggccatggatgtgtatgacgaagtggacaggcgcgagacagacgccgtctggctggctacccaaaaccattccgccctggtaactgagaccacagtcgtgcccttcttgcccgttaatcccgaatattctagcacgagaaatcaggggcgtcaaaagctggctcggtttaatgctcatgagtttgctacactggttatagacattctgagtgacgccaagcgccgacaacagggaagttccctttctggatctaaagataatgtagagctgattctgaagacaatcaacaatcagcattcagtggagtctcaggacaacgatcagcccgactacgacagcgtggcaagtgatgaggatactgatctggagaccaccgcgtctaagaccaaccggcaaaaactacaaacccttcagtcagagaattcaaacctgaggaagcaggcgaccaccaatgtgtatcaggtccagaccggctcagagtataccgatacttctaatcacagttctctaaaacgcagaccaagtgctagaggctctcggcctatgagcatgtacgaaacaggaagcgggcagaaaccgtaccttcctatgggcgaagcctctagacccgaagaatctcggatgcggctacaacccttccctgcccatgcgtctaggctggagaaacagaattctacccccgagtcagattacgataatacgcccaatgatatggagccggacggcatgggctcatctaggaagggaagacaacgaagcatggtctggcctggagatggtctggttccagatacggcggagcctcatgttgcaccctcaccaactctcccttcaactgaggacgtcatcagaaagacggaacagattaccaaaaacatccaggaattgctccgggctgcccaagagaacaaacatgattcatacatcccctgctctgagagaattcatgttgccgtgactgagatggcagcgctctttcctaagaagcccaaatccgatatggtgcgaacaagcctaaggcttctgacgtctagcgcatacaggcttcagtccgagtgtaaaaagactctgcctggtgaccccggatcaccaactgacgtccaattagttactcagcaggttatacagtgtgcttatgatatcgcaaaggcagcaaagcagctggtgactatcactactaaagaaaacaacaattag

SEQ ID NO: 50527 - DNA, 5387 bp, Artificial Sequence
  derived and/or modified sequence
acctccccgcgcgtgcgtgctgtgccaaggctgcaaggcgctgaggggagaggcgccgccgtcagcgccgccgcagctgggacccgttagagcggaagcgccgccgccaccgccgcctttgctgtcccccggcctctagttccccgcaggtgggaggtgggagccatgtcgaaacggctccggagcagcgaggtgtgcgctgactgcagcgggccggatccttcctgggcatcagtaaataggggaacgtttttatgtgatgagtgctgcagtgtccatcggagtctagggcgccatatctcccaagtgaggcatctgaaacacacaccgtggcctccaacactgcttcagatggttgagaccttgtataataacggtgctaactctatatgggagcattctttgctggaccctgcgtctattatgagtggaagacgtaaagctaatccacaggataaagtacatcccaataaagcggaattcatcagagccaagtatcagatgttagcgttcgtccatcgcttgccctgccgggatgacgatagtgtgactgccaaagatcttagcaagcaactccattcgagcgtgagaacagggaatcttgaaacctgtttgagactgttatctttaggagcacaagccaacttctttcatcctgaaaaaggaaacaccccactccatgttgcctccaaagcagggcagattttacaggctgaattattggcagtatatggagcagacccaggcacacaggattctagtgggaaaactcccgttgattatgcaaggcaaggagggcaccatgagctggcagagcgcctcgtggaaatacagtatgagctaacggacagactagccttctatctctgtggcaggaaaccagatcacaaaaatggacagcactttataatacctcaaatggcagacagaaggagcagcctggatttgtctgaattggcaaaagctgctaagaagaaacttcaatctctaagtaatcatttgtttgaagaacttgccatggatgtgtacgatgaagttgacaggcgagagacggatgcagtctggcttgccacgcaaaaccacagcgccctggtaaccgagacaacggtcgtcccctttcttccggtcaatcctgagtactcatcaacacgaaatcagggcagacagaagttagctcggttcaacgcccatgagtttgccacgctggtcattgacattctcagtgacgccaagaggagacagcagggcagttctctctcgggttcaaaagacaatgtggagctcatactgaaaaccatcaataaccagcacagcgttgagagtcaagacaacgatcagcccgactatgacagcgtggcatcagacgaagacacagatttggaaaccactgcaagcaaaacaaaccggcagaagcttcaaacactccagagtgaaaattcgaacctcaggaaacaggccacaaccaatgtatatcaggtgcaaactggttctgagtacacagacacttccaaccactcttccttaaagagacgtccgtctgcccggggcagtaggcccatgtccatgtacgagaccggatcaggtcagaaaccatatctcccaatgggagaagcgagccgccccgaagagagcaggatgagactccagcccttccccgcgcacgcatccaggctggagaagcagaacagcacacctgagagtgactacgacaacactcccaacgacatggagccagatggcatggggtcaagccgaaagggacggcaaagaagtatggtgtggccaggggatggcttggtaccagacacagcagaaccccatgtggccccaagccccactctccctagcaccgaagatgtcatcaggaagactgaacagatcaccaaaaacatacaggagctcttaagagcagcccaagaaaataaacatgacagttatattccctgctcagagaggatacacgtagctgttacagaaatggcagcattattccccaaaaaacccaagtctgatatggtgaggacttcccttcgtttactgacgtccagtgcctaccgactgcagtcagagtgcaagaagaccctcccaggggaccccggctcacccacagacgttcagctggtcacgcagcaggtcatccagtgtgcgtacgacatcgccaaggctgccaagcagctggttaccatcaccaccaaagagaacaacaactgacaagggcagggcaccgcctcctctgttttctaggctttataaagtccaatttcaaattcagacgcagaactcttcagatttctacaaaaagaaacatttaatgacggtttaaaactttttaaaagaaaactcagtattatttttgcatgttttctaaccaattttcaactatttaacccacttgccttattttgtgcctatttgctggtttagtttctgatgttcggttgtgttgtcaacaactgttgagttgatcacatacatccaaaagtatagtttcattgtctaaagtttgtgaaaacttttccatcccttaaaactccctgcctatggctgaaactataaatgaaatttttcataaaacattttcttgagagagttcagttaaaaaagaaaaaatcagcgtcatttgttccctgccaagcatcgtgcaataagtgaatttcctggcctacttcataatctctaagtttggggtatctccaagcatgtatgtagagaaaggactttgccgctttttaaaactagtgtcacagtctctcttgggaggaaacaatgaattggttcatttcttctcagtgttttaccctgttacatgttctgttatttaatgttgttatctcaagctcctatctcttgatgttttcttgtcatcttgaaggctccatggaatgagataaagcattgacccaccacaggacatctcatgaagccatgttcagggtaggagctccacgcacatcaccacccattgtcaggtgctctccctcacccctgtaagccagacagtttgttcaaaacctgcagcaaagagaagcatcagtctaacaagccagaactcattttgtgccacccatttaggtatcactaccatgaactatagggaaaagaaatcacctactccctgacactgtgttgtacccttcatccaaaagtcagcttgcttctctgaccacttacagctttctcacatgagttgcttcacatttttcatcatctttaaggacttcttataaggaaagatgtatcgtatcgcagtcatctgagttagtttctcctccatcacctcatgagtacttaaaaattagacatcaactttcaagagttccttagagagtgtgctctagctggctgcctgctaccccaaagctctgaaagagtaaggttgaagtgctggaacatgctcagattgttttttagttactcaaaagccccttcttgttctgaatgtgaaagctcttcccgttcctgcttactgcagccattctgtgtgtgtggttcagaccctggcctagggccggtgatgtggatgagtgaagggagccaggtacacggcagcagggcagaggagactatggggagcccaccgcctacacagtaggggcagtagcccccagctccacgcctgttgccatgtggaaaagtgggcctagggtggccacagctttgatttttcaagagacaagaaacctagatgttttttggtgccatctctccatttataaatgttggcaaccaatttgaacactttcagagaccatgtgcaggtgagctgtgtcctctaggctgccagctcacagcccccaccccagggccctgtaagctgtgcagtgtgagggcctggcttccccggacacacctggagcagcctctgagtcttacccgtaatggagccggccaaccctgtgtgttatgttgctgtcgctcctgtttttaaccatatgttctgtcccatagcagtcattcacacatgtgaagaagacacaagaatcaaagtacaagttgcctcaatacatgctaataactaagcttctattttcacaggactgatcgatgcacacctttatagcttgaccatatgctgtcatgaaagtagcaccccgacggtgcttgctttactaagtcaccgtgtgtggatgcttttgtcgcattttgcttcactgtgagtagcatgggaaaagggtccacgtctccaaaagactcttccacttgtttgtcccacagccctaagtgccacattgctgttggatgctcccgggatgccttctagaagggggcctcccaccttaagttcaggcgccatctgatagccttttctgcaggcttcatgtccttagctgaccctcctttatcttgcaaacccctgcccctgctgtcccagggaggacgggcttctgtagaggcttctgggaaatgagctgtctgcaggaggtgaagcagtgttttccttggaatgtttgaggacctgcaatagaagatgttgcctttatggccctagagaaagtcaaggaacatggggaccaacaaagcatttccagttgtaagaatatgtcagaagagtgctcggttagcccacggtgccaaaactccaaacaagttccccggtggaatgacgtggccattggagggctgcaggtcgtcctctctgtatgtgccccgcgcatttccttggcctcatctgagatctggtgtcagagttctctgctcctgttggcaaatcgcaccttatctgaacatttgttccagccaccttttgcacatggattccgtaccttgcactagcaatgtctaccttcagtaacgtcgttctttttcaccctgtattctcaatgatcccttcctccccatatgccacccttcccccaaagctgatagggcagaggtgcactttatgaaactggcacttgactgaacagaaggaaacagctgtacctctaagctcctttcacagaaatcgtcatctgccttggaatgcaaatagttcttatttgccaaagaacagtgaattgggcccaaagatcaaacacagcatttcatgtaatcagaattctaaacgcacaactcgggagctgtgcacggcttctcaagtgattcagttgcagaaccaagagcaaaactcgcctgtttttgtcctcaatggcacccatgagctttccaatagtatagttttctttctttccttgtcctggttgaaggtaacgtgttcctagaaaagaaaatgctgcataggaaaactgagatgccttttattccaacgtgtttgatccctgtcactcattattctgtactttttattgtacattctattcctgtaattattgtgccctttaagtgttgtaaaatcgttttggaatttgtgcctgctagttatgcaataaacaggctctacaagtgtt

SEQ ID NO: 50528 - DNA, 5291 bp, Artificial Sequence
  derived and/or modified sequence
gaagcgccgccgccaccgccgcctttgctgtcccccggcctctagttccccgcaggtgggaggtgggagccatgtcgaaacggctccggagcagcgaggtgtgcgctgactgcagcgggccggatccttcctgggcatcagtaaataggggaacgtttttatgtgatgagtgctgcagtgtccatcggagtctagggcgccatatctcccaagtgaggcatctgaaacacacaccgtggcctccaacactgcttcagatggttgagaccttgtataataacggtgctaactctatatgggagcattctttgctggaccctgcgtctattatgagtggaagacgtaaagctaatccacaggataaagtacatcccaataaagcggaattcatcagagccaagtatcagatgttagcgttcgtccatcgcttgccctgccgggatgacgatagtgtgactgccaaagatcttagcaagcaactccattcgagcgtgagaacagggaatcttgaaacctgtttgagactgttatctttaggagcacaagccaacttctttcatcctgaaaaaggaaacaccccactccatgttgcctccaaagcagggcagattttacaggctgaattattggcagtatatggagcagacccaggcacacaggattctagtgggaaaactcccgttgattatgcaaggcaaggagggcaccatgagctggcagagcgcctcgtggaaatacagtatgagctaacggacagactagccttctatctctgtggcaggaaaccagatcacaaaaatggacagcactttataatacctcaaatggcagacagacggctcagcctggatttgtctgaattggcaaaagctgctaagaagaaacttcaatctctaagtaatcatttgtttgaagaacttgccatggatgtgtacgatgaagttgacaggcgagagacggatgcagtctggcttgccacgcaaaaccacagcgccctggtaaccgagacaacggtcgtcccctttcttccggtcaatcctgagtactcatcaacacgaaatcagggcagacagaagttagctcggttcaacgcccatgagtttgccacgctggtcattgacattctcagtgacgccaagaggagacagcagggcagttctctctcgggttcaaaagacaatgtggagctcatactgaaaaccatcaataaccagcacagcgttgagagtcaagacaacgatcagcccgactatgacagcgtggcatcagacgaagacacagatttggaaaccactgcaagcaaaacaaaccggcagaagcttcaaacactccagagtgaaaattcgaacctcaggaaacaggccacaaccaatgtatatcaggtgcaaactggttctgagtacacagacacttccaaccactcttccttaaagagacgtccgtctgcccggggcagtaggcccatgtccatgtacgagaccggatcaggtcagaaaccatatctcccaatgggagaagcgagccgccccgaagagagcaggatgagactccagcccttccccgcgcacgcatccaggctggagaagcagaacagcacacctgagagtgactacgacaacactcccaacgacatggagccagatggcatggggtcaagccgaaagggacggcaaagaagtatggtgtggccaggggatggcttggtaccagacacagcagaaccccatgtggccccaagccccactctccctagcaccgaagatgtcatcaggaagactgaacagatcaccaaaaacatacaggagctcttaagagcagcccaagaaaataaacatgacagttatattccctgctcagagaggatacacgtagctgttacagaaatggcagcattattccccaaaaaacccaagtctgatatggtgaggacttcccttcgtttactgacgtccagtgcctaccgactgcagtcagagtgcaagaagaccctcccaggggaccccggctcacccacagacgttcagctggtcacgcagcaggtcatccagtgtgcgtacgacatcgccaaggctgccaagcagctggttaccatcaccaccaaagagaacaacaactgacaagggcagggcaccgcctcctctgttttctaggctttataaagtccaatttcaaattcagacgcagaactcttcagatttctacaaaaagaaacatttaatgacggtttaaaactttttaaaagaaaactcagtattatttttgcatgttttctaaccaattttcaactatttaacccacttgccttattttgtgcctatttgctggtttagtttctgatgttcggttgtgttgtcaacaactgttgagttgatcacatacatccaaaagtatagtttcattgtctaaagtttgtgaaaacttttccatcccttaaaactccctgcctatggctgaaactataaatgaaatttttcataaaacattttcttgagagagttcagttaaaaaagaaaaaatcagcgtcatttgttccctgccaagcatcgtgcaataagtgaatttcctggcctacttcataatctctaagtttggggtatctccaagcatgtatgtagagaaaggactttgccgctttttaaaactagtgtcacagtctctcttgggaggaaacaatgaattggttcatttcttctcagtgttttaccctgttacatgttctgttatttaatgttgttatctcaagctcctatctcttgatgttttcttgtcatcttgaaggctccatggaatgagataaagcattgacccaccacaggacatctcatgaagccatgttcagggtaggagctccacgcacatcaccacccattgtcaggtgctctccctcacccctgtaagccagacagtttgttcaaaacctgcagcaaagagaagcatcagtctaacaagccagaactcattttgtgccacccatttaggtatcactaccatgaactatagggaaaagaaatcacctactccctgacactgtgttgtacccttcatccaaaagtcagcttgcttctctgaccacttacagctttctcacatgagttgcttcacatttttcatcatctttaaggacttcttataaggaaagatgtatcgtatcgcagtcatctgagttagtttctcctccatcacctcatgagtacttaaaaattagacatcaactttcaagagttccttagagagtgtgctctagctggctgcctgctaccccaaagctctgaaagagtaaggttgaagtgctggaacatgctcagattgttttttagttactcaaaagccccttcttgttctgaatgtgaaagctcttcccgttcctgcttactgcagccattctgtgtgtgtggttcagaccctggcctagggccggtgatgtggatgagtgaagggagccaggtacacggcagcagggcagaggagactatggggagcccaccgcctacacagtaggggcagtagcccccagctccacgcctgttgccatgtggaaaagtgggcctagggtggccacagctttgatttttcaagagacaagaaacctagatgttttttggtgccatctctccatttataaatgttggcaaccaatttgaacactttcagagaccatgtgcaggtgagctgtgtcctctaggctgccagctcacagcccccaccccagggccctgtaagctgtgcagtgtgagggcctggcttccccggacacacctggagcagcctctgagtcttacccgtaatggagccggccaaccctgtgtgttatgttgctgtcgctcctgtttttaaccatatgttctgtcccatagcagtcattcacacatgtgaagaagacacaagaatcaaagtacaagttgcctcaatacatgctaataactaagcttctattttcacaggactgatcgatgcacacctttatagcttgaccatatgctgtcatgaaagtagcaccccgacggtgcttgctttactaagtcaccgtgtgtggatgcttttgtcgcattttgcttcactgtgagtagcatgggaaaagggtccacgtctccaaaagactcttccacttgtttgtcccacagccctaagtgccacattgctgttggatgctcccgggatgccttctagaagggggcctcccaccttaagttcaggcgccatctgatagccttttctgcaggcttcatgtccttagctgaccctcctttatcttgcaaacccctgcccctgctgtcccagggaggacgggcttctgtagaggcttctgggaaatgagctgtctgcaggaggtgaagcagtgttttccttggaatgtttgaggacctgcaatagaagatgttgcctttatggccctagagaaagtcaaggaacatggggaccaacaaagcatttccagttgtaagaatatgtcagaagagtgctcggttagcccacggtgccaaaactccaaacaagttccccggtggaatgacgtggccattggagggctgcaggtcgtcctctctgtatgtgccccgcgcatttccttggcctcatctgagatctggtgtcagagttctctgctcctgttggcaaatcgcaccttatctgaacatttgttccagccaccttttgcacatggattccgtaccttgcactagcaatgtctaccttcagtaacgtcgttctttttcaccctgtattctcaatgatcccttcctccccatatgccacccttcccccaaagctgatagggcagaggtgcactttatgaaactggcacttgactgaacagaaggaaacagctgtacctctaagctcctttcacagaaatcgtcatctgccttggaatgcaaatagttcttatttgccaaagaacagtgaattgggcccaaagatcaaacacagcatttcatgtaatcagaattctaaacgcacaactcgggagctgtgcacggcttctcaagtgattcagttgcagaaccaagagcaaaactcgcctgtttttgtcctcaatggcacccatgagctttccaatagtatagttttctttctttccttgtcctggttgaaggtaacgtgttcctagaaaagaaaatgctgcataggaaaactgagatgccttttattccaacgtgtttgatccctgtcactcattattctgtactttttattgtacattctattcctgtaattattgtgccctttaagtgttgtaaaatcgttttggaatttgtgcctgctagttatgcaataaacaggctctacaagtg

SEQ ID NO: 50529 - DNA, 2046 bp, Artificial Sequence
  derived and/or modified sequence
atgagcaagagactgagaagcagcgaggtgtgcgccgactgcagcggccccgaccccagctgggccagcgtgaacagaggcaccttcctgtgcgacgagtgctgcagcgtgcacagaagcctgggcagacacatcagccaggtgagacacctgaagcacaccccctggccccccaccctgctgcagatggtggagaccctgtacaacaacggcgccaacagcatctgggagcacagcctgctggaccccgccagcatcatgagcggcagaagaaaggccaacccccaggacaaggtgcaccccaacaaggccgagttcatcagagccaagtaccagatgctggccttcgtgcacagactgccctgcagagacgacgacagcgtgaccgccaaggacctgagcaagcagctgcacagcagcgtgagaaccggcaacctggagacctgcctgagactgctgagcctgggcgcccaggccaacttcttccaccccgagaagggcaacacccccctgcacgtggccagcaaggccggccagatcctgcaggccgagctgctggccgtgtacggcgccgaccccggcacccaggacagcagcggcaagacccccgtggactacgccagacagggcggccaccacgagctggccgagagactggtggagatccagtacgagctgaccgacagactggccttctacctgtgcggcagaaagcccgaccacaagaacggccagcacttcatcatcccccagatggccgacagaagaagcagcctggacctgagcgagctggccaaggccgccaagaagaagctgcagagcctgagcaaccacctgttcgaggagctggccatggacgtgtacgacgaggtggacagaagagagaccgacgccgtgtggctggccacccagaaccacagcgccctggtgaccgagaccaccgtggtgcccttcctgcccgtgaaccccgagtacagcagcaccagaaaccagggcagacagaagctggccagattcaacgcccacgagttcgccaccctggtgatcgacatcctgagcgacgccaagagaagacagcagggcagcagcctgagcggcagcaaggacaacgtggagctgatcctgaagaccatcaacaaccagcacagcgtggagagccaggacaacgaccagcccgactacgacagcgtggccagcgacgaggacaccgacctggagaccaccgccagcaagaccaacagacagaagctgcagaccctgcagagcgagaacagcaacctgagaaagcaggccaccaccaacgtgtaccaggtgcagaccggcagcgagtacaccgacaccagcaaccacagcagcctgaagagaagacccagcgccagaggcagcagacccatgagcatgtacgagaccggcagcggccagaagccctacctgcccatgggcgaggccagcagacccgaggagagcagaatgagactgcagcccttccccgcccacgccagcagactggagaagcagaacagcacccccgagagcgactacgacaacacccccaacgacatggagcccgacggcatgggcagcagcagaaagggcagacagagaagcatggtgtggcccggcgacggcctggtgcccgacaccgccgagccccacgtggcccccagccccaccctgcccagcaccgaggacgtgatcagaaagaccgagcagatcaccaagaacatccaggagctgctgagagccgcccaggagaacaagcacgacagctacatcccctgcagcgagagaatccacgtggccgtgaccgagatggccgccctgttccccaagaagcccaagagcgacatggtgagaaccagcctgagactgctgaccagcagcgcctacagactgcagagcgagtgcaagaagaccctgcccggcgaccccggcagccccaccgacgtgcagctggtgacccagcaggtgatccagtgcgcctacgacatcgccaaggccgccaagcagctggtgaccatcaccaccaaggagaacaacaactag

SEQ ID NO: 50530 - DNA, 2046 bp, Artificial Sequence
  derived and/or modified sequence
atgagcaagagactgagaagcagcgaggtgtgcgccgactgcagcggccccgaccccagctgggccagcgtgaacagaggcaccttcctgtgcgacgagtgctgcagcgtgcacagaagcctgggcagacacatcagccaggtgagacacctgaagcacaccccctggccccccaccctgctgcagatggtggagaccctgtacaacaacggcgccaacagcatctgggagcacagcctgctggaccccgccagcatcatgagcggcagaagaaaggccaacccccaggacaaggtgcaccccaacaaggccgagttcatcagagccaagtaccagatgctggccttcgtgcacagactgccctgcagagacgacgacagcgtgaccgccaaggacctgagcaagcagctgcacagcagcgtgagaaccggcaacctggagacctgcctgagactgctgagcctgggcgcccaggccaacttcttccaccccgagaagggcaacacccccctgcacgtggccagcaaggccggccagatcctgcaggccgagctgctggccgtgtacggcgccgaccccggcacccaggacagcagcggcaagacccccgtggactacgccagacagggcggccaccacgagctggccgagagactggtggagatccagtacgagctgaccgacagactggccttctacctgtgcggcagaaagcccgaccacaagaacggccagcacttcatcatcccccagatggccgacagaagactgagcctggacctgagcgagctggccaaggccgccaagaagaagctgcagagcctgagcaaccacctgttcgaggagctggccatggacgtgtacgacgaggtggacagaagagagaccgacgccgtgtggctggccacccagaaccacagcgccctggtgaccgagaccaccgtggtgcccttcctgcccgtgaaccccgagtacagcagcaccagaaaccagggcagacagaagctggccagattcaacgcccacgagttcgccaccctggtgatcgacatcctgagcgacgccaagagaagacagcagggcagcagcctgagcggcagcaaggacaacgtggagctgatcctgaagaccatcaacaaccagcacagcgtggagagccaggacaacgaccagcccgactacgacagcgtggccagcgacgaggacaccgacctggagaccaccgccagcaagaccaacagacagaagctgcagaccctgcagagcgagaacagcaacctgagaaagcaggccaccaccaacgtgtaccaggtgcagaccggcagcgagtacaccgacaccagcaaccacagcagcctgaagagaagacccagcgccagaggcagcagacccatgagcatgtacgagaccggcagcggccagaagccctacctgcccatgggcgaggccagcagacccgaggagagcagaatgagactgcagcccttccccgcccacgccagcagactggagaagcagaacagcacccccgagagcgactacgacaacacccccaacgacatggagcccgacggcatgggcagcagcagaaagggcagacagagaagcatggtgtggcccggcgacggcctggtgcccgacaccgccgagccccacgtggcccccagccccaccctgcccagcaccgaggacgtgatcagaaagaccgagcagatcaccaagaacatccaggagctgctgagagccgcccaggagaacaagcacgacagctacatcccctgcagcgagagaatccacgtggccgtgaccgagatggccgccctgttccccaagaagcccaagagcgacatggtgagaaccagcctgagactgctgaccagcagcgcctacagactgcagagcgagtgcaagaagaccctgcccggcgaccccggcagccccaccgacgtgcagctggtgacccagcaggtgatccagtgcgcctacgacatcgccaaggccgccaagcagctggtgaccatcaccaccaaggagaacaacaactag

SEQ ID NO: 50531 - protein, 729 aa, Artificial Sequence
  derived and/or modified sequence
MSKRLRSSEVCADCSGPDPSWASVNRGTFLCDECCSVHRSLGRHISQVRHLKHTPWPPTLLQMVETLYNNGANSIWEHSLLDPASIMSGRRKANPQDKVHPNKAEFIRAKYQMLAFVHRLPCRDDDSVTAKDLSKQLHSSVRTGNLETCLRLLSLGAQANFFHPEKGNTPLHVASKAGQILQAELLAVYGADPGTQDSSGKTPVDYARQGGHHELAERLVEIQYELTDRLAFYLCGRKPDHKNGQHFIIPQMADSSLDLSELAKAAKKKLQSLSNHLFEELAMDVYDEVDRRETDAVWLATQNHSALVTETTVVPFLPVNPEYSSTRNQGRQKLARFNAHEFATLVIDILSDAKRRQQGSSLSGSKDNVELILKTINNQHSVESQDNDQPDYDSVASDEDTDLETTASKTNRQKSLDSDLSDGPVTVQEFMEVKNALVASEAKIQQLMKVNNNLSDELRIMQKKLQTLQSENSNLRKQATTNVYQVQTGSEYTDTSNHSSLKRRPSARGSRPMSMYETGSGQKPYLPMGEASRPEESRMRLQPFPAHASRLEKQNSTPESDYDNTPNDMEPDGMGSSRKGRQRSMVWPGDGLVPDTAEPHVAPSPTLPSTEDVIRKTEQITKNIQELLRAAQENKHDSYIPCSERIHVAVTEMAALFPKKPKSDMVRTSLRLLTSSAYRLQSECKKTLPGDPGSPTDVQLVTQQVIQCAYDIAKAAKQLVTITTKENNN

SEQ ID NO: 50532 - protein, 601 aa, Artificial Sequence
  derived and/or modified sequence
MVETLYNNGANSIWEHSLLDPASIMSGRRKANPQDKVHPNKAEFIRAKYQMLAFVHRLPCRDDDSVTAKDLSKQLHSSVRTGNLETCLRLLSLGAQANFFHPEKGNTPLHVASKAGQILQAELLAVYGADPGTQDSSGKTPVDYARQGGHHELAERLVEIQYELTDRLAFYLCGRKPDHKNGQHFIIPQMADSSLDLSELAKAAKKKLQSLSNHLFEELAMDVYDEVDRRETDAVWLATQNHSALVTETTVVPFLPVNPEYSSTRNQGRQKLARFNAHEFATLVIDILSDAKRRQQGSSLSGSKDNVELILKTINNQHSVESQDNDQPDYDSVASDEDTDLETTASKTNRQKSLDSDLSDGPVTVQEFMEVKNALVASEAKIQQLMKVNNNLSDELRIMQKKLQTLQSENSNLRKQATTNVYQVQTGSEYTDTSNHSSLKRRPSARGSRPMSMYETGSGQKPYLPMGEASRPEESRMRLQPFPAHASRLEKQNSTPESDYDNTPNDMEPDGMGSSRKGRQRSMVWPGDGLVPDTAEPHVAPSPTLPSTEDVIRKTEQITKNIQELLRAAQENKHDSYIPCSERIHVAVTEMAALFPKETQV

SEQ ID NO: 50533 - DNA, 2190 bp, Artificial Sequence
  derived and/or modified sequence
atgagcaaaaggctgaggagctcagaggtgtgtgccgattgcagtggtcccgatccgagctgggcatccgtgaaccgcggaacattcctgtgtgatgagtgttgtagcgtgcatagaagtctcggccgacacatctcgcaggtgagacacctgaagcacacaccatggccaccaaccctgctccagatggtcgagaccctgtataacaacggggctaatagcatctgggagcactctctgttagacccggcttctatcatgagcggccgccgaaaagctaaccctcaggataaggttcaccctaacaaggctgagttcattagagccaagtaccagatgctagcttttgtccaccgattgccatgccgtgacgatgactctgtgaccgctaaagatctgtcaaagcagttgcattcctcagtgcgcacaggcaaccttgaaacgtgtctccgactcctttctctgggcgcccaggccaacttctttcatccggagaagggtaacacacccctccacgtcgcctccaaagctggacaaatcctgcaggctgaactgcttgcggtgtacggggctgaccccggtacccaagacagttccggtaaaacaccagtagattatgcacgccaggggggccaccatgagctggcagagaggctagtagaaattcaatatgaactaactgatcgtttggctttctatctgtgcggtagaaagccggaccataagaacggacagcactttatcatacctcaaatggccgacagctccctggatctgtctgaattggctaaggccgcgaaaaaaaaactgcagtctttgtcaaatcatctgttcgaggaactggccatggatgtttatgacgaggttgataggcgcgagaccgatgcagtgtggctcgcgacccaaaatcactccgccctggtgaccgagacgaccgtggttcctttcttgccagtgaaccccgagtactcaagtactcggaaccagggtagacagaagctggcccgctttaacgctcatgagttcgctaccctcgttatagacatcttaagtgacgccaagaggcgccagcaggggtccagtctcagtggcagtaaggacaacgtcgagttgatcttgaagacgattaataaccagcactccgtggagtcccaggataatgaccagccggactatgacagtgtggcaagcgacgaagataccgatcttgagacaaccgcaagcaaaaccaataggcagaaatcccttgacagcgacttatcagacggccctgtaaccgtccaggaatttatggaggtgaaaaacgcactggtggccagtgaagctaagatacagcaactgatgaaggtgaacaataatttgtccgatgaactgaggattatgcagaaaaaacttcagacacttcaatcagagaatagcaacctgcggaagcaggcgaccactaacgtctatcaggtgcagacaggtagtgaatatactgacactagcaatcacagcagcctgaaaagacggcccagcgcaaggggatctcgtcccatgtccatgtacgagacaggctccgggcagaaaccttatctgcctatgggcgaagcttctagacccgaagagtccagaatgagactgcagccatttcccgctcacgcttcgaggctggaaaagcagaattccaccccagaatccgattacgataatactcccaacgacatggagccagacggaatgggctccagccgtaaggggagacagaggtctatggtttggccaggggacggtcttgtgccagacactgccgagcctcatgtggcaccatcacccacattgcctagtacagaggacgtcattcggaagactgagcagatcaccaagaacattcaggaactcctgcgggccgcgcaagagaacaaacatgatagttacatcccttgcagtgagcgtatccatgtggcagtaacagagatggccgcactgtttccgaaaaaacctaagagcgatatggtgcgaacttcactcaggctactcactagctcagcataccgcctgcagagcgagtgcaagaaaacgctccctggggaccccggctctcctactgacgtgcaattggtgactcagcaagtaatccagtgtgcctatgacatcgctaaagcagcgaaacagctcgttactattactactaaagagaataacaactag

SEQ ID NO: 50534 - DNA, 1806 bp, Artificial Sequence
  derived and/or modified sequence
atggttgaaacactttataataacggagccaatagcatatgggaacatagcttgctggaccctgcctcaatcatgtctggaaggcggaaagctaacccacaagataaggtacaccccaataaagctgagtttatacgcgccaaatatcagatgctggcattcgtccaccgcctgccctgcagagatgatgacagcgtgaccgcaaaggacttatctaaacagctccactcctctgtcaggacaggcaacctcgagacgtgtctgcggctgctgagtctgggggcacaggctaacttcttccatccagagaaggggaataccccactccatgtcgccagcaaggcaggccaaatcctgcaggccgaattacttgcagtctatggcgccgaccctggaactcaggattctagtggaaaaacccctgtcgactacgcgcgtcaaggtggacatcatgaactagccgaacgactcgtggagatccagtacgagctgaccgaccgactggcgttttacctgtgcgggagaaagccagaccacaagaacgggcaacacttcataattccccagatggctgattcctctctcgacctgtcagaactggccaaagccgcaaagaaaaagctgcagagcctttccaaccatctcttcgaggaactggctatggacgtgtatgacgaagtggacaggagagaaacagatgcagtgtggctggcaactcagaaccattcagccctagtgacggagacaaccgtggtacccttcctccccgtgaacccagagtactcaagcacaagaaatcagggtcgccaaaagctcgctagattcaacgcccacgaattcgctactctggtcatcgacatcctatccgatgccaagcggaggcagcaggggtcatcgctgtcaggaagcaaagacaatgtagagctgatcttaaaaacaattaacaatcagcactcagtggagtcccaggataacgatcagcctgattacgattccgtggcctctgatgaggacaccgacctggagaccaccgcttctaagactaatagacagaaatccctggattctgacctgtcagacggacctgtgacagtacaagagtttatggaggtaaaaaacgctctggtggcgtcagaggccaagatccagcagctgatgaaagtaaacaacaacctgagcgacgagctccggattatgcagaagaaactgcagaccctacagagcgagaattccaatttgaggaagcaagcaaccaccaatgtctatcaggttcaaactggctcagaatataccgataccagtaaccatagctcacttaagagacggccctcagctcgaggcagtaggcctatgtcaatgtacgagacaggatcaggccagaagccatacttgccgatgggagaggcatcaaggccagaggaatccagaatgcggctccagccctttcctgctcatgccagtcggctcgagaagcagaatagcactccagagtctgattacgataacactccgaacgatatggaaccagacggtatggggtcctcccgtaaaggccggcaacggtcgatggtatggccaggggacggattggtgccggacaccgctgagcctcacgttgcaccaagccctacccttccttctacagaggatgttattagaaaaactgagcaaataacaaagaatatccaggaactgttgcgggcggcccaggaaaataaacatgatagttacatcccctgcagcgagcgcattcatgtcgctgtcacagaaatggcggcactctttcccaaggagacacaggtatag

SEQ ID NO: 50535 - DNA, 2190 bp, Artificial Sequence
  derived and/or modified sequence
atgagcaagaggctgcggagcagcgaggtgtgtgccgactgcagcggccctgaccccagctgggcctctgtgaacagaggcaccttcctgtgtgatgagtgctgcagcgtgcacaggagcctgggccgccacatcagccaggtgcgccacctgaagcacaccccctggccacccaccctgctgcagatggtggagaccctgtacaacaacggggccaacagcatctgggagcacagcctgctggaccctgccagcatcatgagcggccgcaggaaggccaacccccaggacaaggtgcaccccaacaaggccgagttcatccgggccaagtaccagatgctggcctttgtgcaccggctgccctgcagagatgatgattctgtgacagccaaggacctgagcaagcagctgcacagctctgtgaggactggaaacctggagacctgcctgcggctgctgagcctgggcgcccaggccaacttcttccaccctgagaagggcaacacccccctgcacgtggccagcaaggccggccagatcctgcaggccgagctgctggccgtgtatggagctgaccccggcacccaggacagcagcggcaagacccctgtggactatgcccggcagggcggccaccacgagctggccgagcggctggtggagatccagtatgagctgacagaccggctggccttctacctgtgtggcaggaagccagaccacaagaatggccagcacttcatcatcccccagatggctgacagcagcctggacctgtctgagctggccaaggccgccaagaagaagctgcagagcctgagcaaccacctgtttgaggagctggccatggatgtgtatgatgaggtggacagaagagaaacagatgctgtgtggctggccacccagaaccacagcgccctggtgacagagaccaccgtggtgcccttcctgcctgtgaaccctgagtacagcagcaccaggaaccagggccggcagaagctggcccgcttcaatgcccacgagtttgccaccctggtgattgacatcctgagtgatgccaagaggcggcagcagggcagcagcctgagcggcagcaaggacaacgtggagctgatcctgaagaccatcaacaaccagcacagcgtggagagccaggacaatgaccagcctgactatgacagcgtggccagtgatgaggacacagacctggagaccacagccagcaagaccaaccggcagaagagcctggacagcgacctgagtgatggccctgtgacagtgcaggagttcatggaggtgaagaatgccctggtggccagcgaggccaagatccagcagctgatgaaggtgaacaacaacctgagtgatgagctgcgcatcatgcagaagaagctgcagaccctgcagagcgagaacagcaacctgaggaagcaggccaccaccaacgtgtaccaggtgcagacaggcagcgagtacacagacaccagcaaccacagcagcctgaagagaagacccagcgcccggggcagccggcccatgtccatgtatgagaccggcagcggccagaagccctacctgcccatgggagaggccagcaggcctgaggagagcaggatgaggctgcagcccttccctgcccacgccagccggctggagaagcagaacagcaccccagagagtgactatgacaacaccccaaatgacatggagccagatggcatgggcagcagcaggaagggccggcagaggtccatggtgtggccaggagatggcctggtgcctgacacagctgagccccacgtggcccccagccccaccctgcccagcacagaagatgtgatcaggaagacagagcagatcaccaagaacatccaggagctgctgcgggccgcccaggagaacaagcatgacagctacatcccctgcagcgagcgcatccacgtggccgtgacagagatggccgccctcttccccaagaagcccaagagtgacatggtgaggaccagcctgcggctgctgaccagcagcgcctaccgcctgcagagcgagtgcaagaagaccctgcccggggaccccggcagccccacagatgtgcagctggtgacccagcaggtgatccagtgtgcctatgacatcgccaaggccgccaagcagctggtgaccatcaccaccaaggagaacaacaactag

SEQ ID NO: 50536 - DNA, 1806 bp, Artificial Sequence
  derived and/or modified sequence
atggtggagaccctgtacaacaacggggccaacagcatctgggagcacagcctgctggaccctgccagcatcatgagcggccgcaggaaggccaacccccaggacaaggtgcaccccaacaaggccgagttcatccgggccaagtaccagatgctggcctttgtgcaccggctgccctgcagagatgatgattctgtgacagccaaggacctgagcaagcagctgcacagctctgtgaggactggaaacctggagacctgcctgcggctgctgagcctgggcgcccaggccaacttcttccaccctgagaagggcaacacccccctgcacgtggccagcaaggccggccagatcctgcaggccgagctgctggccgtgtatggagctgaccccggcacccaggacagcagcggcaagacccctgtggactatgcccggcagggcggccaccacgagctggccgagcggctggtggagatccagtatgagctgacagaccggctggccttctacctgtgtggcaggaagccagaccacaagaatggccagcacttcatcatcccccagatggctgacagcagcctggacctgtctgagctggccaaggccgccaagaagaagctgcagagcctgagcaaccacctgtttgaggagctggccatggatgtgtatgatgaggtggacagaagagaaacagatgctgtgtggctggccacccagaaccacagcgccctggtgacagagaccaccgtggtgcccttcctgcctgtgaaccctgagtacagcagcaccaggaaccagggccggcagaagctggcccgcttcaatgcccacgagtttgccaccctggtgattgacatcctgagtgatgccaagaggcggcagcagggcagcagcctgagcggcagcaaggacaacgtggagctgatcctgaagaccatcaacaaccagcacagcgtggagagccaggacaatgaccagcctgactatgacagcgtggccagtgatgaggacacagacctggagaccacagccagcaagaccaaccggcagaagagcctggacagcgacctgagtgatggccctgtgacagtgcaggagttcatggaggtgaagaatgccctggtggccagcgaggccaagatccagcagctgatgaaggtgaacaacaacctgagtgatgagctgcgcatcatgcagaagaagctgcagaccctgcagagcgagaacagcaacctgaggaagcaggccaccaccaacgtgtaccaggtgcagacaggcagcgagtacacagacaccagcaaccacagcagcctgaagagaagacccagcgcccggggcagccggcccatgtccatgtatgagaccggcagcggccagaagccctacctgcccatgggagaggccagcaggcctgaggagagcaggatgaggctgcagcccttccctgcccacgccagccggctggagaagcagaacagcaccccagagagtgactatgacaacaccccaaatgacatggagccagatggcatgggcagcagcaggaagggccggcagaggtccatggtgtggccaggagatggcctggtgcctgacacagctgagccccacgtggcccccagccccaccctgcccagcacagaagatgtgatcaggaagacagagcagatcaccaagaacatccaggagctgctgcgggccgcccaggagaacaagcatgacagctacatcccctgcagcgagcgcatccacgtggccgtgacagagatggccgccctcttccccaaggagacccaggtgtag

SEQ ID NO: 50537 - DNA, 2190 bp, Artificial Sequence
  derived and/or modified sequence
atgagcaagcggctgcggagcagcgaggtgtgcgccgactgcagcgggccagaccctagctgggcgtcagtaaatcgcggaacttttctgtgcgacgagtgttgctctgtgcaccggtctctcggacggcacatctcccaagtccgccacctgaaacacactccatggcctcccactctccttcagatggttgagaccctgtacaacaacggagcaaattcgatctgggaacacagtctactggacccagcttctataatgagcggccgtcggaaagccaatccgcaggacaaagtgcaccccaataaggctgagtttattcgggctaagtatcagatgctggccttcgtgcacagactgccatgtcgcgatgacgactctgtcaccgcaaaagatctgtctaagcaactccattccagcgtgagaaccggcaatctcgagacttgtttacgcctgttgtctctcggggctcaggctaactttttccatccagagaaaggcaacacgcccctgcatgtggcatctaaggccggacagatcctccaggccgaacttctcgctgtgtacggtgcagaccctggcacccaggattcctccggcaagactccggtcgattatgcaaggcaaggcggacatcatgaacttgctgaaagacttgtcgaaatacagtatgaactaaccgatcggttagccttctatctgtgtggccgtaagcctgatcataaaaacgggcagcactttatcatcccccagatggctgacagttctctcgacctgtctgaactggcaaaggcggccaagaaaaaactgcagagtcttagtaaccacttgtttgaggagctggctatggacgtgtatgacgaggtcgacagaagagagacagacgctgtgtggctagcaacacagaaccactccgccctggtcacggagactactgttgtgccttttctccctgtaaaccctgaatattcatccacgaggaaccaggggcgacagaaactggcaaggtttaatgctcacgaatttgccaccctagtaatcgacatactgagcgacgccaaacgacgccagcagggctcctccctgtccgggtcaaaggataacgtggaactgattctgaagaccataaacaatcagcattcagtagagtcccaagacaacgaccaaccagattacgattccgtcgcatccgacgaggacaccgacctagagaccacggcttctaaaaccaaccgccagaagtccttggacagtgatttgagtgatggtcccgtcacagtgcaggaatttatggaagtgaagaacgctctggtcgcaagtgaggccaagatccagcagttgatgaaggtcaataataacctgtcagatgagttaagaatcatgcaaaagaagctgcagacacttcagagcgaaaactccaatttgcggaaacaagccactaccaatgtataccaggtgcaaacgggcagcgagtataccgatacgtcaaatcattcatccttaaaacgacgaccgtctgccaggggctcaagacctatgagcatgtacgagacagggagcgggcaaaagccctatctgcctatgggcgaagcctcaagacctgaagagtctcgcatgagattacagccctttcctgcccacgccagccgcttagagaaacagaacagcactcctgagtcagactacgacaacacaccgaatgatatggaaccagatgggatgggcagtagtcggaaaggccgccaacgctctatggtatggcccggggacggtctggtgcccgatactgccgagccacatgtcgctcctagccccaccctcccaagcaccgaagacgtaatcaggaaaaccgagcaaatcactaagaatatccaggagctccttcgggccgctcaagaaaataaacatgacagttatatcccttgttctgaaagaatccatgtggcggtgacagaaatggctgccctttttcccaaaaaaccaaagagtgacatggtgaggacatcactgcgccttctgacctcctccgcctacaggctgcagtcagaatgtaaaaagaccctgcctggtgatcctggctcccccaccgatgtgcagctcgtgacacaacaggtgatacagtgtgcttatgacattgcgaaagccgcgaagcaattggtgaccattacgactaaggaaaacaataactag

SEQ ID NO: 50538 - DNA, 1806 bp, Artificial Sequence
  derived and/or modified sequence
atggtggagaccctgtacaacaacggcgccaacagcatctgggagcatagcctcctggatccggcttccatcatgtcagggagacgtaaggcaaatcctcaagataaagtgcatcccaataaagccgaattcattagggcaaagtatcagatgcttgccttcgtccatcgactgccctgccgggacgatgattctgtgaccgcaaaagacctttccaaacagctgcactcaagcgtgcgaacgggaaatctggaaacttgtctgaggctgctcagcctgggggcacaggcaaacttctttcaccctgagaaaggcaatactcccctccacgtcgctagtaaagctggacaaattctgcaggctgaacttctggccgtgtatggggcggacccaggaacgcaggactcatctggaaaaacgccggtcgattacgctcggcaaggaggccatcacgagctggcagaacgcctggtggagatccagtacgaacttaccgacagactagcattttacctatgtggccgcaagcccgatcataaaaatgggcaacacttcataattccacagatggccgattctagtctggacctatccgagctcgccaaagcagccaagaagaagctgcagagcctctcaaaccacctgtttgaagaactggccatggacgtctacgacgaggtggaccgacgcgagacggacgcagtttggctggctacacagaaccattctgcgctggttaccgaaaccaccgttgtgcctttcctgcccgtgaatccagagtactcttcaaccagaaaccagggacggcaaaaattagcaaggtttaatgcccacgagttcgcaaccctagtgatcgacatcctttcagacgcaaaacggaggcagcagggctcaagcttgtctggcagcaaagacaatgtggagttgatattgaagacgataaacaaccagcactccgttgaaagccaggataacgatcagcccgactacgactctgtcgcttccgacgaggacaccgatctggagacaaccgccagcaaaacaaaccgtcagaaatcactggactctgaccttagcgacggacctgtgaccgtccaagagtttatggaggtaaaaaacgctttggtagcttccgaggcgaagattcaacaactgatgaaggtcaacaacaacctctcagacgaattgcggatcatgcagaaaaagctgcagactctgcaaagtgagaacagcaacctgcggaagcaggcaactactaacgtgtatcaggtccaaacgggcagcgaatatacagatactagcaaccactcaagtctcaagaggaggccgagcgctcggggttctagacccatgtcgatgtacgaaaccgggagcgggcagaagccctacctgccaatgggagaggcctctcgccccgaggagagccgcatgagactccagccttttccggcacacgccagccggctagagaagcagaatagtacaccggagtctgactacgataatactcccaacgacatggagcccgatgggatggggagttctcgaaagggcaggcagcgctcaatggtgtggcccggcgacggcctagtcccagatactgccgagccacatgtggccccatcacctacactgcctagtacggaggacgtcatccgaaagacggaacagataacaaagaacattcaagaactgctgagggctgctcaggagaacaagcacgactcttacattccctgctcagagcggattcacgtcgcagtgaccgagatggctgccctatttcccaaggagacccaggtatag

SEQ ID NO: 50539 - DNA, 2190 bp, Artificial Sequence
  derived and/or modified sequence
atgtctaagagactcaggtcctctgaagtctgtgcagattgcagcggacccgatccctcttgggcctctgtgaaccgaggcacattcttgtgcgacgaatgctgctcggtccaccggagcctgggaagacacatttcccaggtccgccatttgaagcatactccgtggcctcctaccctgctccaaatggtggagactctgtataataatggggctaatagcatttgggagcactccctgctggatcccgcatcaattatgagcggtagacgcaaagccaatcctcaggataaagtgcaccccaataaagctgaattcatccgcgcaaaataccagatgcttgcttttgtgcaccgactgccttgccgtgacgatgactctgttacagctaaggatctcagtaaacagttgcactcatccgtgcgcacgggaaacctcgaaacctgtctaaggctcctgagtctgggagctcaagccaacttcttccaccccgagaaggggaacacaccgctgcacgtggcgtcaaaggctgggcagattctgcaggccgagcttttagctgtatatggcgcagatccgggaacacaagattctagcgggaaaactcctgtcgactacgcccgacaagggggtcatcatgagttggctgagcggctggtggagattcaatacgagcttacagatcggctcgctttttacctctgcggaaggaagccagaccacaagaatggtcagcatttcatcattcctcagatggccgactcttctctggaccttagcgaactcgctaaggccgcaaagaaaaaactgcagtcactttctaaccacctattcgaggaactggccatggatgtgtacgacgaggtggatagaagggagactgacgccgtttggctggcaactcagaatcattcggcacttgtgactgagacaaccgtcgtgcccttcctaccggtgaatcctgaatactcgtccacgcgtaatcaggggcgtcagaagctggcgaggtttaacgcccatgaattcgccaccctggttattgacatcctgagcgacgccaaacgcaggcagcaaggttctagcctttcgggctccaaggacaatgtagagcttatcctgaagacaattaataaccagcacagcgttgagagccaagacaacgatcagccagattacgattccgtggcatctgacgaagatacggacctagagaccacagccagcaaaactaatcggcaaaagagtctggattctgatctttccgatgggccagtcacggtacaagagtttatggaggtcaagaacgccttggtcgcctccgaggctaagatccaacaactaatgaaagtgaacaacaacctttctgatgagcttagaataatgcagaaaaaactccaaacgctacagagcgaaaactcaaacctgcggaagcaggctaccaccaatgtttaccaggtgcagacaggcagtgaatatactgacacatctaaccatagcagcctcaaacgaaggcctagtgcccgaggaagccgcccaatgtccatgtatgagactggctcaggtcagaaaccctacctgcctatgggcgaggcctcaaggccagaggaaagccgaatgcgactgcagccctttcctgcccacgcctcacgtctcgaaaagcaaaattccactcccgagagtgactacgataatacacccaacgacatggaaccagacggcatgggctccagccgcaagggcagacaacggtccatggtgtggcctggcgacgggctcgttccagatactgcagagcctcacgtggccccatccccgactctgccctcaaccgaagatgttatacggaagacagagcaaatcacgaagaatattcaggaactcttacgggcagctcaagagaataagcatgactcatacataccctgttctgagcgcatacatgtcgccgtcacggaaatggcagcactgttcccaaagaagcccaagagtgatatggtgcggacaagccttcggttgttgacctcaagtgcctaccgactccagagtgagtgtaagaagactctgccgggtgacccagggtcccccaccgacgtccagctggtgacacaacaggtgattcagtgcgcatacgacattgcaaaagcagcaaaacagctggtgacaatcaccacgaaagagaacaacaattag

SEQ ID NO: 50540 - DNA, 1806 bp, Artificial Sequence
  derived and/or modified sequence
atggtagaaacactttataataatggagccaattctatctgggaacacagcttgcttgatcccgcatccattatgtctggcagacggaaagcgaatccacaggacaaagtacacccaaataaggctgagttcatcagagctaaataccagatgcttgctttcgttcaccgactgccctgtcgtgatgatgactctgtaacggcaaaggacctgagcaagcagttgcatagcagtgtcaggactggcaacttagagacatgtctcaggctgttgtccttgggcgcacaggctaattttttccatcctgagaaggggaacacacctctgcatgttgcctcaaaagcgggtcagattctccaagcggagcttcttgcagtctacggcgcagaccccggtacccaagactcttcaggcaaaacgccagttgattatgccaggcagggcggtcaccacgaactcgccgaacgcctcgttgaaatacagtacgagctgaccgaccgacttgccttctatctctgtgggcgaaagcctgatcacaagaacgggcagcattttattatcccgcagatggccgacagtagcctcgacctctccgaactggcaaaagccgctaagaagaagctgcagtctctgtccaatcacttgtttgaggagcttgccatggatgtctatgacgaggtggaccggagggaaaccgacgctgtctggctcgctacccagaatcatagcgcactcgtcacagaaactacagtggtgccctttttgcccgtcaatccggaatatagttccacacgcaaccagggaaggcagaagctcgcgcgttttaatgcccacgagttcgcaacactggttatcgatatattgagtgacgctaagcgccgacagcaggggtcctcactttccggctctaaagacaatgtggaactgattttaaagacgataaacaaccagcacagtgtcgaatcacaggacaacgaccagcccgactacgattctgtcgccagtgatgaggacaccgatttggaaacaaccgctagcaagaccaacagacagaaaagcttggattctgatctgtccgacggccctgtcacagttcaagaatttatggaagttaagaatgccctagttgcgtccgaggctaagatccagcagctgatgaaagtcaataataacctctctgacgaactgaggataatgcagaaaaagctgcagactctgcaaagtgaaaattcaaatctgcgcaagcaggccacaacaaacgtgtaccaggtccaaacagggagcgaatatacggacacatccaaccacagcagcctgaaacggcgaccgtccgcacgtggatcccggcctatgtcaatgtacgagacaggctctggtcaaaaaccttacctgccgatgggggaagctagcagacccgaagaaagccgaatgcgactccaacctttccctgctcacgccagcaggctggagaagcaaaactctacgcctgagagtgactacgataacactcctaatgacatggaacctgatgggatgggaagcagcagaaaggggagacagagatccatggtgtggccaggtgacggcttggtacctgatacagctgaaccccatgtcgcaccctctcctaccctcccttcaacagaagacgtaatacgtaaaacagagcagataacaaaaaatatccaagagctgctgcgggctgcgcaagagaacaagcatgactcttacattccgtgcagtgaaagaattcacgtggctgtcaccgaaatggccgcactttttcccaaggagacgcaggtgtag

SEQ ID NO: 50541 - DNA, 5444 bp, Artificial Sequence
  derived and/or modified sequence
gttagagcggaagcgccgccgccaccgccgcctttgctgtcccccggcctctagttccccgcaggtgggaggtgggagccatgtcgaaacggctccggagcagcgaggtgtgcgctgactgcagcgggccggatccttcctgggcatcagtaaataggggaacgtttttatgtgatgagtgctgcagtgtccatcggagtctagggcgccatatctcccaagtgaggcatctgaaacacacaccgtggcctccaacactgcttcagatggttgagaccttgtataataacggtgctaactctatatgggagcattctttgctggaccctgcgtctattatgagtggaagacgtaaagctaatccacaggataaagtacatcccaataaagcggaattcatcagagccaagtatcagatgttagcgttcgtccatcgcttgccctgccgggatgacgatagtgtgactgccaaagatcttagcaagcaactccattcgagcgtgagaacagggaatcttgaaacctgtttgagactgttatctttaggagcacaagccaacttctttcatcctgaaaaaggaaacaccccactccatgttgcctccaaagcagggcagattttacaggctgaattattggcagtatatggagcagacccaggcacacaggattctagtgggaaaactcccgttgattatgcaaggcaaggagggcaccatgagctggcagagcgcctcgtggaaatacagtatgagctaacggacagactagccttctatctctgtggcaggaaaccagatcacaaaaatggacagcactttataatacctcaaatggcagacagcagcctggatttgtctgaattggcaaaagctgctaagaagaaacttcaatctctaagtaatcatttgtttgaagaacttgccatggatgtgtacgatgaagttgacaggcgagagacggatgcagtctggcttgccacgcaaaaccacagcgccctggtaaccgagacaacggtcgtcccctttcttccggtcaatcctgagtactcatcaacacgaaatcagggcagacagaagttagctcggttcaacgcccatgagtttgccacgctggtcattgacattctcagtgacgccaagaggagacagcagggcagttctctctcgggttcaaaagacaatgtggagctcatactgaaaaccatcaataaccagcacagcgttgagagtcaagacaacgatcagcccgactatgacagcgtggcatcagacgaagacacagatttggaaaccactgcaagcaaaacaaaccggcagaagagcctagattcagatttatcagatggaccagtcactgtacaggaatttatggaggtcaaaaacgctctagtggcttctgaggccaagatacagcagctaatgaaggtgaataacaacttgagtgacgagctgagaattatgcagaaaaagcttcaaacactccagagtgaaaattcgaacctcaggaaacaggccacaaccaatgtatatcaggtgcaaactggttctgagtacacagacacttccaaccactcttccttaaagagacgtccgtctgcccggggcagtaggcccatgtccatgtacgagaccggatcaggtcagaaaccatatctcccaatgggagaagcgagccgccccgaagagagcaggatgagactccagcccttccccgcgcacgcatccaggctggagaagcagaacagcacacctgagagtgactacgacaacactcccaacgacatggagccagatggcatggggtcaagccgaaagggacggcaaagaagtatggtgtggccaggggatggcttggtaccagacacagcagaaccccatgtggccccaagccccactctccctagcaccgaagatgtcatcaggaagactgaacagatcaccaaaaacatacaggagctcttaagagcagcccaagaaaataaacatgacagttatattccctgctcagagaggatacacgtagctgttacagaaatggcagcattattccccaaaaaacccaagtctgatatggtgaggacttcccttcgtttactgacgtccagtgcctaccgactgcagtcagagtgcaagaagaccctcccaggggaccccggctcacccacagacgttcagctggtcacgcagcaggtcatccagtgtgcgtacgacatcgccaaggctgccaagcagctggttaccatcaccaccaaagagaacaacaactgacaagggcagggcaccgcctcctctgttttctaggctttataaagtccaatttcaaattcagacgcagaactcttcagatttctacaaaaagaaacatttaatgacggtttaaaactttttaaaagaaaactcagtattatttttgcatgttttctaaccaattttcaactatttaacccacttgccttattttgtgcctatttgctggtttagtttctgatgttcggttgtgttgtcaacaactgttgagttgatcacatacatccaaaagtatagtttcattgtctaaagtttgtgaaaacttttccatcccttaaaactccctgcctatggctgaaactataaatgaaatttttcataaaacattttcttgagagagttcagttaaaaaagaaaaaatcagcgtcatttgttccctgccaagcatcgtgcaataagtgaatttcctggcctacttcataatctctaagtttggggtatctccaagcatgtatgtagagaaaggactttgccgctttttaaaactagtgtcacagtctctcttgggaggaaacaatgaattggttcatttcttctcagtgttttaccctgttacatgttctgttatttaatgttgttatctcaagctcctatctcttgatgttttcttgtcatcttgaaggctccatggaatgagataaagcattgacccaccacaggacatctcatgaagccatgttcagggtaggagctccacgcacatcaccacccattgtcaggtgctctccctcacccctgtaagccagacagtttgttcaaaacctgcagcaaagagaagcatcagtctaacaagccagaactcattttgtgccacccatttaggtatcactaccatgaactatagggaaaagaaatcacctactccctgacactgtgttgtacccttcatccaaaagtcagcttgcttctctgaccacttacagctttctcacatgagttgcttcacatttttcatcatctttaaggacttcttataaggaaagatgtatcgtatcgcagtcatctgagttagtttctcctccatcacctcatgagtacttaaaaattagacatcaactttcaagagttccttagagagtgtgctctagctggctgcctgctaccccaaagctctgaaagagtaaggttgaagtgctggaacatgctcagattgttttttagttactcaaaagccccttcttgttctgaatgtgaaagctcttcccgttcctgcttactgcagccattctgtgtgtgtggttcagaccctggcctagggccggtgatgtggatgagtgaagggagccaggtacacggcagcagggcagaggagactatggggagcccaccgcctacacagtaggggcagtagcccccagctccacgcctgttgccatgtggaaaagtgggcctagggtggccacagctttgatttttcaagagacaagaaacctagatgttttttggtgccatctctccatttataaatgttggcaaccaatttgaacactttcagagaccatgtgcaggtgagctgtgtcctctaggctgccagctcacagcccccaccccagggccctgtaagctgtgcagtgtgagggcctggcttccccggacacacctggagcagcctctgagtcttacccgtaatggagccggccaaccctgtgtgttatgttgctgtcgctcctgtttttaaccatatgttctgtcccatagcagtcattcacacatgtgaagaagacacaagaatcaaagtacaagttgcctcaatacatgctaataactaagcttctattttcacaggactgatcgatgcacacctttatagcttgaccatatgctgtcatgaaagtagcaccccgacggtgcttgctttactaagtcaccgtgtgtggatgcttttgtcgcattttgcttcactgtgagtagcatgggaaaagggtccacgtctccaaaagactcttccacttgtttgtcccacagccctaagtgccacattgctgttggatgctcccgggatgccttctagaagggggcctcccaccttaagttcaggcgccatctgatagccttttctgcaggcttcatgtccttagctgaccctcctttatcttgcaaacccctgcccctgctgtcccagggaggacgggcttctgtagaggcttctgggaaatgagctgtctgcaggaggtgaagcagtgttttccttggaatgtttgaggacctgcaatagaagatgttgcctttatggccctagagaaagtcaaggaacatggggaccaacaaagcatttccagttgtaagaatatgtcagaagagtgctcggttagcccacggtgccaaaactccaaacaagttccccggtggaatgacgtggccattggagggctgcaggtcgtcctctctgtatgtgccccgcgcatttccttggcctcatctgagatctggtgtcagagttctctgctcctgttggcaaatcgcaccttatctgaacatttgttccagccaccttttgcacatggattccgtaccttgcactagcaatgtctaccttcagtaacgtcgttctttttcaccctgtattctcaatgatcccttcctccccatatgccacccttcccccaaagctgatagggcagaggtgcactttatgaaactggcacttgactgaacagaaggaaacagctgtacctctaagctcctttcacagaaatcgtcatctgccttggaatgcaaatagttcttatttgccaaagaacagtgaattgggcccaaagatcaaacacagcatttcatgtaatcagaattctaaacgcacaactcgggagctgtgcacggcttctcaagtgattcagttgcagaaccaagagcaaaactcgcctgtttttgtcctcaatggcacccatgagctttccaatagtatagttttctttctttccttgtcctggttgaaggtaacgtgttcctagaaaagaaaatgctgcataggaaaactgagatgccttttattccaacgtgtttgatccctgtcactcattattctgtactttttattgtacattctattcctgtaattattgtgccctttaagtgttgtaaaatcgttttggaatttgtgcctgctagttatgcaataaacaggctctacaagtg

SEQ ID NO: 50542 - DNA, 1978 bp, Artificial Sequence
  derived and/or modified sequence
atgtcgaaacggctccggagcagcgaggtgtgcgctgactgcagcgggccggatggttgagaccttgtataataacggtgctaactctatatgggagcattctttgctggaccctgcgtctattatgagtggaagacgtaaagctaatccacaggataaagtacatcccaataaagcggaattcatcagagccaagtatcagatgttagcgttcgtccatcgcttgccctgccgggatgacgatagtgtgactgccaaagatcttagcaagcaactccattcgagcgtgagaacagggaatcttgaaacctgtttgagactgttatctttaggagcacaagccaacttctttcatcctgaaaaaggaaacaccccactccatgttgcctccaaagcagggcagattttacaggctgaattattggcagtatatggagcagacccaggcacacaggattctagtgggaaaactcccgttgattatgcaaggcaaggagggcaccatgagctggcagagcgcctcgtggaaatacagtatgagctaacggacagactagccttctatctctgtggcaggaaaccagatcacaaaaatggacagcactttataatacctcaaatggcagacagcagcctggatttgtctgaattggcaaaagctgctaagaagaaacttcaatctctaagtaatcatttgtttgaagaacttgccatggatgtgtacgatgaagttgacaggcgagagacggatgcagtctggcttgccacgcaaaaccacagcgccctggtaaccgagacaacggtcgtcccctttcttccggtcaatcctgagtactcatcaacacgaaatcagggcagacagaagttagctcggttcaacgcccatgagtttgccacgctggtcattgacattctcagtgacgccaagaggagacagcagggcagttctctctcgggttcaaaagacaatgtggagctcatactgaaaaccatcaataaccagcacagcgttgagagtcaagacaacgatcagcccgactatgacagcgtggcatcagacgaagacacagatttggaaaccactgcaagcaaaacaaaccggcagaagagcctagattcagatttatcagatggaccagtcactgtacaggaatttatggaggtcaaaaacgctctagtggcttctgaggccaagatacagcagctaatgaaggtgaataacaacttgagtgacgagctgagaattatgcagaaaaagcttcaaacactccagagtgaaaattcgaacctcaggaaacaggccacaaccaatgtatatcaggtgcaaactggttctgagtacacagacacttccaaccactcttccttaaagagacgtccgtctgcccggggcagtaggcccatgtccatgtacgagaccggatcaggtcagaaaccatatctcccaatgggagaagcgagccgccccgaagagagcaggatgagactccagcccttccccgcgcacgcatccaggctggagaagcagaacagcacacctgagagtgactacgacaacactcccaacgacatggagccagatggcatggggtcaagccgaaagggacggcaaagaagtatggtgtggccaggggatggcttggtaccagacacagcagaaccccatgtggccccaagccccactctccctagcaccgaagatgtcatcaggaagactgaacagatcaccaaaaacatacaggagctcttaagagcagcccaagaaaataaacatgacagttatattccctgctcagagaggatacacgtagctgttacagaaatggcagcattattccccaaagaaacccaagtctgatatggtgaggacttcccttcgtttactgacgtccagtgcctaccgactgcagtcagagtgcaagaagaccctcccaggggaccccggctcacccacagacgttcagctggtcacgcagca

SEQ ID NO: 50543 - DNA, 2190 bp, Artificial Sequence
  derived and/or modified sequence
atgagcaagagactgagaagcagcgaggtgtgcgccgactgcagcggccccgaccccagctgggccagcgtgaacagaggcaccttcctgtgcgacgagtgctgcagcgtgcacagaagcctgggcagacacatcagccaggtgagacacctgaagcacaccccctggccccccaccctgctgcagatggtggagaccctgtacaacaacggcgccaacagcatctgggagcacagcctgctggaccccgccagcatcatgagcggcagaagaaaggccaacccccaggacaaggtgcaccccaacaaggccgagttcatcagagccaagtaccagatgctggccttcgtgcacagactgccctgcagagacgacgacagcgtgaccgccaaggacctgagcaagcagctgcacagcagcgtgagaaccggcaacctggagacctgcctgagactgctgagcctgggcgcccaggccaacttcttccaccccgagaagggcaacacccccctgcacgtggccagcaaggccggccagatcctgcaggccgagctgctggccgtgtacggcgccgaccccggcacccaggacagcagcggcaagacccccgtggactacgccagacagggcggccaccacgagctggccgagagactggtggagatccagtacgagctgaccgacagactggccttctacctgtgcggcagaaagcccgaccacaagaacggccagcacttcatcatcccccagatggccgacagcagcctggacctgagcgagctggccaaggccgccaagaagaagctgcagagcctgagcaaccacctgttcgaggagctggccatggacgtgtacgacgaggtggacagaagagagaccgacgccgtgtggctggccacccagaaccacagcgccctggtgaccgagaccaccgtggtgcccttcctgcccgtgaaccccgagtacagcagcaccagaaaccagggcagacagaagctggccagattcaacgcccacgagttcgccaccctggtgatcgacatcctgagcgacgccaagagaagacagcagggcagcagcctgagcggcagcaaggacaacgtggagctgatcctgaagaccatcaacaaccagcacagcgtggagagccaggacaacgaccagcccgactacgacagcgtggccagcgacgaggacaccgacctggagaccaccgccagcaagaccaacagacagaagagcctggacagcgacctgagcgacggccccgtgaccgtgcaggagttcatggaggtgaagaacgccctggtggccagcgaggccaagatccagcagctgatgaaggtgaacaacaacctgagcgacgagctgagaatcatgcagaagaagctgcagaccctgcagagcgagaacagcaacctgagaaagcaggccaccaccaacgtgtaccaggtgcagaccggcagcgagtacaccgacaccagcaaccacagcagcctgaagagaagacccagcgccagaggcagcagacccatgagcatgtacgagaccggcagcggccagaagccctacctgcccatgggcgaggccagcagacccgaggagagcagaatgagactgcagcccttccccgcccacgccagcagactggagaagcagaacagcacccccgagagcgactacgacaacacccccaacgacatggagcccgacggcatgggcagcagcagaaagggcagacagagaagcatggtgtggcccggcgacggcctggtgcccgacaccgccgagccccacgtggcccccagccccaccctgcccagcaccgaggacgtgatcagaaagaccgagcagatcaccaagaacatccaggagctgctgagagccgcccaggagaacaagcacgacagctacatcccctgcagcgagagaatccacgtggccgtgaccgagatggccgccctgttccccaagaagcccaagagcgacatggtgagaaccagcctgagactgctgaccagcagcgcctacagactgcagagcgagtgcaagaagaccctgcccggcgaccccggcagccccaccgacgtgcagctggtgacccagcaggtgatccagtgcgcctacgacatcgccaaggccgccaagcagctggtgaccatcaccaccaaggagaacaacaactag

SEQ ID NO: 50544 - DNA, 1806 bp, Artificial Sequence
  derived and/or modified sequence
atggtggagaccctgtacaacaacggcgccaacagcatctgggagcacagcctgctggaccccgccagcatcatgagcggcagaagaaaggccaacccccaggacaaggtgcaccccaacaaggccgagttcatcagagccaagtaccagatgctggccttcgtgcacagactgccctgcagagacgacgacagcgtgaccgccaaggacctgagcaagcagctgcacagcagcgtgagaaccggcaacctggagacctgcctgagactgctgagcctgggcgcccaggccaacttcttccaccccgagaagggcaacacccccctgcacgtggccagcaaggccggccagatcctgcaggccgagctgctggccgtgtacggcgccgaccccggcacccaggacagcagcggcaagacccccgtggactacgccagacagggcggccaccacgagctggccgagagactggtggagatccagtacgagctgaccgacagactggccttctacctgtgcggcagaaagcccgaccacaagaacggccagcacttcatcatcccccagatggccgacagcagcctggacctgagcgagctggccaaggccgccaagaagaagctgcagagcctgagcaaccacctgttcgaggagctggccatggacgtgtacgacgaggtggacagaagagagaccgacgccgtgtggctggccacccagaaccacagcgccctggtgaccgagaccaccgtggtgcccttcctgcccgtgaaccccgagtacagcagcaccagaaaccagggcagacagaagctggccagattcaacgcccacgagttcgccaccctggtgatcgacatcctgagcgacgccaagagaagacagcagggcagcagcctgagcggcagcaaggacaacgtggagctgatcctgaagaccatcaacaaccagcacagcgtggagagccaggacaacgaccagcccgactacgacagcgtggccagcgacgaggacaccgacctggagaccaccgccagcaagaccaacagacagaagagcctggacagcgacctgagcgacggccccgtgaccgtgcaggagttcatggaggtgaagaacgccctggtggccagcgaggccaagatccagcagctgatgaaggtgaacaacaacctgagcgacgagctgagaatcatgcagaagaagctgcagaccctgcagagcgagaacagcaacctgagaaagcaggccaccaccaacgtgtaccaggtgcagaccggcagcgagtacaccgacaccagcaaccacagcagcctgaagagaagacccagcgccagaggcagcagacccatgagcatgtacgagaccggcagcggccagaagccctacctgcccatgggcgaggccagcagacccgaggagagcagaatgagactgcagcccttccccgcccacgccagcagactggagaagcagaacagcacccccgagagcgactacgacaacacccccaacgacatggagcccgacggcatgggcagcagcagaaagggcagacagagaagcatggtgtggcccggcgacggcctggtgcccgacaccgccgagccccacgtggcccccagccccaccctgcccagcaccgaggacgtgatcagaaagaccgagcagatcaccaagaacatccaggagctgctgagagccgcccaggagaacaagcacgacagctacatcccctgcagcgagagaatccacgtggccgtgaccgagatggccgccctgttccccaaggagacccaggtgtag

SEQ ID NO: 50545 - protein, 191 aa, Artificial Sequence
  derived and/or modified sequence
MQSVFYPAGRISERYDIKGCEVSRWVDPAPEGSPLVLVLKDLNFQGKTINLGPQRSWFLRQMELDTTFLRELNVLDYSLLIAFQRLHEDERGPGSSLIFRTARSVQGAQSPEESRAQNRRLLPDAPNALHILDGPEQRYFLGVVDLATVYGLRKRLEHLWKTLRYPGRTFSTVSPARYARRLCQWVEAHTE

SEQ ID NO: 50546 - protein, 394 aa, Artificial Sequence
  derived and/or modified sequence
MAAPSPGPREVLAPSPEAGCRAVTSSRRGLLWRLRDKQSRLGLFEISPGHELHGMTCMMQAGLWAATQVSMDHPPTGPPSRDDFSEVLTQVHEGFELGTLAGPAFAWLRRSLGLAEEDYQAALGPGGPYLQFLSTSKSKASFFLSHDQRFFLKTQGRREVQALLAHLPRYVQHLQRHPHSLLARLLGVHSLRVDRGKKTYFIVMQSVFYPAGRISERYDIKGCEVSRWVDPAPEGSPLVLVLKDLNFQGKTINLGPQRSWFLRQMELDTTFLRELNVLDYSLLIAFQRLHEDERGPGSSLIFRTARSVQGAQSPEESRAQNRRLLPDAPNALHILDGPEQRYFLGVVDLATVYGLRKRLEHLWKTLRYPGRTFSTVSPARYARRLCQWVEAHTE

SEQ ID NO: 50547 - DNA, 1185 bp, Artificial Sequence
  derived and/or modified sequence
atggccgcccctagtcccggcccacgggaagtgctcgccccatcccccgaagctggatgcagggctgtcacctccagtcgccgggggctgctatggagacttagggataaacaatctcgactcggattgtttgagatctcccccggtcatgagctgcacgggatgacatgtatgatgcaggccggcctgtgggccgctactcaggtgagcatggaccatcctcccactgggccaccgagtagggacgatttttctgaggtactgactcaggttcacgagggatttgaactgggaacgctggcgggtcctgcctttgcttggttgcggaggagcctaggcctggctgaggaggattatcaggcagcactcggaccaggtgggccgtacctccagtttctcagtactagtaaatctaaggcaagtttcttcctgtctcatgatcaacggttcttcctcaagacacaggggagaagggaggttcaggccctgctggcccatctaccacgttatgtgcagcaccttcagagacatccccacagtctcttagctagactgcttggcgtacatagcttgcgggtggaccgcggtaaaaaaacatattttatagtgatgcagagtgtgttttacccagccggtcggatcagtgaaagatacgacatcaagggctgcgaggtctctagatgggtggatcccgcaccagaaggtagtcccctagtgctggtgcttaaggacctgaactttcagggaaagaccatcaacttagggccgcagcggagttggttcttaaggcaaatggagctcgatacaacctttttgcgcgaactgaacgtgctcgactactccttgttgatcgccttccagaggctacatgaagacgagcgcggcccaggtagtagcctaatttttaggaccgccaggtcagtccagggggctcagtctcctgaagaatcccgggcgcagaacaggcgcctgcttccagacgccccgaatgctctgcatatcctggatggccccgagcagaggtatttccttggcgtggttgatctggcaactgtctatgggttgcgcaaacgcctggaacacttatggaaaaccttgcgatatccaggccggaccttctctactgttagtcctgcacggtacgctagaaggctgtgccagtgggtggaggcccatacagaatag

SEQ ID NO: 50548 - DNA, 1185 bp, Artificial Sequence
  derived and/or modified sequence
atggccgcccccagccctggcccccgggaggtgctggcccccagccctgaggccggctgcagagctgtgaccagcagcagaagaggcctgctgtggaggctgcgggacaagcagagccggctgggcctgtttgagatcagccctggccacgagctgcacggcatgacctgcatgatgcaggccggcctgtgggccgccacccaggtgtccatggaccacccccccaccggcccccccagcagagatgacttcagcgaggtgctgacccaggtgcatgagggctttgagctgggcaccctggccggccctgcctttgcctggctgcggcgcagcctgggcctggccgaggaggactaccaggccgccctgggccctgggggcccctacctgcagttcctgagcaccagcaagagcaaggccagcttcttcctgagccatgaccagcgcttcttcctgaagacccagggcagaagagaggtgcaggccctgctggcccacctgccccgctacgtgcagcacctgcagaggcacccccacagcctgctggcccggctgctgggcgtgcacagcctgcgggtggaccggggcaagaagacctacttcatcgtgatgcagagcgtcttctacccagctggccgcatcagcgagagatatgacatcaagggctgtgaggtgagccgctgggtggaccctgcccctgagggcagccccctggtgctggtgctgaaggacctgaacttccagggcaagaccatcaacctgggcccccagaggtcctggttcctgcggcagatggagctggacaccaccttcctgcgggagctgaatgtgctggactacagcctgctgattgccttccagaggctgcatgaagatgagcggggccctggcagcagcctcatcttcagaacagcccggtctgtgcagggcgcccagagccctgaggagagccgggcccagaacagaaggctgctgcctgatgccccaaatgccctgcacatcctggatggccctgagcagcgctacttcctgggcgtggtggacctggccaccgtgtatggcctgaggaagaggctggagcacctgtggaagaccctgcgctacccaggccgcaccttcagcacagtgtccccagcccgctatgcccggcggctgtgccagtgggtggaggcccacacagaatag

SEQ ID NO: 50549 - DNA, 1185 bp, Artificial Sequence
  derived and/or modified sequence
atggccgcccccagccccggcccccgggaggtgctggcccccagccccgaggcaggttgcagggctgtcaccagctctagacgcggtctactctggcggttgagggacaagcagtcgcgattggggctgtttgagattagcccagggcatgaactccatggaatgacgtgtatgatgcaggccggtctttgggccgctactcaggttagtatggaccaccctcccaccggacccccttctagggatgatttttcagaggtcctgacacaagtccacgaggggttcgagttgggcaccttggcaggccccgcatttgcctggttgcgcagatccttagggctggcagaggaggactaccaggctgcgcttgggccaggcggcccctatctgcagttcctgtctactagcaagtccaaagcatccttcttcctctctcacgatcagaggttctttctgaagacgcagggcaggcgtgaagtgcaggctttgctcgcgcacctgcctaggtacgtccagcacctccagaggcacccgcattccctgcttgcccgactgttgggcgtgcattcgctgcgggtagaccgcggtaaaaagacttacttcatagtcatgcaatctgtgttctaccccgccggcaggatctccgagcgctacgatatcaagggctgcgaagtgagtcgatgggtagacccagcccccgaaggatctccgctcgttctggtcctgaaagatctgaacttccagggcaaaaccatcaatttggggccacagagatcttggtttctacggcagatggagctggatacgactttccttagagagttaaatgtgctggactactctctgctgatcgctttccagcgtcttcacgaggatgaaagaggccctgggagcagcctgatatttcgaactgccaggagtgttcagggagctcaaagccctgaagagagccgcgcacagaataggcgcttgcttcctgacgccccaaacgcccttcacatcctagatgggcccgaacagaggtatttcctgggagtggtcgaccttgctacggtgtacggcctcagaaaaaggcttgagcatctgtggaaaacgctgcggtacccaggacggaccttctcaaccgtctcccccgctcgatacgctcggcgtctgtgccagtgggtcgaggcacatactgagtag

SEQ ID NO: 50550 - DNA, 1104 bp, Artificial Sequence
  derived and/or modified sequence
gtttaggggtgggatcgggtcgggatccggaccagccaaggaagggtccaggtgccgcggatcttgagaaggaggcgtggcctggcgctgggattggcgccggatgcaccccgggttgtggagtttggggatcctcatccggcgccctctccccttccaggagtgcacagtctgcgggtggaccggggaaagaagacgtacttcatcgtcatgcagagcgtcttctaccccgccggccgcatctccgagaggtatgacatcaaaggctgcgaggtgagccgctgggtggatcccgcccctgagggcagcccccttgttctggtgctgaaggacctcaactttcagggcaagaccatcaacctggggccccagcggagctggttcctccgccagatggaactggataccaccttcctccgggagctcaacgtgctggattacagcctcctgatagccttccaacgtctccacgaggatgagaggggcccgggcagcagcctcatcttccgcacggccaggtctgtgcaaggggcacagagcccggaagagtcgagagcccaaaaccgccggctgctgcccgacgcccccaacgccctacacatcctggacgggcccgagcagcgctatttcctgggcgtcgtggatctcgccacagtctacgggctccgcaagcggctggagcacctgtggaagacactgcgctacccaggccggaccttctccactgtcagcccggctcgctacgcccgtcgcctctgccagtgggtggaggcgcacacggagtgacgggcgcccggccccactctccggatctggacgatgggctcacgccaggaacgccggttcccccgggcccgggcatctcgcctgcgcttcctcctgatggtcgccagagggcagcatcccctaactaataccgtaaccgcgcagtcccgtttgacggtggtgccgtgcccagcatcgtgccaaggactcccctactttagctcatttaatcctcaaaaaatgctattattctctttttacagaccatgaaatggaggctcagggggtgaagggactgatcaagatcattcagcaataaatgctggaaccaggactcaa

SEQ ID NO: 50551 - DNA, 2198 bp, Artificial Sequence
  derived and/or modified sequence
gcggcggggaatgcggccaaagcccgggaagctgctgcgggggcgatggctgcgccgagcccggggccccgcgaggtcctggccccctcccctgaggctggatgcagagcagtcacctccagccggcgggggcttctctggcgcctccgagacaagcagtctcgcctgggcctgtttgagatcagcccggggcatgaactgcatgggatgacgtgcatgatgcaggcagggctgtgggctgccacccaggtctccatggaccacccacccacggggccgccctcccgggacgatttctcggaggtcctaacccaggttcacgagggcttcgagctgggcacgctggccggccccgcctttgcctggctgcgccgctccctgggcctggcggaggaggactatcaggctgccctgggccccggcggcccctacctgcagttcctcagcacctccaagagcaaggccagcttcttcctgtcccacgaccagcgcttcttcctgaagacccaggggcgccgagaggtgcaggctctgctcgcccacctgccccgctacgtgcagcacctgcagcggcacccgcactcgctgctggcgcggttgctgggagtgcacagtctgcgggtggaccggggaaagaagacgtacttcatcgtcatgcagagcgtcttctaccccgccggccgcatctccgagaggtatgacatcaaaggctgcgaggtgagccgctgggtggatcccgcccctgagggcagcccccttgttctggtgctgaaggacctcaactttcagggcaagaccatcaacctggggccccagcggagctggttcctccgccagatggaactggataccaccttcctccgggagctcaacgtgctggattacagcctcctgatagccttccaacgtctccacgaggatgagaggggcccgggcagcagcctcatcttccgcacggccaggtctgtgcaaggggcacagagcccggaagagtcgagagcccaaaaccgccggctgctgcccgacgcccccaacgccctacacatcctggacgggcccgagcagcgctatttcctgggcgtcgtggatctcgccacagtctacgggctccgcaagcggctggagcacctgtggaagacactgcgctacccaggccggaccttctccactgtcagcccggctcgctacgcccgtcgcctctgccagtgggtggaggcgcacacggagtgacgggcgcccggccccactctccggatctggacgatgggctcacgccaggaacgccggttcccccgggcccgggcatctcgcctgcgcttcctcctgatggtcgccagagggcagcatcccctaactaataccgtaaccgcgcagtcccgtttgacggtggtgccgtgcccagcatcgtgccaaggactcccctactttagctcatttaatcctcaaaaaatgctattattctctttttacagaccatgaaatggaggctcagggggtgaagggactgatcaagatcattcagcaataaatgctggaaccaggactcaaccatggcttttggattccggagcctgtattcttaaccaccagctcctgcagcttggtcctcatgatctgggcaaggggggaggctgaaggctgcagccctcttgtcatccagatggggaaactgaggcccagagactttaaggggcgtaagcacgggtaagtggcaaggtcggccctgagtacccaggcctcccggccccctgctcctggcctgatactctagggatgcaggtgggagaagcaggggtcctgggggctgcctggagctctgggaggcattctgaacggggtctactactgatctcaggtgagctctgccctcctctgaaagtcacttttctcatcagttaaatgggggcaagggtccgtggtccgaccaaggtcttggcttcacagacatcaccaggagcctgcatgcccctgatcactccttctccttcctccaggaaactccagcctggcctctgaccccagttcaatccgaccatgcccaagcccaagcgggcctttcctccagaactgctccggggcctggctgtgtgactggagcaaggtgctaaacctctctgtgcctcgctggtctaatctgtaaaatgaaggaatggaaacagacctcattaactcattaaatatttgttgagcacctgcca

SEQ ID NO: 50552 - DNA, 1185 bp, Artificial Sequence
  derived and/or modified sequence
atggctgccccttcgcctggccctagggaagtacttgctccttcaccggaggccggatgcagggcagtcacaagcagtaggagagggctcctgtggaggctccgtgataagcaaagcagattggggctgtttgaaatcagccccggacatgagcttcatggaatgacctgcatgatgcaagccggtctttgggccgcaactcaagtgagtatggaccaccctcccaccggcccaccatcccgcgatgatttttctgaagtattgacgcaagtccatgaaggatttgagctcggcaccctcgcaggccctgcgttcgcatggctgcgccgatcgcttggattagcggaggaagattaccaggccgctctgggcccagggggtccttatctgcagttcttgtccacctccaagtccaaagcttcattcttcctcagccacgaccagaggtttttccttaagacacagggacgcagggaggtccaagctctgctggctcaccttccacgctatgtccaacacctgcagaggcaccctcattcactgctcgcaaggctgcttggcgtccattcccttagggtggatcgtggcaagaaaacttacttcatcgtgatgcagtccgtattctacccggcaggaaggatttcggaaaggtacgatatcaaaggttgtgaggtgtcaagatgggtcgatcctgcgccagagggatcccccctcgtgttagtgctcaaagatttgaacttccaaggtaagacaatcaatctggggccacaacgatcgtggttcctgcgccagatggagcttgacacaacatttctgcgggagctgaacgttcttgattacagcttgctcatagcttttcagagactgcatgaggacgagcggggaccgggatctagcctgatcttccgcacagcacggagcgtgcagggggcacagagcccggaggagagccgagctcagaaccggagactcctgccggacgcccctaacgccctacacatattggacggacctgagcaacgatactttctaggcgtggtggacctggccacagtgtatggactgcggaaaagactcgaacacctgtggaagaccttgagatacccaggtcggaccttcagcaccgtgtctccagccagatacgcacggaggttgtgtcaatgggtcgaagcacacacagagtag

SEQ ID NO: 50553 - DNA, 1185 bp, Artificial Sequence
  derived and/or modified sequence
atggccgcccccagccccggccccagagaggtgctggcccccagccccgaggccggctgcagagccgtgaccagcagcagaagaggcctgctgtggagactgagagacaagcagagcagactgggcctgttcgagatcagccccggccacgagctgcacggcatgacctgcatgatgcaggccggcctgtgggccgccacccaggtgagcatggaccacccccccaccggcccccccagcagagacgacttcagcgaggtgctgacccaggtgcacgagggcttcgagctgggcaccctggccggccccgccttcgcctggctgagaagaagcctgggcctggccgaggaggactaccaggccgccctgggccccggcggcccctacctgcagttcctgagcaccagcaagagcaaggccagcttcttcctgagccacgaccagagattcttcctgaagacccagggcagaagagaggtgcaggccctgctggcccacctgcccagatacgtgcagcacctgcagagacacccccacagcctgctggccagactgctgggcgtgcacagcctgagagtggacagaggcaagaagacctacttcatcgtgatgcagagcgtgttctaccccgccggcagaatcagcgagagatacgacatcaagggctgcgaggtgagcagatgggtggaccccgcccccgagggcagccccctggtgctggtgctgaaggacctgaacttccagggcaagaccatcaacctgggcccccagagaagctggttcctgagacagatggagctggacaccaccttcctgagagagctgaacgtgctggactacagcctgctgatcgccttccagagactgcacgaggacgagagaggccccggcagcagcctgatcttcagaaccgccagaagcgtgcagggcgcccagagccccgaggagagcagagcccagaacagaagactgctgcccgacgcccccaacgccctgcacatcctggacggccccgagcagagatacttcctgggcgtggtggacctggccaccgtgtacggcctgagaaagagactggagcacctgtggaagaccctgagataccccggcagaaccttcagcaccgtgagccccgccagatacgccagaagactgtgccagtgggtggaggcccacaccgagtag

SEQ ID NO: 50554 - protein, 274 aa, Artificial Sequence
  derived and/or modified sequence
MATLKDQLIYNLLKEEQTPQNKITVVGVGAVGMACAISILMKDLADELALVDVIEDKLKGEMMDLQHGSLFLRTPKIVSGKVDILTYVAWKISGFPKNRVIGSGCNLDSARFRYLMGERLGVHPLSCHGWVLGEHGDSSVPVWSGMNVAGVSLKTLHPDLGTDKDKEQWKEVHKQVVESAYEVIKLKGYTSWAIGLSVADLAESIMKNLRRVHPVSTMIKGLYGIKDDVFLSVPCILGQNGISDLVKVTLTSEEEARLKKSADTLWGIQKELQF

SEQ ID NO: 50555 - DNA, 825 bp, Artificial Sequence
  derived and/or modified sequence
atggccaccctgaaggaccagctgatctacaacctgctgaaggaggagcagaccccccagaacaagatcaccgtggtgggcgtgggcgccgtgggcatggcctgcgccatcagcatcctgatgaaggacctggccgacgagctggccctggtggacgtgatcgaggacaagctgaagggcgagatgatggacctgcagcacggcagcctgttcctgagaacccccaagatcgtgagcggcaaggtggacatcctgacctacgtggcctggaagatcagcggcttccccaagaacagagtgatcggcagcggctgcaacctggacagcgccagattcagatacctgatgggcgagagactgggcgtgcaccccctgagctgccacggctgggtgctgggcgagcacggcgacagcagcgtgcccgtgtggagcggcatgaacgtggccggcgtgagcctgaagaccctgcaccccgacctgggcaccgacaaggacaaggagcagtggaaggaggtgcacaagcaggtggtggagagcgcctacgaggtgatcaagctgaagggctacaccagctgggccatcggcctgagcgtggccgacctggccgagagcatcatgaagaacctgagaagagtgcaccccgtgagcaccatgatcaagggcctgtacggcatcaaggacgacgtgttcctgagcgtgccctgcatcctgggccagaacggcatcagcgacctggtgaaggtgaccctgaccagcgaggaggaggccagactgaagaagagcgccgacaccctgtggggcatccagaaggagctgcagttctag

SEQ ID NO: 50556 - DNA, 825 bp, Artificial Sequence
  derived and/or modified sequence
atggcaacactcaaagatcagctgatttacaatctgctcaaggaggagcagaccccccaaaacaaaatcactgttgtgggggttggggctgttgggatggcctgcgctatctccattttgatgaaggacctcgcagatgaactggctctggttgatgtcatagaggataagcttaagggggaaatgatggacctgcaacacggatcattgttcttgaggacgcctaaaatcgtgagtggcaaggttgatatccttacctatgttgcctggaaaatttcaggctttcctaagaaccgcgttatcggatcgggctgtaatctggactctgcgaggtttcgctatctgatgggcgaaagactcggagttcaccctctctcttgtcacggttgggtgctaggcgagcatggcgatagttccgttccggtatggtccggcatgaatgtggccggggtgtcactgaagaccctccaccccgatctaggtacggacaaggacaaggaacaatggaaagaagtgcacaagcaagttgtcgagtcagcctacgaggtgataaagctgaagggctacacatcctgggcaattgggctctcggtcgcagatctcgctgagtctatcatgaagaacctgaggagggtgcatcctgtttcaaccatgattaaggggctgtacgggatcaaagacgacgtgttcctaagcgtcccctgtatactgggccagaacggaatttctgatctggtcaaggtgaccctcacgtccgaggaagaagcccgacttaaaaaaagtgctgacaccctgtgggggattcaaaaggagctgcagttttag

SEQ ID NO: 50557 - DNA, 825 bp, Artificial Sequence
  derived and/or modified sequence
atggccaccctgaaggaccagctgatctacaacctgctgaaggaggagcagaccccccagaacaagatcaccgtggtgggcgtgggcgctgtgggcatggcctgtgccatcagcatcctgatgaaggacctggctgatgagctggccctggtggatgtgattgaggacaagctgaagggggagatgatggacctgcagcacggcagcctcttcctgcggacccccaagatcgtgtctgggaaggtggacatcctgacctacgtggcctggaagatcagcggcttccccaagaacagagtgattggcagcggctgcaacctggacagcgcccgcttccgctacctgatgggagagcggctgggcgtgcaccccctgagctgccacggctgggtgctgggggagcacggggacagctctgtgcctgtgtggagcggcatgaatgtggccggcgtgtccctgaagaccctgcacccagacctgggcacagacaaggacaaggagcagtggaaggaggtgcacaagcaggtggtggagagcgcctatgaagtcatcaagctgaagggctacacctcctgggccatcggcctgtctgtggccgacctggccgagagcatcatgaagaacctgcggcgggtgcaccctgtgtccaccatgatcaagggcctgtatggcatcaaggatgatgtgttcctgtctgtgccctgcatcctgggccagaatggcatcagtgacctggtgaaggtgaccctgaccagcgaggaggaggcccggctgaagaagtctgctgacaccctgtggggcatccagaaggagctgcagttctag

SEQ ID NO: 50558 - DNA, 1310 bp, Artificial Sequence
  derived and/or modified sequence
agtgctgcagccgctgccgccgattccggatctcattgccacgcgcccccgacgaccgcccgacgtgcattcccgattccttttggttccaagtccaatatggcaactctaaaggatcagctgatttataatcttctaaaggaagaacagaccccccagaataagattacagttgttggggttggtgctgttggcatggcctgtgccatcagtatcttaatgaaggacttggcagatgaacttgctcttgttgatgtcatcgaagacaaattgaagggagagatgatggatctccaacatggcagccttttccttagaacaccaaagattgtctctggcaaagtggatatcttgacctacgtggcttggaagataagtggttttcccaaaaaccgtgttattggaagcggttgcaatctggattcagcccgattccgttacctaatgggggaaaggctgggagttcacccattaagctgtcatgggtgggtccttggggaacatggagattccagtgtgcctgtatggagtggaatgaatgttgctggtgtctctctgaagactctgcacccagatttagggactgataaagataaggaacagtggaaagaggttcacaagcaggtggttgagagtgcttatgaggtgatcaaactcaaaggctacacatcctgggctattggactctctgtagcagatttggcagagagtataatgaagaatcttaggcgggtgcacccagtttccaccatgattaagggtctttacggaataaaggatgatgtcttccttagtgttccttgcattttgggacagaatggaatctcagaccttgtgaaggtgactctgacttctgaggaagaggcccgtttgaagaagagtgcagatacactttgggggatccaaaaggagctgcaattttaaagtcttctgatgtcatatcatttcactgtctaggctacaacaggattctaggtggaggttgtgcatgttgtcctttttatctgatctgtgattaaagcagtaatattttaagatggactgggaaaaacatcaactcctgaagttagaaataagaatggtttgtaaaatccacagctatatcctgatgctggatggtattaatcttgtgtagtcttcaactggttagtgtgaaatagttctgccacctctgacgcaccactgccaatgctgtacgtactgcatttgccccttgagccaggtggatgtttaccgtgtgttatataacttcctggctccttcactgaacatgcctagtccaacattttttcccagtgagtcacatcctg

SEQ ID NO: 50559 - DNA, 825 bp, Artificial Sequence
  derived and/or modified sequence
atggccaccctgaaggaccagctgatctacaacctgctgaaggaggagcagacccctcagaacaagatcaccgtagtgggtgttggtgcagtgggcatggcttgcgccatcagtatccttatgaaagacctggcagacgagcttgcgttagtagacgtgattgaggacaagctgaaaggagagatgatggacctccagcacggttctcttttcctgaggacaccaaaaattgtatctggaaaagtggatattctgacctacgtcgcctggaaaatcagcggctttcccaagaatcgcgtgatcggctctggctgcaaccttgacagtgcccgctttaggtacttaatgggagagcggcttggagtgcatcccctctcttgtcacggctgggtgcttggagaacacggagatagcagcgtgccggtgtggagcgggatgaacgtggcgggggtcagtctgaagacactgcaccctgatctcggcactgacaaggacaaagaacagtggaaagaagtccacaagcaggtggtggagagcgcttacgaggtcattaaactcaagggatatacctcctgggcgatagggctgtctgtcgctgatcttgccgagagtatcatgaaaaacctccgccgcgttcatcccgtgtcaactatgatcaaaggtctgtacggcattaaagacgacgtttttttatctgtgccatgtattctggggcagaatgggatctccgacctggtgaaggtgacgctgacttcagaggaagaagcgaggttgaagaaatcggcagacacgctttggggaatccagaaggagttgcagttttag

SEQ ID NO: 50560 - DNA, 825 bp, Artificial Sequence
  derived and/or modified sequence
atggcgacattgaaagaccagctgatatacaatctgttgaaggaggagcagaccccacagaacaagatcaccgtcgtcggcgtgggggctgtcggcatggcttgtgctatttctattctgatgaaggatctggcagacgaactggccttagttgacgtgattgaggataagcttaagggagaaatgatggatcttcaacacggaagcctctttttacgcaccccgaagatcgtgtccgggaaagtagatatcctgacttacgtggcatggaaaatttctggcttcccaaagaacagagtgattggttcaggctgcaatctggactccgcccgatttagatacctgatgggcgaacggttgggcgtgcacccactatcctgtcacgggtgggtgctgggagagcacggagactctagtgtccctgtttggagcggaatgaacgtcgcgggtgtgtccctgaaaacgctgcaccccgacttaggtactgataaggataaagagcagtggaaggaggtgcacaagcaagtggtggagtcagcctatgaagtgattaagttaaagggttacacctcgtgggctattggtttgtccgtggctgatctagccgagtctataatgaaaaacctgcggagagtgcatccagtgtctactatgatcaagggcctgtacggaataaaagacgatgtgtttctttctgttccgtgtatcctgggtcagaacgggatctcagatttggtgaaggtgacattgacgagcgaagaagaggcccgactgaagaagagtgctgatacactgtggggaatccagaaggagctgcagttctag

SEQ ID NO: 50561 - protein, 171 aa, Artificial Sequence
  derived and/or modified sequence
MFENLNTALTPKLQASRSFPHLSKPVAPGSAPLGSGEPGGPGLWVGSSQHLKNLGKAMGAKVNDFLRRKEPSSLGSVGVTEINKTAGAQLASGTDAAPEAWLEDERSVLQETFPRLDPPPPITRKRTPRALKTTQDMLISSQPVLSSLEYGTEPSPGQAQDSAPTAQPDVP

SEQ ID NO: 50562 - protein, 315 aa, Artificial Sequence
  derived and/or modified sequence
MLVLVAQAGGDTLKVTGHYVKCVFLLFVSHLLSEPLSRTVDHGMFENLNTALTPKLQASRSFPHLSKPVAPGSAPLGSGEPGGPGLWVGSSQHLKNLGKAMGAKVNDFLRRKEPSSLGSVGVTEINKTAGAQLASGTDAAPEAWLEDERSVLQETFPRLDPPPPITRKRTPRALKTTQDMLISSQPVLSSLEYGTEPSPGQAQDSAPTAQPDVPADASQPEATMEREERGKVLPNGEVSLSVPDLIHKDSQDESKLKMTECRRASSPSLIERNGFKLSLSPISLAESWEDGSPPPQARTSSLDNEGPHPDLLSFE

SEQ ID NO: 50563 - protein, 272 aa, Artificial Sequence
  derived and/or modified sequence
MFENLNTALTPKLQASRSFPHLSKPVAPGSAPLGSGEPGGPGLWVGSSQHLKNLGKAMGAKVNDFLRRKEPSSLGSVGVTEINKTAGAQLASGTDAAPEAWLEDERSVLQETFPRLDPPPPITRKRTPRALKTTQDMLISSQPVLSSLEYGTEPSPGQAQDSAPTAQPDVPADASQPEATMEREERGKVLPNGEVSLSVPDLIHKDSQDESKLKMTECRRASSPSLIERNGFKLSLSPISLAESWEDGSPPPQARTSSLDNEGPHPDLLSFE

SEQ ID NO: 50564 - DNA, 702 bp, Artificial Sequence
  derived and/or modified sequence
gttaagagacccaaagcccggagagtgggctcccaggacagcttgctggagatcaccttccgctccggagccctgcccgtgctctgtgaccccacgacccctaagccagaggacctgcattcgccgccgctgggcgcgggcttggctgactttgcccaccctgcgggcagccccttagttgaccacggcatgtttgagaatttgaacacagccctcactccaaagctccaggccagccgctccttcccccacttgtccaagcccgtggcccccggctctgcccctctgggctctggtgagcctggggggccaggactctgggtgggcagcagccagcacctcaagaacctgggcaaagccatgggggccaaagtgaatgacttcctgaggagaaaggagccctccagcctgggcagtgtgggtgtgacagagatcaacaagactgcaggagcacagctggccagtgggactgacgcggctccagaggcttggctagaggatgaaaggtcagtcctgcaagaaacatttcctcggctggatcctccacctcccataaccagaaagcgaacccctcgggccctgaagaccacccaggacatgctgatttcatcacagcctgtcctcagcagtctggagtatgggacagagccatcacctgggcaggcccaggactccgctcccactgcccagcctgacgtccca

SEQ ID NO: 50565 - DNA, 1049 bp, Artificial Sequence
  derived and/or modified sequence
gcctggcggttccagggtgcacaccactcctcgtagcaggtcccctgtcttgtgtgctgtgtccccccgaggtatgctggtgctggtggcccaggcaggaggtgacactctcaaagtgactggtcactacgtaaaatgtgtctttcttttgtttgtttcccacctgctttccgagcccctttctcggacagttgaccacggcatgtttgagaatttgaacacagccctcactccaaagctccaggccagccgctccttcccccacttgtccaagcccgtggcccccggctctgcccctctgggctctggtgagcctggggggccaggactctgggtgggcagcagccagcacctcaagaacctgggcaaagccatgggggccaaagtgaatgacttcctgaggagaaaggagccctccagcctgggcagtgtgggtgtgacagagatcaacaagactgcaggagcacagctggccagtgggactgacgcggctccagaggcttggctagaggatgaaaggtcagtcctgcaagaaacatttcctcggctggatcctccacctcccataaccagaaagcgaacccctcgggccctgaagaccacccaggacatgctgatttcatcacagcctgtcctcagcagtctggagtatgggacagagccatcacctgggcaggcccaggactccgctcccactgcccagcctgacgtcccagcagacgcttcacagccagaggccaccatggaaagagaagagagaggcaaagttctgcccaatggagaggtttccctgtcagtacctgacctaatccacaaggatagccaggacgaatccaagctaaagatgactgagtgcagaagggcctcctcccccagccttatcgagaggaatggcttcaaactcagcttgagccccatcagcctggctgagtcctgggaggatggcagcccccctcctcaggcacggacctccagcctcgacaatgagggccctcacccagacctgctgtcctttgaatagagcctctgctctttcctgctgagctctg

SEQ ID NO: 50566 - DNA, 4118 bp, Artificial Sequence
  derived and/or modified sequence
actggaaagttcaagagtgtctttgctggctctttcttgaatatttccaaagccttggaagttacaggttttgggtgtgggataaggaaaaactgaatgatagagcacaggtaccgctcccctttcctcatcatgcctctctgtcgcctctttgttcatagttgaccacggcatgtttgagaatttgaacacagccctcactccaaagctccaggccagccgctccttcccccacttgtccaagcccgtggcccccggctctgcccctctgggctctggtgagcctggggggccaggactctgggtgggcagcagccagcacctcaagaacctgggcaaagccatgggggccaaagtgaatgacttcctgaggagaaaggagccctccagcctgggcagtgtgggtgtgacagagatcaacaagactgcaggagcacagctggccagtgggactgacgcggctccagaggcttggctagaggatgaaaggtcagtcctgcaagaaacatttcctcggctggatcctccacctcccataaccagaaagcgaacccctcgggccctgaagaccacccaggacatgctgatttcatcacagcctgtcctcagcagtctggagtatgggacagagccatcacctgggcaggcccaggactccgctcccactgcccagcctgacgtcccagcagacgcttcacagccagaggccaccatggaaagagaagagagaggcaaagttctgcccaatggagaggtttccctgtcagtacctgacctaatccacaaggatagccaggacgaatccaagctaaagatgactgagtgcagaagggcctcctcccccagccttatcgagaggaatggcttcaaactcagcttgagccccatcagcctggctgagtcctgggaggatggcagcccccctcctcaggcacggacctccagcctcgacaatgagggccctcacccagacctgctgtcctttgaatagagcctctgctctttcctgctgagctctgcccttgtcttcctgctgctttctcctccactgcgcacactggccctggcctcaactccgctgtgccctttgtcttccttgtatgaggcaccagcagagagccagtcgtccatcatgggattttgcaggactggaagtccttgagtagttctagttaaagagtctatccgcagaatggctgaaggacttgatgccgttttgagcctaattttctgtaacctcctctgagtgggctgcagcccttggacattagagctcttccactcttgagcttgtcctgtcttctcagtgaattgcagggccaccagctcaggacaatggatcttacaggaattctttttgcctgtcccctacatgcgcctcctcccctgctgttctccctcccacacccctgtcccttctctctcctccttgatgggtccgatgcccctggcctcagcgggaggaaggctggatgaggaatgatgtgtttggcttgatgacaggccatggcctagaaagccacacaccctgaccacagcccagccatagctcctcttggtcccaggacagtgcaggcccctggttgccatgtttgctctgcccctggggtggaggccagaggagatgcttaccaggcctgagaccttgagagttcacccagggtttgaacgctgccacccagggttcccaaggtttctcccatctggtcagatgtcgaacacaaaatgtgggcattctgcacggaaggaaagatcaggcttctcttgctgagtgtgtgaagacagggagagccaggccccagcagatgcggcctagcacactctgatttggttttgtggggagggcccaggaacttgggggtggtcttggcattcagagctggtgctaaaaacccagagcagaagcagggagaagggagtgaggatgggacagagaagagcgaccactggggatcagaacagcttttcaggggccaccttgcagcctaaaataatgccgtttcagggcctgggcctgctgtgagagccagaatgaagcatgtacaagattggaatgtgagaagaactgtggggggaaaccagttttaattaagtggaagtgctttgtgcttgtgctgaagttgcctgggcctcctgcagctctggacctcactggagcggccccgccctgcccttgcctgcctttcttttatgctgatgctggtgggctttttcctgcttcaggatccatgtaagggactgaccaggttcatccagccttaactggttcctgcaacccacttttaggtctcccaccaggggcctattgtgctgtcttcctgtgaccagcagatcctgtaagggggtgatcctaattctggggctctttgcagcaagaggagaacgttctttttcttgaacaaggtggccggttccctgggagaaggctgggaatggcacgtccggccagggcaggcggtgcggcatcctcctcctgggattcctgtggcctcccctgttctattcattgtttggcttcccacccataagctctgggatacccagggcttgcttcccagctcttctcatctccaagcctctgctccccttcccaccaccactgccatataaaatggccatgctaactcctacacaactaggagcctcagcaggattgctaggatgtgggttccttcctgcatgcttgcttctgcagctgtgtggccttgccatggccctcccaccactttcccttctaccttgccttccattgtcttccttctcccagaaagccaggtttcaccacgtgctcaccacaaactgtctcccctccctcgtaggagtcactgcagtagggcacctgcaggccctggtagagtgagcagggcttacgtgtacattctttctcactctaaggatgtgatatctgaccctgatgtcagagaggaggtctcaggactagcattcggggtcctttgagtgttcccagaatggtttggggtatcacacaaaacaccagagctgaggatagggatagagtccccaaacacacatcctgggagcaagccacttcatctgagcttcccataccaggagcatggtttgtgctttgatgggaaacctagcaagcccctgcactctggggcttctcctctcctggagcccagggcggctctggcccgatgatatggcagccataggtacaggtattgcaggtgcagcctttcttaagtaccctgcctccactctatagcccagctgctgctggagtccaggaccttagacccaggatgagcaaaaggatcccaccaggttgtccaggaccattgccagggtgaccccagagttcttcagacctgtgtctgatactgaatacagtgccatgggaccctgctccaatctaactgcctacaacctgcccgtccccctgctgcagggatgttgctgctacctcgggaggctctctgagactggtgtctggtcttagatgctgcacatagtacctggtgctagggtctaggggctgcccaaagcccagcaggaacagctactactcatcctgcagaggccttggcccagaccagctttccatccaaagcctcacctggtttccatgtccatctcaacagtctggccttcctgtgactgtagcctggcagccacaccctcagtaatcccgcacagtgagtccagcttctctgggagcttggccttcagttagcccagtccatgagagggcagggtaatgaggaggagtaaaggacctatcttctctgtccacataaggaagttgggaccacaaggtcttttatctccttgttactccccaaccccaccataacctcctactcagcacacagctgtatcctggtagattataaggtgagcttccagaacctggcaggaggctggtgtatccccctgcacagagggaagtgtatctgaatgttgtgtatgtggctgatatggaagacatacatgtatgcaatccatcagcgtttaaagaagaagattggctccagttcggaggaggaggaggaagattacagatctattctgagtattttttagagagttaatatttatatttttagtaattttctggtagaaggaaattgcacaataaaatgatttggttt

SEQ ID NO: 50567 - DNA, 948 bp, Artificial Sequence
  derived and/or modified sequence
atgctggtgctggtggcccaggccggcggcgacaccctgaaggtgaccggccactacgtgaagtgcgtgttcctgctgttcgtgagccacctgctgagcgagcccctgagcagaaccgtggaccacggcatgttcgagaacctgaacaccgccctgacccccaagctgcaggccagcagaagcttcccccacctgagcaagcccgtggcccccggcagcgcccccctgggcagcggcgagcccggcggccccggcctgtgggtgggcagcagccagcacctgaagaacctgggcaaggccatgggcgccaaggtgaacgacttcctgagaagaaaggagcccagcagcctgggcagcgtgggcgtgaccgagatcaacaagaccgccggcgcccagctggccagcggcaccgacgccgcccccgaggcctggctggaggacgagagaagcgtgctgcaggagaccttccccagactggacccccccccccccatcaccagaaagagaacccccagagccctgaagaccacccaggacatgctgatcagcagccagcccgtgctgagcagcctggagtacggcaccgagcccagccccggccaggcccaggacagcgcccccaccgcccagcccgacgtgcccgccgacgccagccagcccgaggccaccatggagagagaggagagaggcaaggtgctgcccaacggcgaggtgagcctgagcgtgcccgacctgatccacaaggacagccaggacgagagcaagctgaagatgaccgagtgcagaagagccagcagccccagcctgatcgagagaaacggcttcaagctgagcctgagccccatcagcctggccgagagctgggaggacggcagcccccccccccaggccagaaccagcagcctggacaacgagggcccccaccccgacctgctgagcttcgagtag

SEQ ID NO: 50568 - DNA, 948 bp, Artificial Sequence
  derived and/or modified sequence
atgttggttctggtggcccaggctggcggcgatacacttaaggtcacaggacactatgtgaagtgtgttttcctcttgttcgtgtcccatctcttaagcgagcccctgtcgcgaacagttgaccatggaatgttcgagaacctgaataccgcacttacacccaaactgcaggcctctaggtctttcccccatttatccaagccagtggcccctgggtctgccccactagggtcaggcgagcctggaggcccgggcttgtgggtggggagttcccaacatttgaagaatttaggcaaggccatgggagccaaagttaacgattttttgcggagaaaggaacccagtagtttgggctctgtcggcgtgactgaaatcaataaaactgcaggtgcacagttagcttcagggaccgatgcggctccagaggcgtggctggaggacgagaggtcagtccttcaggagacatttccacgcctggatccccctccaccaatcacgcgaaagaggaccccacgagctcttaaaacaactcaagatatgctaatttcctcccagccagtgttgagttcactcgaatatggcactgagccatctccgggccaggctcaggattctgccccaactgcccaacctgacgtgcctgcagacgcttcacaaccggaggccactatggagcgcgaggagcgtggtaaagtgctgcctaatggagaagtgtccctatctgttccggatttgattcacaaggactcccaggacgagagcaagctaaaaatgacagagtgccggcgtgcctctagcccttccctgatcgagcgaaacggctttaaactgagcctctcaccaatcagtcttgccgaatcatgggaagatggatctccaccaccgcaagctcggacatccagcctggacaacgaggggccgcaccccgacctgctgagcttcgaatag

SEQ ID NO: 50569 - DNA, 948 bp, Artificial Sequence
  derived and/or modified sequence
atgctggtgctggtggcccaggccggcggggacaccctgaaggtgacaggccactacgtgaagtgtgtgttcctgctgtttgtgagccacctgctgtctgagcccctgagcaggacagtggaccacggcatgtttgagaacctgaacacagccctgacccccaagctgcaggccagccgctccttcccccacctgagcaagcctgtggcccctggcagcgcccccctgggcagcggggagcccggcggccctggcctgtgggtgggcagcagccagcacctgaagaacctgggcaaggccatgggcgccaaggtgaatgacttcctgcggaggaaggagcccagcagcctgggctctgtgggcgtgacagagatcaacaagacagctggggcccagctggccagcggcacagatgctgcccctgaggcctggctggaggatgagaggtctgtgctgcaggagaccttcccccggctggaccccccaccacccatcaccaggaagaggaccccccgggccctgaagaccacccaggacatgctgatcagcagccagcctgtgctgagcagcctggagtatggaacagagcccagccctggccaggcccaggacagcgcccccacagcccagccagatgtgcctgcagatgccagccagcctgaggccaccatggagcgggaggagcggggcaaggtgctgcccaatggagaggtgtccctgtctgtgcctgacctgatccacaaggacagccaggatgagagcaagctgaagatgacagagtgccggcgggccagcagccccagcctcatcgagagaaatggcttcaagctgagcctgagccccatcagcctggccgagagctgggaggatggcagccccccaccccaggcccggaccagcagcctggacaatgaaggcccccacccagacctgctgagctttgaatag

SEQ ID NO: 50570 - DNA, 948 bp, Artificial Sequence
  derived and/or modified sequence
atgctggtgctggtggcccaggccggcggcgacaccctgaaggtgactgggcactatgtgaaatgcgtgttcctgctgtttgtgagccacctgctatctgagccactctccaggacagtagatcatgggatgttcgagaatcttaatactgccttgacacctaaactccaggcttcacgctccttccctcatcttagtaagcctgtcgccccgggcagtgcccctctgggttccggggaacctggaggacccgggctctgggtggggtcttcacaacaccttaaaaacctcggaaaggccatgggcgctaaggtgaatgattttctcaggaggaaggagcctagctctctggggtctgtgggtgtgactgaaattaacaagacagcgggcgcacagttggccagtggaaccgatgccgctcctgaggcttggttagaagacgagagatccgtgttgcaagagacattcccacgcttagatcccccccctcccatcacgaggaagaggactccccgcgccctaaagaccacgcaggacatgctgatttcaagtcagccagtgttaagctctctggaatacggcaccgagccaagccctgggcaggcacaggactctgcccccaccgctcagcccgatgtccctgctgatgcgtctcagccagaagccactatggaacgcgaggagagggggaaagtgctccctaatggcgaggtgagcttatctgtaccagatttaatccataaagactcacaagatgaatctaagctgaaaatgacagaatgcagaagggcatcgtcacccagtctcatagagaggaacggctttaaactgtctctaagccccattagcctcgccgaatcatgggaggacgggtcgccgccacctcaggcacgcacttcatccctggacaatgagggtccacacccggacttgctgtctttcgaatag

SEQ ID NO: 50571 - DNA, 948 bp, Artificial Sequence
  derived and/or modified sequence
atgcttgtgctggtcgcccaagcaggtggggacactctcaaagtaaccgggcactatgtcaaatgtgtctttctactgttcgtgagccatctgctaagtgaacccttgagcagaaccgtcgaccatggaatgttcgagaacctcaataccgccctcactcccaagttacaggcttcacgatcttttcctcacctcagcaagccagtcgcccctggaagtgctcccctaggttctggagagccgggaggcccaggactatgggtcgggagctcccagcatcttaagaaccttggaaaggccatgggcgctaaggtgaacgacttcctacggcgtaaagagccatcatccttgggctccgtgggtgtcaccgagatcaacaaaacagctggggctcagctggcctcaggcaccgatgccgcacccgaagcgtggttggaggatgagagaagcgtgcttcaggagactttccccaggctggatcctccgcctccaatcacccgcaagcggactcctagagctctgaagacaactcaagatatgctgatttcttcacagcccgttctgtccagcctcgagtatggtaccgagccaagccccggtcaggcccaagattccgcgccaacagcacagcctgacgtgcctgcagatgcaagccaacccgaagctacaatggaaagagaggagcgagggaaggtgctacctaatggggaagtctccctgagcgtgccagacctgattcacaaagacagccaggatgagtccaaactgaaaatgactgagtgtcgccgtgcttccagtcccagcctcattgaaagaaacggcttcaagctgtcgctcagccctatctctttggcggaatcatgggaagacggaagccctcctccacaggccaggaccagcagtctcgataacgaggggcctcatcctgacttactgagctttgaatag

SEQ ID NO: 50572 - protein, 139 aa, Artificial Sequence
  derived and/or modified sequence
MDSKYQCVKLNDGHFMPVLGFGTYAPAEVPKSKALEAVKLAIEAGFHHIDSAHVYNNEEQVGLAIRSKIADGSVKREDIFYTSKLWSNSHRPELVRPALERSLKNLQLDYVDLYLIHFPVSVKEDIGILTWKKSPKHNS

SEQ ID NO: 50573 - DNA, 420 bp, Artificial Sequence
  derived and/or modified sequence
atggatagcaaatatcagtgcgtcaaattaaatgacggacactttatgcccgtcctaggcttcgggacatatgctcccgccgaagtgcctaagtctaaagcactcgaagctgtaaagttggcaatcgaagccggcttccatcatattgacagtgctcacgtctataacaacgaggaacaggtaggcctagcaatcaggtccaagattgctgatggctcagttaagcgtgaggatatcttctacactagtaagctgtggagcaatagccaccgtcccgagttggtgaggccagcactcgagagaagcctgaagaacctgcagctggattacgtggatctctacttgatccactttccagtgagcgtaaaagaagacatcggcatcttgacttggaaaaaatctccaaaacacaacagctag

SEQ ID NO: 50574 - DNA, 420 bp, Artificial Sequence
  derived and/or modified sequence
atggacagcaagtaccagtgtgtgaagctgaatgatggccacttcatgcctgtgctgggcttcggcacctacgccccagctgaggtgcccaagagcaaggccctggaggccgtgaagctggccatcgaggccggcttccaccacattgattctgcccacgtgtacaacaatgaggagcaggtgggcctggccatccgcagcaagattgctgatggctctgtgaagcgggaggacatcttctacaccagcaagctgtggagcaacagccacaggcctgagctggtgcggcctgccctggagaggagcctgaagaacctgcagctggactatgtggacctgtacctgatccacttccctgtgtctgtgaaggaggacatcggcatcctgacctggaagaagagccccaagcacaacagctag

SEQ ID NO: 50575 - DNA, 945 bp, Artificial Sequence
  derived and/or modified sequence
atttgctaaccaggccagtgacagaaatggattcgaaataccagtgtgtgaagctgaatgatggtcacttcatgcctgtcctgggatttggcacctatgcgcctgcagaggttcctaaaagtaaagctctagaggccgtcaaattggcaatagaagccgggttccaccatattgattctgcacatgtttacaataatgaggagcaggttggactggccatccgaagcaagattgcagatggcagtgtgaagagagaagacatattctacacttcaaagctttggagcaattcccatcgaccagagttggtccgaccagccttggaaaggtcactgaaaaatcttcaattggactatgttgacctctatcttattcattttccagtgtctgtaaaggaggacatagggattttaacatggaagaagagccctaaacataactcctaattcctttctatggaacagaaagcaattttgaatccatacttccgtgattgcatgtctacaagaaaagagagtgcagaatcctcaaagcctctgcctcaaaaacttgaggaaatgacaatcatctccttgaaggcacaaggtcttatttatgattcctgatttcacctcttgggatgttcacagacacagagtttcatgaagctgtggtgtccagaaaacctgctgcacatagggtgcacaatgagtttccatcttcttgcctcttttcaaggggcaagaactcagtccgggaatgtcttaaactacaaaccttcatgggaaaccttgttgcttctgcttcctctcttttcacactggaggttttatttttgcttagccatgaattcttgtgtcattcataacttttgtcttaaggtactgaaaactagtcaggctagttaatgcaaaagggtatattagatatgataatgggaaatcaaagccagggctacattaagaa

SEQ ID NO: 50576 - DNA, 420 bp, Artificial Sequence
  derived and/or modified sequence
atggacagcaagtaccagtgcgtgaagctgaacgacggccacttcatgccagttctcgggttcggtacctatgcgcctgccgaagttccaaaatccaaggcactcgaggccgtaaaacttgcaatcgaagctggatttcatcatattgatagcgcccacgtctacaacaatgaggagcaagtgggtctggcgatccgctccaagatcgctgatgggtctgtgaaaagggaggacatattctacacatccaaactgtggtccaactctcaccgcccagaactggtgcggcccgcactagaaaggtccctgaagaacctgcagcttgactatgtggacctctacctgatccacttccctgtttccgtgaaggaagacatcggcattctgacttggaaaaaatcacccaagcacaactcctag

SEQ ID NO: 50577 - DNA, 420 bp, Artificial Sequence
  derived and/or modified sequence
atggacagcaaataccagtgtgttaaactgaacgacggccacttcatgcctgtgctgggattcggtacttatgcgcctgccgaggtccccaaaagtaaagccctggaggcagtaaagcttgccatcgaagccggatttcatcacattgatagtgcccatgtgtataacaatgaggagcaggttggtctcgccattaggtcgaaaatagctgatggatctgtgaaacgtgaagatatattctatacatccaaattgtggtccaatagccaccgtcctgaactggtccgccctgcgcttgaacgctcactgaagaaccttcagctggactacgttgacctgtacctgatccacttccctgtgagcgtgaaagaagacataggcattctcacctggaagaaaagtcccaaacataattcttag

SEQ ID NO: 50578 - DNA, 420 bp, Artificial Sequence
  derived and/or modified sequence
atggacagcaagtaccagtgcgtgaagctgaacgacggccacttcatgcccgtgctgggcttcggcacctacgcccccgccgaggtgcccaagagcaaggccctggaggccgtgaagctggccatcgaggccggcttccaccacatcgacagcgcccacgtgtacaacaacgaggagcaggtgggcctggccatcagaagcaagatcgccgacggcagcgtgaagagagaggacatcttctacaccagcaagctgtggagcaacagccacagacccgagctggtgagacccgccctggagagaagcctgaagaacctgcagctggactacgtggacctgtacctgatccacttccccgtgagcgtgaaggaggacatcggcatcctgacctggaagaagagccccaagcacaacagctag

SEQ ID NO: 50579 - protein, 394 aa, Artificial Sequence
  derived and/or modified sequence
MSREMQDVDLAEVKPLVEKGETITGLLQEFDVQEQDIETLHGSVHVTLCGTPKGNRPVILTYHDIGMNHKTCYNPLFNYEDMQEITQHFAVCHVDAPGQQDGAASFPAGYMYPSMDQLAEMLPGVLQQFGLKSIIGMGTGAGAYILTRFALNNPEMVEGLVLINVNPCAEGWMDWAASKISGWTQALPDMVVSHLFGKEEMQSNVEVVHTYRQHIVNDMNPGNLHLFINAYNSRRDLEIERPMPGTHTVTLQCPALLVVGDSSPAVDAVVECNSKLDPTKTTLLKMADCGGLPQISQPAKLAEAFKYFVQGMGYMPSASMTRLMRSRTASGSSVTSLDGTRSRSHTSEGTRSRSHTSEGTRSRSHTSEGAHLDITPNSGAAGNSAGPKSMEVSC

SEQ ID NO: 50580 - protein, 158 aa, Artificial Sequence
  derived and/or modified sequence
MSREMQDVDLAEVKPLVEKGETITGLLQEFDVQEQDIETLHGSVHVTLCGTPKGNRPVILTYHDIGMNHKTCYNPLFNYEDMQEITQHFAVCHVDAPGQQDGAASFPAGYMYPSMDQLAEMLPGVLQQFGLKSIIGMGTGAGAYILTRFALNNPEMVE

SEQ ID NO: 50581 - protein, 95 aa, Artificial Sequence
  derived and/or modified sequence
MSREMQDVDLAEVKPLVEKGETITGLLQEFDVQTKPATTPSSTTRTCRRSPSTLPSATWTPLASRTAQPPSPQGTCTPPWISWLKCFLESFNSLG

SEQ ID NO: 50582 - DNA, 1185 bp, Artificial Sequence
  derived and/or modified sequence
atgagcagggaaatgcaggatgtagaccttgcggaggtcaagccactggtggagaagggcgagaccataacgggtctgctgcaggagtttgatgttcaggagcaagatatcgagacactacatggatccgtgcacgtcactctgtgcggaacacccaaaggcaaccgacccgtgattttaacttatcatgacattgggatgaaccataagacgtgctataacccgctgtttaattacgaagacatgcaagagattacccagcactttgccgtctgtcatgtggacgcaccagggcagcaggatggcgccgcgtcctttcctgccgggtacatgtatccctccatggaccagttagctgaaatgttgcccggggtgttgcagcagtttggcttaaagtccattattgggatgggtaccggagccggcgcttacatcctcactcgatttgcgcttaataaccctgagatggtcgagggcctggtgctaattaatgtgaacccttgtgccgagggttggatggactgggctgcatctaagatttccggctggacacaggctctgcccgacatggtcgtgtcgcacctgttcggtaaggaggaaatgcagagtaacgttgaggtggtgcatacctacagacagcatattgttaacgatatgaatcctggcaacctccatttgtttattaacgcctacaacagcaggcgcgatctcgagatagaacggcccatgcccggaactcataccgtaacgcttcagtgccctgctctgttggtcgtgggagactcctcacctgccgttgatgccgttgtcgagtgtaattcaaagctggatcccacaaagaccactcttctcaagatggcagattgtggcggacttccccagatctcgcagcccgcaaaactggccgaggcttttaagtatttcgtgcaggggatgggctatatgccgagtgccagcatgacccgattaatgcgctccaggactgcaagcgggtcgtctgtcacctccctcgacgggactcggtcaagatcccatacgagcgaaggcacccggtctcgctcacatactagtgagggaaccagaagcaggtcccatactagtgagggtgcgcatctggatatcacacctaatagtggcgccgccggaaactcagctggacctaagtctatggaagtgtcctgttag

SEQ ID NO: 50583 - DNA, 1185 bp, Artificial Sequence
  derived and/or modified sequence
atgtcacgcgaaatgcaagatgtcgatctggccgaagtcaagcccctggtggagaaaggggagacaatcacggggttactgcaagagtttgacgtccaggagcaggacatcgagacactccacggaagtgtacatgtcacgttatgcggaacccccaagggaaaccggccagtgatcctgacctaccacgacattgggatgaatcataagacttgttacaaccccctatttaactatgaagatatgcaggagattactcaacatttcgcggtttgtcatgtggacgctcccggacagcaggacggggctgcatctttccccgcaggttatatgtaccccagcatggaccaattggctgagatgttgcctggtgtgcttcagcagtttggactaaaatcaattattggcatgggaacaggtgcaggagcgtatattctgacgcgctttgcattgaataatccagagatggtggaggggcttgtactcatcaatgttaacccatgtgctgaaggctggatggattgggccgcctctaaaataagcggttggactcaggctctgccagacatggttgtgagccatttgtttggtaaagaggagatgcagagcaacgtggaagtggtccatacttacaggcaacacatcgtgaatgacatgaaccctggaaacctacatctattcattaacgcctataacagtagacgagacctggagattgagcgccccatgcccgggactcacacggttaccctgcagtgtcccgccctcttggtggtcggggactcatctcctgctgtggatgccgtcgtggagtgtaattcaaagcttgatcctacgaagacgactcttcttaaaatggctgattgcggaggactgccacaaatttctcaacccgccaagcttgcagaggcatttaaatactttgtccaagggatgggctacatgccctccgcgtcaatgacaagactcatgaggtcgcgcactgctagcggcagttctgtgacgtctttggacggtaccaggtcccgcagtcacacttctgaaggcaccaggtcgcggagccatacatccgaaggtactaggagcaggagtcacacttctgaaggggcccacctggacataacccccaattcaggggctgcagggaacagcgctggaccaaaatctatggaagtctcctgttag

SEQ ID NO: 50584 - DNA, 498 bp, Artificial Sequence
  derived and/or modified sequence
atgtctcgggagatgcaagacgtcgatctcgctgaagtcaaacctcttgttgagaagggcgagactattaccgggctgctccaagagttcgacgtccaggaacaggatattgaaaccctgcacgggtccgtccacgtgacattgtgcggcacacctaaagggaaccgacctgtcattctcacataccacgatatcggtatgaaccacaagacttgttataatccactgtttaattatgaagacatgcaggagatcacccaacattttgcggtgtgccacgtggatgcgcctggccagcaagatggggcggccagtttccccgcggggtacatgtacccatcaatggaccagcttgctgagatgttacccggggtcctccagcaatttggcttgaagtcaatcatcggcatggggacaggggccggagcctacattctcaccagattcgccctgaataatccggagatggtcgaggggctggtgctgatcaatgtgtag

SEQ ID NO: 50585 - DNA, 477 bp, Artificial Sequence
  derived and/or modified sequence
atgagtcgtgagatgcaggatgtagacctggctgaggtgaaacctcttgtcgaaaagggcgagactatcaccgggttattgcaggaatttgatgttcaagagcaagacattgagaccttacacggcagtgttcatgtgaccctgtgtggcacgccaaagggcaacagacccgtgatactcacctaccacgacatcggcatgaatcacaagacctgctacaacccgctgttcaattatgaagacatgcaggaaatcacacagcatttcgctgtgtgccacgttgacgccccaggtcagcaggatggtgctgcgagttttccagccggttacatgtacccttcaatggaccaattagcagaaatgctgccaggggtgctccagcagttcgggctcaaaagtatcattggtatgggcaccggggctggagcctacatccttacccggttcgccctgaacaaccccgaaatggtcgagtag

SEQ ID NO: 50586 - DNA, 402 bp, Artificial Sequence
  derived and/or modified sequence
atgagtagggagatgcaggacgtggatctggcagaggtgaagcccctggtggagaaaggtgagacaatcacagggctcctgcaggaatttgacgttcaggagcaggatattgagaccctacatgggagcgttcacgttactctctgcggcacacccaaggggaatcgaccagtgatcctcacctaccacgatatcgggatgaaccacaagacatgctataacccacttttcaactacgaagacatgcaggagattacacagcactttgcagtttgccacgtggacgcccctggccagcaggatggcgcagcttcatttccggctggatacatgtatcccagcatggatcagctcgccgagatgctgcctggtgtacttcagcagtttggcctcaaatcgtag

SEQ ID NO: 50587 - DNA, 477 bp, Artificial Sequence
  derived and/or modified sequence
atgtcccgggagatgcaagacgtggacctcgccgaggtgaaacctttagtggaaaagggcgagacaattacgggcctcctgcaagaatttgacgttcaggagcaggacatcgagacacttcatggctccgttcatgttacgctttgcggtactccaaaaggcaataggcccgtcatcttgacctatcacgacattggaatgaaccacaagacctgctataatcccttgttcaactatgaagacatgcaggagattacacagcacttcgcagtttgccacgttgacgcaccgggacagcaggacggcgccgcttcctttccagccggttatatgtatccttcaatggaccagctggctgagatgctccccggagtgctgcaacagttcggcctcaagtctattattggcatgggtaccggggctggcgcctacattctgactaggttcgcccttaacaatcccgaaatggtagagtag

SEQ ID NO: 50588 - DNA, 1185 bp, Artificial Sequence
  derived and/or modified sequence
atgagccgggagatgcaggatgtggacctggccgaggtgaagcccctggtggagaagggggagaccatcaccggcctgctgcaggagtttgatgtgcaggagcaggacatcgagaccctgcacggctctgtgcacgtgaccctgtgtggcacccccaagggcaacagacctgtgatcctgacctaccatgacatcggcatgaaccacaagacctgctacaaccccctcttcaactatgaggacatgcaggagatcacccagcactttgctgtgtgccacgtggatgcccctggccagcaggatggagctgccagcttccctgctggctacatgtaccccagcatggaccagctggccgagatgctgcccggggtgctgcagcagtttggcctgaagagcatcatcggcatgggcactggagctggggcctacatcctgaccaggtttgccctgaacaaccctgagatggtggagggcctggtgctgatcaacgtgaacccctgtgccgagggctggatggactgggccgccagcaagatcagcggctggacccaggccctgcctgacatggtggtgagccacctgtttgggaaggaggagatgcagagcaatgtggaggtggtgcacacctaccggcagcacatcgtgaatgacatgaaccctggcaacctgcacctgttcatcaatgcctacaacagccggcgggacctggagattgagcggcccatgcctggcacccacacagtgaccctgcagtgcccagccctgctggtggtgggggacagcagccctgctgtggatgctgtggtggagtgcaacagcaagctggaccccaccaagaccaccctgctgaagatggctgactgtggcggcctgccccagatcagccagcctgccaagctggccgaggccttcaagtactttgtgcagggcatgggctacatgcccagcgcctccatgacccggctgatgaggagcaggacagccagcggcagctctgtgaccagcctggatggcaccaggagccgcagccacaccagcgagggcaccaggagccgcagccacaccagcgagggcaccaggagccgcagccacaccagcgagggcgcccacctggacatcacccccaacagcggggctgctggcaacagcgctggccccaagtccatggaggtgtcctgctag

SEQ ID NO: 50589 - DNA, 498 bp, Artificial Sequence
  derived and/or modified sequence
atgagccgggagatgcaggatgtggacctggccgaggtgaagcccctggtggagaagggggagaccatcaccggcctgctgcaggagtttgatgtgcaggagcaggacatcgagaccctgcacggctctgtgcacgtgaccctgtgtggcacccccaagggcaacagacctgtgatcctgacctaccatgacatcggcatgaaccacaagacctgctacaaccccctcttcaactatgaggacatgcaggagatcacccagcactttgctgtgtgccacgtggatgcccctggccagcaggatggagctgccagcttccctgctggctacatgtaccccagcatggaccagctggccgagatgctgcccggggtgctgcagcagtttggcctgaagagcatcatcggcatgggcactggagctggggcctacatcctgaccaggtttgccctgaacaaccctgagatggtggagggcctggtgctgatcaacgtgtag

SEQ ID NO: 50590 - DNA, 477 bp, Artificial Sequence
  derived and/or modified sequence
atgagccgggagatgcaggatgtggacctggccgaggtgaagcccctggtggagaagggggagaccatcaccggcctgctgcaggagtttgatgtgcaggagcaggacatcgagaccctgcacggctctgtgcacgtgaccctgtgtggcacccccaagggcaacagacctgtgatcctgacctaccatgacatcggcatgaaccacaagacctgctacaaccccctcttcaactatgaggacatgcaggagatcacccagcactttgctgtgtgccacgtggatgcccctggccagcaggatggagctgccagcttccctgctggctacatgtaccccagcatggaccagctggccgagatgctgcccggggtgctgcagcagtttggcctgaagagcatcatcggcatgggcactggagctggggcctacatcctgaccaggtttgccctgaacaaccctgagatggtggagtag

SEQ ID NO: 50591 - DNA, 402 bp, Artificial Sequence
  derived and/or modified sequence
atgagccgggagatgcaggatgtggacctggccgaggtgaagcccctggtggagaagggggagaccatcaccggcctgctgcaggagtttgatgtgcaggagcaggacatcgagaccctgcacggctctgtgcacgtgaccctgtgtggcacccccaagggcaacagacctgtgatcctgacctaccatgacatcggcatgaaccacaagacctgctacaaccccctcttcaactatgaggacatgcaggagatcacccagcactttgctgtgtgccacgtggatgcccctggccagcaggatggagctgccagcttccctgctggctacatgtaccccagcatggaccagctggccgagatgctgcccggggtgctgcagcagtttggcctgaagagctag

SEQ ID NO: 50592 - DNA, 288 bp, Artificial Sequence
  derived and/or modified sequence
atgagccgggagatgcaggatgtggacctggccgaggtgaagcccctggtggagaagggggagaccatcaccggcctgctgcaggagtttgatgtgcagaccaagccagccaccacccccagcagcaccaccaggacctgccgccgcagccccagcaccctgcccagcgccacctggacccccctggccagcaggacagcccagccccccagcccccagggcacctgcaccccaccctggatctcctggctgaagtgcttcctggagagcttcaacagcctgggctag

SEQ ID NO: 50593 - DNA, 1185 bp, Artificial Sequence
  derived and/or modified sequence
atgagccgggagatgcaggacgtggacctggccgaggtgaagcccttggtcgagaagggtgagacaatcaccgggcttctacaggagttcgacgtacaggaacaggacatcgagacactccacggttcagtccacgtgaccttgtgtggtacacctaaggggaataggcctgtgatcctgacctatcatgacatcggcatgaaccataaaacatgctacaatcctttgtttaattacgaggatatgcaggagattacccagcatttcgcagtttgccatgtcgatgcacccgggcagcaagatggggctgcgtcatttcctgccggatacatgtacccgagcatggaccagcttgccgagatgctgccgggtgttctacagcagtttggcctcaagtcgataattggcatgggaacaggcgccggagcttatattttaacgcgatttgcccttaataatccagaaatggttgaaggcctcgtcctaataaacgtgaatccctgtgcggaaggatggatggattgggcggctagtaaaatttcaggctggacgcaggcactgcccgacatggttgtgagccatctgtttggcaaggaggaaatgcaatctaacgttgaggttgtccacacataccgccagcacatcgtgaacgatatgaatcctggcaacctgcacttgtttattaatgcttataactcccgtcgggatctagaaatagaacgtcctatgccaggtacccacaccgtcacattgcaatgtcccgccttgctagtggttggagacagcagccccgctgtagacgccgtcgtggagtgcaactccaagctcgaccctactaagacaactctcctgaaaatggccgactgtggtggtttgccccaaatcagccagccagctaagctcgccgaagcatttaagtatttcgtgcagggtatggggtacatgccctctgctagcatgacccgtttgatgaggtcccgaacggccagcggcagtagtgttacatccctcgacggtactaggagccggagccacacctccgaagggacgagatctaggtcacacaccagcgagggaacccggagccgtagtcataccagcgagggagcacacctggacatcactcccaactctggcgctgccggaaattccgcaggtccgaaatccatggaggtgagctgttag

SEQ ID NO: 50594 - DNA, 1185 bp, Artificial Sequence
  derived and/or modified sequence
atgagccgggagatgcaggacgtggacctggccgaggtgaagcccctcgtggagaaaggcgagacaattactggcttgctgcaggagtttgacgtgcaagagcaggatatagagactctgcatgggagtgtccatgtgacattgtgtggaactcccaagggcaatagaccagtgatcctgacttatcacgacatcggtatgaaccacaaaacctgctataacccgttgttcaactatgaggatatgcaggagatcacgcaacatttcgcagtgtgccacgttgacgcacctgggcagcaggatggggcagcctcattcccagcagggtacatgtatccgtctatggatcagctagcggaaatgctccccggagttctgcagcagtttgggctgaagtccattattggcatgggcacaggagccggtgcctacattctgaccagattcgctcttaacaacccggagatggtggaagggctggtgctgataaacgtcaacccatgtgccgaggggtggatggattgggcggcgtccaagatctcaggctggactcaggcactgcctgacatggtggtgagtcacctttttggcaaggaagagatgcagagcaacgtcgaagtcgtccacacgtatcgacaacatatagtgaatgacatgaatcctggcaacctgcacctgttcatcaacgcttacaacagccgtcgcgatctggagatcgagcggcctatgccaggcactcataccgtcaccctccagtgccccgccctgttagtagtgggtgactcttcaccggcagtggacgccgtggtggagtgtaattcaaaacttgaccccacaaaaaccacgcttctgaaaatggcagactgcggcggtcttcctcaaataagccagccggccaagctcgctgaagcttttaaatacttcgtccaagggatggggtacatgccctccgcatctatgacaaggctgatgcggtcacgaaccgcctcaggctcatccgtcacctccctggacggtacccgatctcgctcccatacttctgagggcactcgtagtcggagtcacacctccgagggaactcggagcaggtcacacaccagtgaaggagcgcatcttgatatcacccctaacagcggcgccgccggaaatagtgccgggcctaaaagtatggaggtgagctgctag

SEQ ID NO: 50595 - DNA, 498 bp, Artificial Sequence
  derived and/or modified sequence
atgagccgggagatgcaggacgtggacctggccgaggtgaagcccctggtcgagaagggagagacaataacagggctcttgcaagagttcgacgtgcaggaacaagacattgagacccttcatggctccgtgcatgtgaccctgtgcggcacacccaaaggtaatcggcctgttatccttacttaccatgatatcggaatgaaccacaagacctgctacaatcctctgtttaattacgaagatatgcaggaaattacacagcacttcgcagtttgtcatgttgatgccccagggcagcaggacggggcggccagcttccctgctgggtacatgtacccttctatggatcagttagccgaaatgcttcctggggtgttacagcagtttggtttaaaatcgataatcggtatgggcacaggtgcgggcgcgtatatcctgacacggttcgccctgaacaaccctgaaatggtggagggactggtcttgatcaatgtatag

SEQ ID NO: 50596 - DNA, 477 bp, Artificial Sequence
  derived and/or modified sequence
atgagccgggagatgcaggacgtggacctggccgaggtgaagcccctagtggagaaaggagaaacaatcacaggcttgctgcaggaattcgatgtgcaggagcaagatatcgaaactctgcatggttcagtgcatgtgactctgtgtggcacgcctaaaggcaaccgccctgttatcctgacatatcatgacataggtatgaaccataagacctgttataaccctttgttcaactacgaagatatgcaagagattacccagcacttcgctgtgtgccacgtggacgcgcctggacagcaggacggcgccgctagttttccagccggatacatgtatccctctatggatcagctcgccgagatgctgcccggcgtcctgcagcagttcggcctgaagtccattattggtatgggcactggagcaggcgcatatatcctgacccggtttgcgctgaataatcccgaaatggtcgagtag

SEQ ID NO: 50597 - DNA, 402 bp, Artificial Sequence
  derived and/or modified sequence
atgagccgggagatgcaggacgtggacctggccgaggtgaagcccctagtcgagaaaggggagacgattacgggactgctgcaagagttcgatgtacaggaacaggatatcgaaacattacacggatccgtgcacgtgaccctgtgcggtacccctaaagggaacaggccagtaattcttacctaccacgacattgggatgaaccacaagacctgctataatccattattcaattacgaggatatgcaggagataacgcagcactttgcagtgtgccacgtggatgcacccggacagcaggatggtgcggcttcgttccctgccggttacatgtatccctccatggaccaacttgctgagatgcttccaggggtgctgcagcagttcggactgaaatcctag

SEQ ID NO: 50598 - DNA, 477 bp, Artificial Sequence
  derived and/or modified sequence
atgagccgggagatgcaggacgtggacctggccgaggtgaagcccttagtggaaaagggcgaaacgattacgggcctactgcaggagttcgacgtacaggagcaggacattgagaccctgcatggttcagtacacgtcacgctttgcggcactcctaagggcaatcgccctgtgatattaacataccacgacatcggcatgaaccataagacgtgctataaccccctgtttaattatgaagacatgcaggagattacgcagcactttgccgtgtgtcacgtcgacgccccagggcagcaggacggcgccgcttcttttcctgcgggatacatgtacccttcaatggaccagctcgccgagatgctccctggggttctacagcagttcgggctgaagagtattatcggaatggggaccggggccggcgcctacatccttaccaggttcgccctgaataatcccgagatggtggagtag

SEQ ID NO: 50599 - DNA, 3014 bp, Artificial Sequence
  derived and/or modified sequence
cccagctggtgctgaagctcgtcagttcaccatccgccctcggcttccgcggggcgctgggccgccagcctcggcaccgtcctttcctttctccctcgcgttaggcaggtgacagcagggacatgtctcgggagatgcaggatgtagacctcgctgaggtgaagcctttggtggagaaaggggagaccatcaccggcctcctgcaagagtttgatgtccaggagcaggacatcgagactttacatggctctgttcacgtcacgctgtgtgggactcccaagggaaaccggcctgtcatcctcacctaccatgacatcggcatgaaccacaaaacctgctacaaccccctcttcaactacgaggacatgcaggagatcacccagcactttgccgtctgccacgtggacgcccctggccagcaggacggcgcagcctccttccccgcagggtacatgtacccctccatggatcagctggctgaaatgcttcctggagtccttcaacagtttgggctgaaaagcattattggcatgggaacaggagcaggcgcctacatcctaactcgatttgctctaaacaaccctgagatggtggagggccttgtccttatcaacgtgaacccttgtgcggaaggctggatggactgggccgcctccaagatctcaggatggacccaagctctgccggacatggtggtgtcccacctttttgggaaggaagaaatgcagagtaacgtggaagtggtccacacctaccgccagcacattgtgaatgacatgaaccccggcaacctgcacctgttcatcaatgcctacaacagccggcgcgacctggagattgagcgaccaatgccgggaacccacacagtcaccctgcagtgccctgctctgttggtggttggggacagctcgcctgcagtggatgccgtggtggagtgcaactcaaaattggacccaacaaagaccactctcctcaagatggcggactgtggcggcctcccgcagatctcccagccggccaagctcgctgaggccttcaagtacttcgtgcagggcatgggatacatgccctcggctagcatgacccgcctgatgcggtcccgcacagcctctggttccagcgtcacttctctggatggcacccgcagccgctcccacaccagcgagggcacccgaagccgctcccacaccagcgagggcacccgcagccgctcgcacaccagcgagggggcccacctggacatcacccccaactcgggtgctgctgggaacagcgccgggcccaagtccatggaggtctcctgctaggcggcctgcccagctgccgcccccggactctgatctctgtagtggccccctcctccccggccccttttcgccccctgcctgccatactgcgcctaactcggtattaatccaaagcttattttgtaagagtgagctctggtggagacaaatgaggtctattacgtgggtgccctctccaaaggcggggtggcggtggaccaaaggaaggaagcaagcatctccgcatcgcatcctcttccattaaccagtggccggttgccactctcctcccctccctcagagacaccaaactgccaaaaacaagacgcgtagcagcacacacttcacaaagccaagcctaggccgccctgagcatcctggttcaaacgggtgcctggtcagaaggccagccgcccacttcccgtttcctctttaactgaggagaagctgatccagtttccggaaacaaaatccttttctcatttggggaggggggtaatagtgacatgcaggcacctcttttaaacaggcaaaacaggaagggggaaaaggtgggattcatgtcgaggctagaggcatttggaacaacaaatctacgtagttaacttgaagaaaccgatttttaaagttggtgcatctagaaagctttgaatgcagaagcaaacaagcttgatttttctagcatcctcttaatgtgcagcaaaagcaggcgacaaaatctcctggctttacagacaaaaatatttcagcaaacgttgggcatcatggtttttgaaggctttagttctgctttctgcctctcctccacagccccaacctcccacccctgatacatgagccagtgattattcttgttcagggagaagatcatttagatttgttttgcattccttagaatggagggcaacattccacagctgccctggctgtgatgagtgtccttgcaggggccggagtaggagcactggggtgggggtggaattggggttactcgatgtaagggattccttgttgttgtgttgagatccagtgcagttgtgatttctgtggatcccagcttggttccaggaattttgtgtgattggcttaaatccagttttcaatcttcgacagctgggctggaacgtgaactcagtagctgaacctgtctgacccggtcacgttcttggatcctcagaactctttgctcttgtcggggtgggggtgggaactcacgtggggagcggtggctgagaaaatgtaaggattctggaatacatattccatgggactttccttccctctcctgcttcctcttttcctgctccctaacctttcgccgaatggggcagcaccactgacgtttctgggcggccagtgcggctgccaggttcctgtactactgccttgtacttttcattttggctcaccgtggattttctcataggaagtttggtcagagtgaattgaatattgtaagtcagccactgggacccgaggatttctgggaccccgcagttgggaggaggaagtagtccagccttccaggtggcgtgagaggcaatgactcgttacctgccgcccatcaccttggaggccttccctggccttgagtagaaaagtcggggatcggggcaagagaggctgagtacggatgggaaactattgtgcacaagtctttccagaggagtttcttaatgagatatttgtatttatttccagaccaataaatttgtaactttgcagcgg

SEQ ID NO: 50600 - DNA, 3755 bp, Artificial Sequence
  derived and/or modified sequence
acacaaacgcctcctccgggcagggcacacgcgcccgctgcacaggccgaggccctggactcggaggggactgcagagccgacccacaacccgggccccgatgcccctcccggccgcgcccctacgactgcttgcgcaacaggcggcggctccagtgggcgcccgccgcgcgctgccggagcccagcccagcccggcgcgcccgggaggagggagcagggagcggggaaggggtgtgtcccggctgcgtgctgggactgcgagggtctgggaggggcgaggcgcgggggcggggccgcggcgcctataaagtcgccctccgcccggacgtaaacaaacctcgcctggctcccagctggtgctgaagctcgtcagttcaccatccgccctcggcttccgcggggcgctgggccgccagcctcggcaccgtcctttcctttctccctcgcgttaggtaagcccgcgccctcttctcccaggcgcgacgcggagcagaaaggggccgcccgtgcggtgccgctggagcgccaggaccgccctttgtagccccgcgtactccaggagtaagcgccccggagctgcaagtgcgcggtcaccccggggcgcgggcgcgagggggctttgggtgcagacaccgctgaagtggggggttcaattacggaaagggaggaaaaaaagacagggtcccattcatctcccccctagctggggattggggttctggaggtcgggaagggggcgatgagacggtccgaaaaaataccaggatagcgtttcctggcgtcgtctccgaatcccagctggcgccgctggcaggggtgcgcgctggacgtgggtgcagaagggactaggcaggtgacagcagggacatgtctcgggagatgcaggatgtagacctcgctgaggtgaagcctttggtggagaaaggggagaccatcaccggcctcctgcaagagtttgatgtccaggagcaggacatcgagactttacatggctctgttcacgtcacgctgtgtgggactcccaagggaaaccggcctgtcatcctcacctaccatgacatcggcatgaaccacaaaacctgctacaaccccctcttcaactacgaggacatgcaggagatcacccagcactttgccgtctgccacgtggacgcccctggccagcaggacggcgcagcctccttccccgcagggtacatgtacccctccatggatcagctggctgaaatgcttcctggagtccttcaacagtttgggctgaaaagcattattggcatgggaacaggagcaggcgcctacatcctaactcgatttgctctaaacaaccctgagatggtggagggccttgtccttatcaacgtgaacccttgtgcggaaggctggatggactgggccgcctccaagatctcaggatggacccaagctctgccggacatggtggtgtcccacctttttgggaaggaagaaatgcagagtaacgtggaagtggtccacacctaccgccagcacattgtgaatgacatgaaccccggcaacctgcacctgttcatcaatgcctacaacagccggcgcgacctggagattgagcgaccaatgccgggaacccacacagtcaccctgcagtgccctgctctgttggtggttggggacagctcgcctgcagtggatgccgtggtggagtgcaactcaaaattggacccaacaaagaccactctcctcaagatggcggactgtggcggcctcccgcagatctcccagccggccaagctcgctgaggccttcaagtacttcgtgcagggcatgggatacatgccctcggctagcatgacccgcctgatgcggtcccgcacagcctctggttccagcgtcacttctctggatggcacccgcagccgctcccacaccagcgagggcacccgaagccgctcccacaccagcgagggcacccgcagccgctcgcacaccagcgagggggcccacctggacatcacccccaactcgggtgctgctgggaacagcgccgggcccaagtccatggaggtctcctgctaggcggcctgcccagctgccgcccccggactctgatctctgtagtggccccctcctccccggccccttttcgccccctgcctgccatactgcgcctaactcggtattaatccaaagcttattttgtaagagtgagctctggtggagacaaatgaggtctattacgtgggtgccctctccaaaggcggggtggcggtggaccaaaggaaggaagcaagcatctccgcatcgcatcctcttccattaaccagtggccggttgccactctcctcccctccctcagagacaccaaactgccaaaaacaagacgcgtagcagcacacacttcacaaagccaagcctaggccgccctgagcatcctggttcaaacgggtgcctggtcagaaggccagccgcccacttcccgtttcctctttaactgaggagaagctgatccagtttccggaaacaaaatccttttctcatttggggaggggggtaatagtgacatgcaggcacctcttttaaacaggcaaaacaggaagggggaaaaggtgggattcatgtcgaggctagaggcatttggaacaacaaatctacgtagttaacttgaagaaaccgatttttaaagttggtgcatctagaaagctttgaatgcagaagcaaacaagcttgatttttctagcatcctcttaatgtgcagcaaaagcaggcgacaaaatctcctggctttacagacaaaaatatttcagcaaacgttgggcatcatggtttttgaaggctttagttctgctttctgcctctcctccacagccccaacctcccacccctgatacatgagccagtgattattcttgttcagggagaagatcatttagatttgttttgcattccttagaatggagggcaacattccacagctgccctggctgtgatgagtgtccttgcaggggccggagtaggagcactggggtgggggtggaattggggttactcgatgtaagggattccttgttgttgtgttgagatccagtgcagttgtgatttctgtggatcccagcttggttccaggaattttgtgtgattggcttaaatccagttttcaatcttcgacagctgggctggaacgtgaactcagtagctgaacctgtctgacccggtcacgttcttggatcctcagaactctttgctcttgtcggggtgggggtgggaactcacgtggggagcggtggctgagaaaatgtaaggattctggaatacatattccatgggactttccttccctctcctgcttcctcttttcctgctccctaacctttcgccgaatggggcagcaccactgacgtttctgggcggccagtgcggctgccaggttcctgtactactgccttgtacttttcattttggctcaccgtggattttctcataggaagtttggtcagagtgaattgaatattgtaagtcagccactgggacccgaggatttctgggaccccgcagttgggaggaggaagtagtccagccttccaggtggcgtgagaggcaatgactcgttacctgccgcccatcaccttggaggccttccctggccttgagtagaaaagtcggggatcggggcaagagaggctgagtacggatgggaaactattgtgcacaagtctttccagaggagtttcttaatgagatatttgtatttatttccagaccaataaatttgtaactttgc

SEQ ID NO: 50601 - DNA, 729 bp, Artificial Sequence
  derived and/or modified sequence
agtgggcaaggtccagtgagtgtgcttagaactgggaagatgaggggaagggtaagcgctgggcggcggtgggcaagatggacgagattaaacgggagcgaggatttcagcgagagctttggcgacacggaaggctgagaatcggagggagcctgtcgggcgaaagcgaaggcggctgctgggcaggcagccgaatccggctggagagccgagctggcaggtgacagcagggacatgtctcgggagatgcaggatgtagacctcgctgaggtgaagcctttggtggagaaaggggagaccatcaccggcctcctgcaagagtttgatgtccaggagcaggacatcgagactttacatggctctgttcacgtcacgctgtgtgggactcccaagggaaaccggcctgtcatcctcacctaccatgacatcggcatgaaccacaaaacctgctacaaccccctcttcaactacgaggacatgcaggagatcacccagcactttgccgtctgccacgtggacgcccctggccagcaggacggcgcagcctccttccccgcagggtacatgtacccctccatggatcagctggctgaaatgcttcctggagtccttcaacagtttgggctgaaaagcattattggcatgggaacaggagcaggcgcctacatcctaactcgatttgctctaaacaaccctgagatggtggagggccttgtccttatcaacgtg

SEQ ID NO: 50602 - DNA, 550 bp, Artificial Sequence
  derived and/or modified sequence
gagaggctggtggcgcttcagtcccgtagcacacacagggcggtgtgcatgtgtgagtgcaggtgacagcagggacatgtctcgggagatgcaggatgtagacctcgctgaggtgaagcctttggtggagaaaggggagaccatcaccggcctcctgcaagagtttgatgtccaggagcaggacatcgagactttacatggctctgttcacgtcacgctgtgtgggactcccaagggaaaccggcctgtcatcctcacctaccatgacatcggcatgaaccacaaaacctgctacaaccccctcttcaactacgaggacatgcaggagatcacccagcactttgccgtctgccacgtggacgcccctggccagcaggacggcgcagcctccttccccgcagggtacatgtacccctccatggatcagctggctgaaatgcttcctggagtccttcaacagtttgggctgaaaagcattattggcatgggaacaggagcaggcgcctacatcctaactcgatttgctctaaacaaccctgagatggtggag

SEQ ID NO: 50603 - DNA, 709 bp, Artificial Sequence
  derived and/or modified sequence
aaacctcgcctggctcccagctggtgctgaagctcgtcagttcaccatccgccctcggcttccgcggggcgctgggccgccagcctcggcaccgtcctttcctttctccctcgcgttagaaggagatcacagacaccagaagacagcagcttctgccagaactgggtccttccatgattctcaggtggtgactttgaatcccagaaaaagtgttttggggagagtggagtgaaggaagagtgtgaacattggatctgactccactccagcccctgtgctgcagccagcagggcaggtgacagcagggacatgtctcgggagatgcaggatgtagacctcgctgaggtgaagcctttggtggagaaaggggagaccatcaccggcctcctgcaagagtttgatgtccaggagcaggacatcgagactttacatggctctgttcacgtcacgctgtgtgggactcccaagggaaaccggcctgtcatcctcacctaccatgacatcggcatgaaccacaaaacctgctacaaccccctcttcaactacgaggacatgcaggagatcacccagcactttgccgtctgccacgtggacgcccctggccagcaggacggcgcagcctccttccccgcagggtacatgtacccctccatggatcagctggctgaaatgcttcctggagtccttcaacagtttgggctgaaaagca

SEQ ID NO: 50604 - DNA, 581 bp, Artificial Sequence
  derived and/or modified sequence
aaaggggccgcccgtgcggtgccgctggagcgccaggaccgccctttgtagccccgcgtactccaggagtaagcgccccggagctgcaagcaggtgacagcagggacatgtctcgggagatgcaggatgtagacctcgctgaggtgaagcctttggtggagaaaggggagaccatcaccggcctcctgcaagagtttgatgtccaggagcaggacatcgagactttacatggctctgttcacgtcacgctgtgtgggactcccaagggaaaccggcctgtcatcctcacctaccatgacatcggcatgaaccacaaaacctgctacaaccccctcttcaactacgaggacatgcaggagatcacccagcactttgccgtctgccacgtggacgcccctggccagcaggacggcgcagcctccttccccgcagggtacatgtacccctccatggatcagctggctgaaatgcttcctggagtccttcaacagtttgggctgaaaagcattattggcatgggaacaggagcaggcgcctacatcctaactcgatttgctctaaacaaccctgagatggtggag

SEQ ID NO: 50605 - DNA, 1185 bp, Artificial Sequence
  derived and/or modified sequence
atgtctagggaaatgcaggatgttgatctggccgaagttaagcctttagttgagaagggagaaacaatcaccgggctcctccaggagttcgatgtgcaagaacaagatatcgagaccctccatggatccgtccacgtgaccttgtgcggtacccccaagggcaataggcccgttatcctgacctatcacgacatcggaatgaatcacaaaacatgctataacccactgtttaactacgaggatatgcaggaaatcacgcaacattttgccgtctgccacgtggatgctcctggtcagcaggacggtgctgcttccttccctgctggttacatgtacccttccatggaccagcttgcggaaatgcttcccggtgtattgcagcaattcggcctgaaatccatcatcggcatgggaaccggcgcaggtgcctacatcctaacccggttcgcactcaataatcccgaaatggtcgagggtctcgtgctgatcaatgtgaacccgtgcgcagagggctggatggattgggcagccagtaagatttccggttggacccaggccctccccgacatggtggtgtctcacctctttggtaaggaagagatgcagtctaatgtggaggttgtccacacctaccgccagcatatcgtcaatgatatgaatcccggaaacctccacctctttattaacgcttacaacagccgccgtgatttggaaattgagagaccaatgccagggacccataccgtcactctgcagtgcccggcactgctggtggtgggtgattccagccccgcagtggatgcagtggtggaatgcaatagcaagctcgaccccacgaagaccaccttgctaaagatggccgactgtggcggtctgccacaaatatcccaacccgctaagctggcagaggcttttaagtactttgtgcaaggtatgggatacatgcccagcgcatccatgactcggcttatgcgatcacgaaccgcctctggctcaagtgtgacaagcttggatgggacacggtcccgctctcatacctctgaggggacccggtccaggtctcatacatcagaaggaacaagatcccggtcgcatacaagtgaaggagcacatctggatatcaccccaaacagtggtgccgctggcaattccgccggacccaagtccatggaggtcagttgttag

SEQ ID NO: 50606 - DNA, 1185 bp, Artificial Sequence
  derived and/or modified sequence
atgtccagagagatgcaggatgttgatctggccgaggtcaagcctttggtagaaaaaggcgagactattacaggactgcttcaggagttcgatgtgcaggagcaggacattgagacgctccacgggtcggtgcatgtgacgctgtgtggcacgccaaaggggaaccgcccagtcattcttacttatcatgatataggcatgaatcacaagacctgttataacccactgttcaactacgaggatatgcaggaaattacccagcatttcgccgtttgtcacgttgacgccccagggcagcaggacggagctgcaagctttccggctgggtacatgtatccaagtatggaccaattggcagaaatgctaccgggagtgttgcaacagttcggactgaaatctatcatcggaatgggcacgggcgcaggggcatatattttgacacggtttgccctgaacaaccccgagatggtggagggtcttgtcctgatcaacgtaaacccgtgcgccgagggctggatggattgggctgctagtaaaatctctggctggacacaggccctgcccgatatggtggtgagtcacctttttggcaaggaggaaatgcagagcaacgtggaggtggtccacacctaccggcagcacatcgtcaatgatatgaatcctggcaacctacacctgtttatcaacgcgtacaactccaggcgagatctggagatcgagagaccgatgccgggtacacataccgttaccttgcagtgccccgcattgctggtcgtcggcgattccagtccagcggtggatgcagtggtggagtgtaattctaagctggacccaacaaaaaccaccctgctgaaaatggccgactgcgggggtctccctcaaatttcccagcccgcaaagctggccgaggcatttaagtacttcgtgcagggcatgggatacatgccaagcgcctcgatgacaagactcatgcgctcgcgcactgcaagcggctctagcgtgacaagccttgacggcacccgatctcgctcccatacaagcgaggggacacggtcacggagtcacacgtccgaaggtacccgttcccgcagccacacatccgagggggcacacctggatattacgccgaacagtggtgccgctgggaacagcgcagggccaaaatcaatggaagtcagctgttag

SEQ ID NO: 50607 - DNA, 498 bp, Artificial Sequence
  derived and/or modified sequence
atgagcagagagatgcaggatgtggatttggcggaggtcaagcccctggtcgagaagggggaaaccatcaccggcctattacaggagttcgacgtgcaagaacaggacatcgagaccctccacggatcggtacatgttacactgtgcggcacaccaaaaggaaatcgacctgtaatcctcacctatcacgatatcggtatgaaccataaaacctgctacaaccccctgttcaattacgaggatatgcaagaaatcactcagcatttcgctgtgtgtcacgtggatgctcccggacagcaggatggagctgccagctttccagctggctacatgtacccctcaatggatcagctggccgaaatgctacccggagttctacagcagttcggcctgaaatctataatcgggatgggtactggagctggagcatacatcctgacaaggttcgctctcaataaccctgagatggtggaaggcctggtcctgattaacgtgtag

SEQ ID NO: 50608 - DNA, 477 bp, Artificial Sequence
  derived and/or modified sequence
atgtcacgggaaatgcaggacgtcgacttagccgaggtcaagcctctggtggagaaaggagagacaattactggcctgctgcaggagttcgacgttcaggaacaggacattgagaccttgcacggatccgttcatgttacactgtgtggcactcctaagggtaatcggccagttatattgacttatcacgatattgggatgaatcataaaacctgctacaatcccctgttcaattacgaggacatgcaggagataacacaacatttcgccgtgtgccatgtggacgccccaggccagcaggatggagcagctagtttcccagccggatatatgtaccccagcatggaccaacttgcagaaatgcttcctggtgtccttcaacagttcggactgaaatccatcattggcatgggcacgggtgcaggggcttatatcttgacaagatttgcactcaataaccctgaaatggtggaatag

SEQ ID NO: 50609 - DNA, 402 bp, Artificial Sequence
  derived and/or modified sequence
atgtctagggagatgcaagacgtggatctggccgaggtcaaaccccttgtagaaaaaggtgaaaccatcactggcttgctgcaagaatttgatgtacaggaacaggacattgaaacactgcacggaagcgtgcatgtcactttatgtggtacgccgaagggcaacaggccagtgatcctaacttaccacgatatcggaatgaatcataagacctgttacaaccctttgttcaattatgaggatatgcaggaaattactcagcacttcgctgtatgccacgttgacgcaccgggacagcaggatggcgcagctagttttcctgccggttacatgtacccaagtatggaccagctggcagagatgctgcctggagtcctgcagcagtttgggctcaaaagttag

SEQ ID NO: 50610 - DNA, 477 bp, Artificial Sequence
  derived and/or modified sequence
atgagtcgcgagatgcaggatgtagacttggcagaggtgaaacccctcgtggagaagggcgaaaccattacaggacttctacaggagttcgatgtccaggaacaagacatagaaactctgcacggatctgttcacgttaccctctgcggaacccctaagggaaaccggccagtgatcttaacgtatcatgacataggtatgaaccacaagacatgctataatccccttttcaactatgaggacatgcaggaaattacccaacatttcgccgtctgccacgtcgatgctcctggtcagcaggacggagcggcttcttttcctgctggctacatgtacccttccatggatcaactggccgagatgctgccaggtgtgttacaacagttcggactgaaaagtattatcggcatggggactggcgcaggggcatatatcttgacgagatttgcccttaacaaccccgaaatggtggagtag

SEQ ID NO: 50611 - DNA, 1185 bp, Artificial Sequence
  derived and/or modified sequence
atgagcagagagatgcaggacgtggacctggccgaggtgaagcccctggtggagaagggcgagaccatcaccggcctgctgcaggagttcgacgtgcaggagcaggacatcgagaccctgcacggcagcgtgcacgtgaccctgtgcggcacccccaagggcaacagacccgtgatcctgacctaccacgacatcggcatgaaccacaagacctgctacaaccccctgttcaactacgaggacatgcaggagatcacccagcacttcgccgtgtgccacgtggacgcccccggccagcaggacggcgccgccagcttccccgccggctacatgtaccccagcatggaccagctggccgagatgctgcccggcgtgctgcagcagttcggcctgaagagcatcatcggcatgggcaccggcgccggcgcctacatcctgaccagattcgccctgaacaaccccgagatggtggagggcctggtgctgatcaacgtgaacccctgcgccgagggctggatggactgggccgccagcaagatcagcggctggacccaggccctgcccgacatggtggtgagccacctgttcggcaaggaggagatgcagagcaacgtggaggtggtgcacacctacagacagcacatcgtgaacgacatgaaccccggcaacctgcacctgttcatcaacgcctacaacagcagaagagacctggagatcgagagacccatgcccggcacccacaccgtgaccctgcagtgccccgccctgctggtggtgggcgacagcagccccgccgtggacgccgtggtggagtgcaacagcaagctggaccccaccaagaccaccctgctgaagatggccgactgcggcggcctgccccagatcagccagcccgccaagctggccgaggccttcaagtacttcgtgcagggcatgggctacatgcccagcgccagcatgaccagactgatgagaagcagaaccgccagcggcagcagcgtgaccagcctggacggcaccagaagcagaagccacaccagcgagggcaccagaagcagaagccacaccagcgagggcaccagaagcagaagccacaccagcgagggcgcccacctggacatcacccccaacagcggcgccgccggcaacagcgccggccccaagagcatggaggtgagctgctag

SEQ ID NO: 50612 - DNA, 498 bp, Artificial Sequence
  derived and/or modified sequence
atgagcagagagatgcaggacgtggacctggccgaggtgaagcccctggtggagaagggcgagaccatcaccggcctgctgcaggagttcgacgtgcaggagcaggacatcgagaccctgcacggcagcgtgcacgtgaccctgtgcggcacccccaagggcaacagacccgtgatcctgacctaccacgacatcggcatgaaccacaagacctgctacaaccccctgttcaactacgaggacatgcaggagatcacccagcacttcgccgtgtgccacgtggacgcccccggccagcaggacggcgccgccagcttccccgccggctacatgtaccccagcatggaccagctggccgagatgctgcccggcgtgctgcagcagttcggcctgaagagcatcatcggcatgggcaccggcgccggcgcctacatcctgaccagattcgccctgaacaaccccgagatggtggagggcctggtgctgatcaacgtgtag

SEQ ID NO: 50613 - DNA, 477 bp, Artificial Sequence
  derived and/or modified sequence
atgagcagagagatgcaggacgtggacctggccgaggtgaagcccctggtggagaagggcgagaccatcaccggcctgctgcaggagttcgacgtgcaggagcaggacatcgagaccctgcacggcagcgtgcacgtgaccctgtgcggcacccccaagggcaacagacccgtgatcctgacctaccacgacatcggcatgaaccacaagacctgctacaaccccctgttcaactacgaggacatgcaggagatcacccagcacttcgccgtgtgccacgtggacgcccccggccagcaggacggcgccgccagcttccccgccggctacatgtaccccagcatggaccagctggccgagatgctgcccggcgtgctgcagcagttcggcctgaagagcatcatcggcatgggcaccggcgccggcgcctacatcctgaccagattcgccctgaacaaccccgagatggtggagtag

SEQ ID NO: 50614 - DNA, 402 bp, Artificial Sequence
  derived and/or modified sequence
atgagcagagagatgcaggacgtggacctggccgaggtgaagcccctggtggagaagggcgagaccatcaccggcctgctgcaggagttcgacgtgcaggagcaggacatcgagaccctgcacggcagcgtgcacgtgaccctgtgcggcacccccaagggcaacagacccgtgatcctgacctaccacgacatcggcatgaaccacaagacctgctacaaccccctgttcaactacgaggacatgcaggagatcacccagcacttcgccgtgtgccacgtggacgcccccggccagcaggacggcgccgccagcttccccgccggctacatgtaccccagcatggaccagctggccgagatgctgcccggcgtgctgcagcagttcggcctgaagagctag

SEQ ID NO: 50615 - protein, 1488 aa, Artificial Sequence
  derived and/or modified sequence
MAEARKRRELLPLIYHHLLRAGYVRAAREVKEQSGQKCFLAQPVTLLDIYTHWQQTSELGRKRKAEEDAALQAKKTRVSDPISTSESSEEEEEAEAETAKATPRLASTNSSVLGADLPSSMKEKAKAETEKAGKTGNSMPHPATGKTVANLLSGKSPRKSAEPSANTTLVSETEEEGSVPAFGAAAKPGMVSAGQADSSSEDTSSSSDETDVEGKPSVKPAQVKASSVSTKESPARKAAPAPGKVGDVTPQVKGGALPPAKRAKKPEEESESSEEGSESEEEAPAGTRSQVKASEKILQVRAASAPAKGTPGKGATPAPPGKAGAVASQTKAGKPEEDSESSSEESSDSEEETPAAKALLQAKASGKTSQVGAASAPAKESPRKGAAPAPPGKTGPAVAKAQAGKREEDSQSSSEESDSEEEAPAQAKPSGKAPQVRAASAPAKESPRKGAAPAPPRKTGPAAAQVQVGKQEEDSRSSSEESDSDREALAAMNAAQVKPLGKSPQVKPASTMGMGPLGKGAGPVPPGKVGPATPSAQVGKWEEDSESSSEESSDSSDGEVPTAVAPAQEKSLGNILQAKPTSSPAKGPPQKAGPVAVQVKAEKPMDNSESSEESSDSADSEEAPAAMTAAQAKPALKIPQTKACPKKTNTTASAKVAPVRVGTQAPRKAGTATSPAGSSPAVAGGTQRPAEDSSSSEESDSEEEKTGLAVTVGQAKSVGKGLQVKAASVPVKGSLGQGTAPVLPGKTGPTVTQVKAEKQEDSESSEEESDSEEAAASPAQVKTSVKKTQAKANPAAARAPSAKGTISAPGKVVTAAAQAKQRSPSKVKPPVRNPQNSTVLARGPASVPSVGKAVATAAQAQTGPEEDSGSSEEESDSEEEAETLAQVKPSGKTHQIRAALAPAKESPRKGAAPTPPGKTGPSAAQAGKQDDSGSSSEESDSDGEAPAAVTSAQVIKPPLIFVDPNRSPAGPAATPAQAQAASTPRKARASESTARSSSSESEDEDVIPATQCLTPGIRTNVVTMPTAHPRIAPKASMAGASSSKESSRISDGKKQEGPATQVSKKNPASLPLTQAALKVLAQKASEAQPPVARTQPSSGVDSAVGTLPATSPQSTSVQAKGTNKLRKPKLPEVQQATKAPESSDDSEDSSDSSSGSEEDGEGPQGAKSAHTLGPTPSRTETLVEETAAESSEDDVVAPSQSLLSGYMTPGLTPANSQASKATPKLDSSPSVSSTLAAKDDPDGKQEAKPQQAAGMLSPKTGGKEAASGTTPQKSRKPKKGAGNPQASTLALQSNITQCLLGQPWPLNEAQVQASVVKVLTELLEQERKKVVDTTKESSRKGWESRKRKLSGDQPAARTPRSKKKKKLGAGEGGEASVSPEKTSTTSKGKAKRDKASGDVKEKKGKGSLGSQGAKDEPEEELQKGMGTVEGGDQSNPKSKKEKKKSDKRKKDKEKKEKKKKAKKASTKDSESPSQKKKKKKKKTAEQTV

SEQ ID NO: 50616 - DNA, 4467 bp, Artificial Sequence
  derived and/or modified sequence
atggccgaggccagaaagagaagagagctgctgcccctgatctaccaccacctgctgagagccggctacgtgagagccgccagagaggtgaaggagcagagcggccagaagtgcttcctggcccagcccgtgaccctgctggacatctacacccactggcagcagaccagcgagctgggcagaaagagaaaggccgaggaggacgccgccctgcaggccaagaagaccagagtgagcgaccccatcagcaccagcgagagcagcgaggaggaggaggaggccgaggccgagaccgccaaggccacccccagactggccagcaccaacagcagcgtgctgggcgccgacctgcccagcagcatgaaggagaaggccaaggccgagaccgagaaggccggcaagaccggcaacagcatgccccaccccgccaccggcaagaccgtggccaacctgctgagcggcaagagccccagaaagagcgccgagcccagcgccaacaccaccctggtgagcgagaccgaggaggagggcagcgtgcccgccttcggcgccgccgccaagcccggcatggtgagcgccggccaggccgacagcagcagcgaggacaccagcagcagcagcgacgagaccgacgtggagggcaagcccagcgtgaagcccgcccaggtgaaggccagcagcgtgagcaccaaggagagccccgccagaaaggccgcccccgcccccggcaaggtgggcgacgtgaccccccaggtgaagggcggcgccctgccccccgccaagagagccaagaagcccgaggaggagagcgagagcagcgaggagggcagcgagagcgaggaggaggcccccgccggcaccagaagccaggtgaaggccagcgagaagatcctgcaggtgagagccgccagcgcccccgccaagggcacccccggcaagggcgccacccccgccccccccggcaaggccggcgccgtggccagccagaccaaggccggcaagcccgaggaggacagcgagagcagcagcgaggagagcagcgacagcgaggaggagacccccgccgccaaggccctgctgcaggccaaggccagcggcaagaccagccaggtgggcgccgccagcgcccccgccaaggagagccccagaaagggcgccgcccccgccccccccggcaagaccggccccgccgtggccaaggcccaggccggcaagagagaggaggacagccagagcagcagcgaggagagcgacagcgaggaggaggcccccgcccaggccaagcccagcggcaaggccccccaggtgagagccgccagcgcccccgccaaggagagccccagaaagggcgccgcccccgccccccccagaaagaccggccccgccgccgcccaggtgcaggtgggcaagcaggaggaggacagcagaagcagcagcgaggagagcgacagcgacagagaggccctggccgccatgaacgccgcccaggtgaagcccctgggcaagagcccccaggtgaagcccgccagcaccatgggcatgggccccctgggcaagggcgccggccccgtgccccccggcaaggtgggccccgccacccccagcgcccaggtgggcaagtgggaggaggacagcgagagcagcagcgaggagagcagcgacagcagcgacggcgaggtgcccaccgccgtggcccccgcccaggagaagagcctgggcaacatcctgcaggccaagcccaccagcagccccgccaagggccccccccagaaggccggccccgtggccgtgcaggtgaaggccgagaagcccatggacaacagcgagagcagcgaggagagcagcgacagcgccgacagcgaggaggcccccgccgccatgaccgccgcccaggccaagcccgccctgaagatcccccagaccaaggcctgccccaagaagaccaacaccaccgccagcgccaaggtggcccccgtgagagtgggcacccaggcccccagaaaggccggcaccgccaccagccccgccggcagcagccccgccgtggccggcggcacccagagacccgccgaggacagcagcagcagcgaggagagcgacagcgaggaggagaagaccggcctggccgtgaccgtgggccaggccaagagcgtgggcaagggcctgcaggtgaaggccgccagcgtgcccgtgaagggcagcctgggccagggcaccgcccccgtgctgcccggcaagaccggccccaccgtgacccaggtgaaggccgagaagcaggaggacagcgagagcagcgaggaggagagcgacagcgaggaggccgccgccagccccgcccaggtgaagaccagcgtgaagaagacccaggccaaggccaaccccgccgccgccagagcccccagcgccaagggcaccatcagcgcccccggcaaggtggtgaccgccgccgcccaggccaagcagagaagccccagcaaggtgaagccccccgtgagaaacccccagaacagcaccgtgctggccagaggccccgccagcgtgcccagcgtgggcaaggccgtggccaccgccgcccaggcccagaccggccccgaggaggacagcggcagcagcgaggaggagagcgacagcgaggaggaggccgagaccctggcccaggtgaagcccagcggcaagacccaccagatcagagccgccctggcccccgccaaggagagccccagaaagggcgccgcccccaccccccccggcaagaccggccccagcgccgcccaggccggcaagcaggacgacagcggcagcagcagcgaggagagcgacagcgacggcgaggcccccgccgccgtgaccagcgcccaggtgatcaagccccccctgatcttcgtggaccccaacagaagccccgccggccccgccgccacccccgcccaggcccaggccgccagcacccccagaaaggccagagccagcgagagcaccgccagaagcagcagcagcgagagcgaggacgaggacgtgatccccgccacccagtgcctgacccccggcatcagaaccaacgtggtgaccatgcccaccgcccaccccagaatcgcccccaaggccagcatggccggcgccagcagcagcaaggagagcagcagaatcagcgacggcaagaagcaggagggccccgccacccaggtgagcaagaagaaccccgccagcctgcccctgacccaggccgccctgaaggtgctggcccagaaggccagcgaggcccagccccccgtggccagaacccagcccagcagcggcgtggacagcgccgtgggcaccctgcccgccaccagcccccagagcaccagcgtgcaggccaagggcaccaacaagctgagaaagcccaagctgcccgaggtgcagcaggccaccaaggcccccgagagcagcgacgacagcgaggacagcagcgacagcagcagcggcagcgaggaggacggcgagggcccccagggcgccaagagcgcccacaccctgggccccacccccagcagaaccgagaccctggtggaggagaccgccgccgagagcagcgaggacgacgtggtggcccccagccagagcctgctgagcggctacatgacccccggcctgacccccgccaacagccaggccagcaaggccacccccaagctggacagcagccccagcgtgagcagcaccctggccgccaaggacgaccccgacggcaagcaggaggccaagccccagcaggccgccggcatgctgagccccaagaccggcggcaaggaggccgccagcggcaccaccccccagaagagcagaaagcccaagaagggcgccggcaacccccaggccagcaccctggccctgcagagcaacatcacccagtgcctgctgggccagccctggcccctgaacgaggcccaggtgcaggccagcgtggtgaaggtgctgaccgagctgctggagcaggagagaaagaaggtggtggacaccaccaaggagagcagcagaaagggctgggagagcagaaagagaaagctgagcggcgaccagcccgccgccagaacccccagaagcaagaagaagaagaagctgggcgccggcgagggcggcgaggccagcgtgagccccgagaagaccagcaccaccagcaagggcaaggccaagagagacaaggccagcggcgacgtgaaggagaagaagggcaagggcagcctgggcagccagggcgccaaggacgagcccgaggaggagctgcagaagggcatgggcaccgtggagggcggcgaccagagcaaccccaagagcaagaaggagaagaagaagagcgacaagagaaagaaggacaaggagaagaaggagaagaagaagaaggccaagaaggccagcaccaaggacagcgagagccccagccagaagaagaagaagaagaagaagaagaccgccgagcagaccgtgtag

SEQ ID NO: 50617 - DNA, 4467 bp, Artificial Sequence
  derived and/or modified sequence
atggccgaggcgcgaaagcggcgggagttgcttcctcttatataccatcaccttctccgggcaggatatgtgcgggccgcgcgggaagtgaaggaacaaagtggtcagaaatgctttctggcgcagccagtgacactcctggatatctatacccattggcaacagacgtcagaacttggcagaaaaaggaaagcagaggaggatgccgctctgcaggcaaagaagactcgggtcagcgacccaatttcaacctctgaatcctctgaggaagaggaagaagcggaggccgaaaccgccaaagctactccccgactcgcaagcactaacagtagcgttctcggagccgatctgccctccagtatgaaagaaaaggcaaaagccgaaaccgaaaaagccggaaagacaggtaacagcatgcctcacccggccaccggaaagacagtagcgaacctcctttccggcaaatccccaagaaagagcgccgagccttccgccaacactactctggtgagtgagacagaggaggagggctcagtccccgcctttggcgccgcagccaaaccaggtatggtctccgctggacaggctgattcatcctccgaggatactagctcttcatccgacgaaactgatgtcgagggtaagccctccgtgaagccagcacaggtaaaggcgagctcagtttctaccaaggaatctccggctcgaaaagcggctcccgctcctggcaaagtcggggacgtgacccctcaggtgaagggtggcgcattaccaccagccaagcgggcaaagaagcccgaagaagaatccgaatcgagtgaggaaggctctgaaagcgaggaagaagcacccgccggaacacgcagtcaggtgaaggcttcagagaaaattctgcaggtgcgtgcggcttccgctccggccaaaggaactccaggtaagggcgccaccccggcccctcctggcaaggcgggagcggtggctagtcagaccaaggccggaaagcctgaggaggactcagaatcatcttctgaagagtcctcagatagcgaggaagagacacccgctgctaaagctttactgcaggccaaggcaagcggcaaaaccagtcaggtgggcgccgccagcgcgccagccaaggagtcgccgagaaagggtgctgcaccggcccctcccgggaagaccggaccggcagtcgctaaggcccaggctggaaaacgagaggaggattcacagtcaagttcagaggaatcagattcagaggaggaagccccagcacaggccaaaccctcgggcaaggctccacaggtgcgagccgcatctgctcccgctaaggagtctccgagaaagggcgcggcacccgccccccctcggaaaactggaccagccgctgctcaagtccaggtcggaaaacaggaggaggactcccgatctagctcagaggaatcagattccgatcgggaggctctggccgctatgaatgctgcacaggtgaaaccactgggcaaaagcccccaggtcaagccagcctctaccatggggatggggcccctgggcaagggtgccgggcccgtgccacctgggaaagtcggcccggccacaccttcagcccaagtgggcaaatgggaggaagacagcgagtctagttccgaagaatcttccgactcaagcgacggcgaggtccctacggctgtagcccccgcacaggaaaagtctttagggaacatacttcaggccaagcccaccagctcccccgctaaaggccctccccaaaaggcaggccccgtggctgtccaggtgaaggctgagaaacctatggacaatagcgagtcctccgaagagagcagtgatagcgcagacagcgaggaagctcccgctgctatgaccgcagcgcaggcaaagcctgcccttaaaatacctcagactaaggcctgcccaaagaagacgaacacaacagcgagtgctaaagtagctcccgtcagagtaggtactcaagcacccaggaaagctggaaccgctaccagtccagccgggagttcccctgccgttgccggtggcacccagaggcctgcggaggacagcagtagttctgaggaatccgacagcgaggaagagaaaacaggacttgccgtgaccgttggacaggctaagtccgtaggaaaggggttacaggtaaaagccgccagtgtacctgtgaaaggtagtttagggcagggtacagcacctgtgcttccaggcaagacaggccctactgtaacccaggtgaaggcggagaaacaagaagatagcgagtcctccgaagaagaatccgatagtgaggaagcagccgcatcacctgcccaggtcaagacgtccgtcaaaaaaacacaggccaaggctaatccagcagccgcgcgcgcaccctcagcaaagggcactattagtgccccaggaaaggtagtaaccgccgcggcacaagccaagcaaaggagcccaagtaaagtcaaaccgccagttcgaaacccccaaaattctactgttttggctaggggaccggcctcagttccaagcgtcggtaaagcagtggcaaccgccgcacaagcacagaccggaccggaggaggattccggatcaagtgaagaagaaagcgattctgaggaggaagcagaaacccttgcccaggtcaagccatccggtaagacacaccaaatccgggctgccttagcccccgctaaagagagccctaggaagggagccgctccaacccccccagggaagacagggccgtcggcggcgcaggcggggaaacaagatgattccggctctagttcagaagagtcagatagtgacggggaggcccccgccgcagtgactagtgcccaggtcatcaagccacccctgatttttgtcgaccctaatcgctcccctgcgggccctgcagctactccagctcaggctcaggcggcctccacgcccaggaaggccagggctagcgagagcacagctaggtccagcagctccgagtctgaggacgaagacgtcatccctgcaacccagtgtctcacccctggcatacgaaccaacgtggtgacaatgcccacagcacatcccaggatcgcccccaaggcaagcatggccggagcttcttccagtaaggagtctagccgaatcagcgatggaaaaaaacaagagggtcctgccacacaagtcagtaagaagaatcccgccagcctcccactcacacaggctgccctaaaagtacttgctcagaaggcctccgaggcacagccgccggtcgcccgaactcagccatcctccggtgtggactccgccgtaggaacactgcccgcaacctcgccccaatctacctctgtccaggctaaaggtactaacaagctccgcaagcccaaactccccgaggtgcaacaggcaactaaggccccagaaagcagcgacgacagcgaggacagcagtgactccagttccggttctgaggaggacggcgaaggtcctcagggagcaaaatccgctcacacattgggcccaactccgagcaggacagaaactctcgttgaagaaacggccgccgaaagctcagaggacgatgtggtggccccaagtcagtccctgcttagtggctatatgactccgggcctgaccccagcaaacagccaagctagcaaggcaactccaaaactcgactctagcccttcggtgagtagtacacttgcggccaaggacgatccagacgggaagcaggaggccaagcctcagcaggctgctggaatgctcagccctaaaacaggcgggaaagaagctgcctccggtaccacaccccaaaagtctagaaagccaaaaaagggagccggtaacccacaggccagtaccttagcactgcagagcaacatcactcagtgtctcctaggccagccttggcctctgaatgaagcccaagttcaagcaagcgtcgtgaaggtgctgacagaactgctcgaacaagaaagaaagaaagtcgtggacacaaccaaagagtcctctcggaagggttgggagagtcgcaagcgtaaattatcaggagaccagccggccgccagaacccctagatccaaaaaaaaaaaaaagctgggcgcgggtgagggtggcgaggcatctgtaagccctgagaaaacgtccacgaccagtaagggaaaggcaaaacgggacaaagcctcaggagatgtcaaggagaaaaaaggaaagggtagtctcggttcacaaggcgctaaggacgaacccgaggaagagctacagaagggcatgggtacagttgaaggtggagatcaatccaaccccaaaagcaagaaggaaaagaagaagagcgataagcggaagaaagacaaagagaagaaagaaaagaagaaaaaggctaaaaaagcctccacgaaggacagcgagtccccatctcagaaaaagaagaaaaagaagaaaaaaactgcagagcagaccgtgtag

SEQ ID NO: 50618 - DNA, 4467 bp, Artificial Sequence
  derived and/or modified sequence
atggccgaggccaggaagagaagagagctgctgcccctcatctaccaccacctgctgcgggccggctacgtgcgggccgcccgggaggtgaaggagcagagcggccagaagtgcttcctggcccagcctgtgaccctgctggacatctacacccactggcagcagaccagcgagctgggcaggaagaggaaggccgaggaggatgctgccctgcaggccaagaagaccagggtgtctgaccccatcagcaccagcgagagcagcgaggaggaggaggaggccgaggccgagacagccaaggccaccccccggctggccagcaccaacagctctgtgctgggcgctgacctgcccagctccatgaaggagaaggccaaggccgagacagagaaggccggcaagacaggcaacagcatgccccacccagccaccgggaagacagtggccaacctgctgagcggcaagagccccaggaagtctgctgagcccagcgccaacaccaccctggtgtctgaaacagaggaggagggctctgtgcctgccttcggggctgctgccaagccaggcatggtgtctgctggccaggccgacagcagcagcgaggacaccagcagcagcagtgatgaaacagatgtggagggcaagcccagcgtgaagccagcccaggtgaaggccagctctgtgtccaccaaggagagccctgccaggaaggccgccccagcccctgggaaggtgggagatgtgaccccccaggtgaagggcggggccctgcccccagccaagagggccaagaagccagaggaggagagcgagagcagcgaggagggcagcgagagcgaggaggaggccccagctggcaccaggagccaggtgaaggccagcgagaagatcctgcaggtgcgggccgccagcgccccagccaagggcaccccaggaaaaggagccaccccagcccctcctgggaaggccggggctgtggccagccagaccaaggccggcaagccagaagaagattctgagagcagcagcgaggagagcagtgacagcgaggaggagaccccagctgccaaggccctgctgcaggccaaggccagcggcaagaccagccaggtgggcgccgccagcgccccagccaaggagagccccaggaagggggccgccccagcccctcctgggaagacaggccctgctgtggccaaggcccaggccggcaagcgggaggaggacagccagagcagcagcgaggagagtgacagcgaggaggaggccccagcccaggccaagcccagcggcaaggccccccaggtgcgggccgccagcgccccagccaaggagagccccaggaaaggagctgccccagccccacccaggaagacaggccctgctgctgcccaggtgcaggtgggcaagcaggaggaggacagccgcagcagcagcgaggagagtgacagcgaccgggaggccctggccgccatgaatgctgcccaggtgaagcccctgggcaagagcccccaggtgaagccagccagcaccatgggcatgggccccctgggcaaaggagctggccctgtgcccccaggcaaggtgggccctgccaccccatctgcccaggtgggcaagtgggaggaggacagcgagagcagcagcgaggagagcagtgacagcagtgatggagaggtgcccacagctgtggccccagcccaggagaagagcctgggcaacatcctgcaggccaagcccaccagcagccctgccaagggccccccccagaaggccggccctgtggccgtgcaggtgaaggccgagaagcccatggacaacagcgagagcagcgaggagagcagtgacagcgctgacagcgaggaggccccagctgccatgacagctgcccaggccaagccagccctgaagatcccccagaccaaggcctgccccaagaagaccaacaccacagccagcgccaaggtggcccctgtgcgggtgggcacccaggcccccaggaaggccggcacagccaccagccctgctggcagcagccctgctgtggccggcggcacccagaggcctgctgaggacagcagcagcagcgaggagagtgacagcgaggaggagaagacaggcctggccgtgacagtgggccaggccaagtctgtgggcaagggcctgcaggtgaaggccgcctctgtgcctgtgaagggcagcctgggccagggcacagcccctgtgctgcccgggaagacaggccccaccgtgacccaggtgaaggccgagaagcaggaggacagcgagagcagcgaggaggagagtgacagcgaggaggccgccgccagccctgcccaggtgaagacctctgtgaagaagacccaggccaaggccaacccagctgctgcccgggcccccagcgccaagggcaccatcagcgcccctgggaaggtggtgacagctgctgcccaggccaagcagaggagccccagcaaggtgaagccccctgtgaggaacccccagaacagcacagtgctggcccggggccctgcctctgtgcccagcgtgggcaaggctgtggccacagctgcccaggcccagacaggccctgaggaggacagcggcagcagcgaggaggagagtgacagcgaggaggaggccgagaccctggcccaggtgaagcccagcggcaagacccaccagatccgggccgccctggccccagccaaggagagccccaggaaaggagctgcccccaccccacctgggaagacaggccccagcgctgcccaggccggcaagcaggatgacagcggcagcagcagcgaggagagtgacagtgatggagaggccccagctgctgtgaccagcgcccaggtgatcaagcccccactcatctttgtggaccccaacagaagccctgctggccctgctgccaccccagcccaggcccaggccgccagcacccccaggaaggcccgggccagcgagagcacagcccggagcagcagcagcgagagtgaagatgaagatgtgatcccagccacccagtgcctgaccccaggcatccgcaccaacgtggtgaccatgcccacagcccaccccagaattgcccccaaggcctccatggccggggccagcagcagcaaggagagcagccgcatcagtgatggcaagaagcaggagggccctgccacccaggtgtccaagaagaacccagccagcctgcccctgacccaggccgccctgaaggtgctggcccagaaggccagcgaggcccagccccctgtggcccggacccagcccagcagcggcgtggacagcgctgtgggcaccctgcctgccaccagcccccagagcacctctgtgcaggccaagggcaccaacaagctgaggaagcccaagctgcctgaggtgcagcaggccaccaaggcccctgagagcagtgatgacagcgaggacagcagtgacagcagcagcggcagcgaggaggatggagagggcccccagggcgccaagagcgcccacaccctgggccccacccccagcaggacagagaccctggtggaggagacagctgctgagagcagtgaagatgatgtggtggcccccagccagagcctgctgagcggctacatgaccccaggcctgaccccagccaacagccaggccagcaaggccacccccaagctggacagcagccccagcgtgagcagcaccctggccgccaaggatgatcctgatggcaagcaggaggccaagccccagcaggccgccggcatgctgagccccaagacaggaggcaaggaggccgccagcggcaccaccccccagaagagcaggaagcccaagaagggagctggcaacccccaggccagcaccctggccctgcagagcaacatcacccagtgcctgctgggccagccctggcccctgaatgaggcccaggtgcaggcctctgtggtgaaggtgctgacagagctgctggagcaggagaggaagaaggtggtggacaccaccaaggagagcagcaggaagggctgggagagcaggaagaggaagctgagcggggaccagcctgctgcccggacccccaggagcaagaagaagaagaagctgggcgctggggagggcggggaggcctctgtgtccccagagaagaccagcaccaccagcaagggcaaggccaagagggacaaggccagcggagatgtgaaggagaagaagggcaagggcagcctgggcagccagggcgccaaggatgagcctgaggaggagctgcagaagggcatgggcaccgtggagggcggggaccagagcaaccccaagagcaagaaggagaagaagaagagtgacaagaggaagaaggacaaggagaagaaggagaagaagaagaaggccaagaaggccagcaccaaggacagcgagagccccagccagaagaagaagaagaagaagaagaagacagctgagcagacagtgtag

SEQ ID NO: 50619 - DNA, 4467 bp, Artificial Sequence
  derived and/or modified sequence
atggccgaggcccggaagcggcgggagctgctgcccctgatctaccaccatctcctgcgggccggatacgtgagggccgctcgggaggtgaaggagcaaagtggtcagaaatgttttctggctcagccagtgacgctcttggatatctacacgcactggcagcagaccagcgaactagggagaaaacgcaaagccgaggaagatgcagctcttcaggctaagaagacccgggttagtgaccccataagcacatcggagtctagtgaggaggaagaggaagccgaggcagagactgccaaggcgactccaagactcgcatcaaccaactccagtgtcttaggagcggacttgccatcatccatgaaggaaaaagcaaaggcagaaactgagaaagctgggaaaacaggcaattccatgccccatccagccactggtaagacagtggcgaatcttctgagcggcaagtccccacggaagagcgccgaaccttctgcaaacacaactctggtttctgaaactgaggaagagggtagtgttcctgccttcggggccgccgctaagcccggaatggtatctgccggacaggccgactcctccagcgaggacacaagctctagctcggatgaaaccgacgttgaaggtaagcctagcgtgaaaccagcgcaggtcaaagcaagttctgtgagcaccaaagaatcacctgccagaaaagctgctcccgccccaggaaaggtcggcgatgttacaccccaagttaaggggggtgcactgcccccagcaaagagagcaaaaaaacccgaagaagaatcagagtcaagcgaggaagggagtgaatctgaggaagaggcccccgcggggacaagatcacaagtgaaggcctctgaaaagatcctccaggtcagggcagcgtctgcgccagccaagggaactcccgggaaaggagctactcccgcaccacctggaaaagcaggtgctgtcgcctctcagacaaaggctggaaagcccgaagaggacagcgaaagctccagcgaagagtcctccgattctgaagaagagacccctgctgcaaaggccctgctacaagctaaagcttcaggcaagacctcccaggtcggggccgcctctgcccctgctaaagagagcccgaggaaaggggcggctccagccccccctgggaagactggaccagctgtcgccaaggcacaggccggaaagagggaggaggacagccagtcctcctctgaagagtccgacagtgaggaagaagcacccgcacaggccaagcccagcggaaaggcgcctcaagtacgggcagccagtgcgcccgccaaagaaagcccccgaaaaggcgcagccccagcacctccccggaagaccggcccagcggcagcccaggtgcaggtggggaaacaagaagaagactcgcgaagtagcagcgaggagtcagattctgatcgagaagccctcgccgctatgaatgcggcgcaggtcaagccactcggaaagtccccccaagtgaaacccgcctccactatgggcatgggcccactagggaagggcgcaggccccgttcctcctggcaaggtggggcctgcaacacccagtgcgcaggtggggaagtgggaggaggatagcgagtcgtcatcagaggagagctccgattcttccgatggggaggttccaaccgccgtggctcccgcgcaagagaagagtctcggaaacattctgcaggccaagcccaccagctcaccggccaagggaccgccccagaaggccggtcctgttgccgttcaggtaaaagctgagaaacctatggacaattctgaatcctctgaggagagtagtgattccgccgactcagaagaggcccctgccgctatgacagctgctcaggccaaacccgcccttaagattccccagaccaaggcttgccccaaaaagacaaacacaactgcatccgctaaggtcgcccctgtaagagtggggacccaggctccccgtaaagccgggacagcaacatctcccgcaggatcttcacccgcagtggccggaggtacccagagacctgctgaagatagcagcagtagtgaagaatctgacagtgaggaagagaaaaccggcctcgcggtgacggtggggcaggctaagagcgttggcaaggggttgcaggtgaaggccgctagcgtccctgtgaaaggctcactaggccagggaacagctccggtgcttcccgggaaaactggccccaccgttacccaggtaaaagctgaaaaacaagaggactccgaatcctctgaagaggaaagcgattctgaagaggctgcagcatcaccggctcaggtgaagacaagtgtcaaaaaaacacaggcaaaggcaaatccagcagcggctcgggcaccctctgcgaaaggcactatctctgcccctggcaaggttgtcactgctgctgcccaagccaagcagcggtctccatcaaaagtgaaaccccctgtaagaaatccccaaaactccaccgtcctggcccgtgggccggccagtgtgcccagtgtgggaaaagccgtggcaactgccgcacaggctcagacggggcctgaagaagactcagggagcagcgaagaagaatcggacagcgaggaagaggcagaaaccctggcccaagtgaaacccagtggaaaaactcaccagatcagggccgccctagctcccgcaaaagaatctcccaggaaaggcgctgctccgacccctccaggcaagaccgggccgagcgcggctcaggccgggaaacaagacgattcagggtcatcctctgaggaatctgactccgatggagaagcacctgctgccgtaacctccgctcaggttataaaaccccctctgattttcgtggatcctaaccgctccccagctggtccagccgcaacaccagcccaggcccaggccgcctctacgcctcggaaggctcgtgcaagcgaaagcaccgcccggtcctcttcctcagagtctgaggatgaggacgtaattccggccacccagtgtctgacgcctggaatcaggacaaacgtcgtgacgatgcccacagcccacccaagaatcgcacccaaggccagtatggctggggcctcttcctctaaggagtctagtagaatctctgacggcaaaaagcaggaaggacctgcaacacaagtttccaagaagaacccagcatcactgcccctgactcaggcagccctcaaagtactggctcagaaagctagcgaagcccaaccaccagtcgcacgcacacagccatcctctggggtggatagcgccgttgggaccctacccgcgactagtccccagtccacttccgtccaagctaaagggaccaacaaactgcgaaagcctaagctgccagaagtgcagcaggccacgaaagccccagaatcttcagatgactcagaggactccagcgattcctcaagtggctctgaggaggacggggaggggcctcagggcgctaaatctgcacacactctgggcccaacaccatcccgaacggagactcttgtggaagaaacggccgccgagtctagcgaggatgatgtggtcgccccatcacagagcctgttgtcaggatatatgacccccggcctgacgccagcaaactcgcaggccagtaaggctactccgaaactggactcatctccaagcgtttcctctacgcttgcagccaaggatgaccccgatgggaagcaggaagctaagcctcaacaggcagccgggatgctgtctccgaaaaccgggggaaaggaagccgcctcaggaaccaccccacaaaagagtaggaagcccaagaaaggcgcgggaaacccgcaggcatccaccctggcactgcagagcaacatcacacagtgccttctcggacagccctggcccctcaatgaagctcaggtccaggcctccgtggtgaaggtgctgacagaactcctcgaacaggagcggaaaaaggtagttgatacaaccaaggagtcctcgaggaaaggatgggagtcacgaaaacgcaaactgagcggggaccagcccgcggctcgaaccccccgctctaaaaagaagaagaaactgggcgctggagaaggaggcgaagcaagcgttagtcctgaaaaaaccagtaccacctccaaaggcaaggcaaaacgggacaaagcgtctggcgacgtgaaggagaaaaagggaaagggcagccttggatcgcagggtgccaaggatgaacccgaagaagaactgcaaaagggtatgggtacagtagaggggggggatcaatcaaaccctaaatctaagaaggaaaaaaaaaaaagcgacaagcgaaagaaagataaggagaaaaaggagaagaagaagaaggcaaagaaagccagtaccaaggatagcgaatcacctagtcaaaaaaagaagaaaaagaaaaagaagaccgccgaacaaacagtctag

SEQ ID NO: 50620 - DNA, 4467 bp, Artificial Sequence
  derived and/or modified sequence
atggctgaggccaggaaacgcagggagctgttacccctcatctatcaccaccttctgcgcgcaggctatgtgcgcgctgccagagaggtcaaggaacagagcggccaaaaatgcttcctggcccagcccgtgaccctgcttgacatctacacacactggcagcagacatctgaactgggcagaaaaagaaaagccgaagaagatgcggctctgcaggcgaagaaaactagggtgtccgacccaatttcaacctccgagtcctcagaggaagaagaggaagcggaggccgaaacagccaaagctacccccaggctggcgagtacaaattcaagtgtcctgggcgcagacctgccatccagtatgaaggagaaagcaaaggctgaaacagaaaaggcaggaaagacaggcaacagtatgcctcatccagccacaggcaagacagtggcgaacctcctgtcaggaaaatcaccgagaaagtccgccgaaccgagcgccaacacaactttagtctccgagacagaggaggaaggatcagtaccagctttcggagccgcagctaagccaggcatggtttcagctggacaagctgacagttcttccgaagatactagttcatcaagtgatgagaccgacgtcgagggaaaaccctccgtgaaacctgctcaagtcaaggcatcgagcgtgtctactaaagaatcccctgctagaaaggccgcacctgcacctggaaaggtgggagacgtcactccccaggtcaaaggaggggctctgccccctgccaaacgcgcaaaaaagcccgaagaggagagcgagtccagcgaggaaggatctgagtcagaggaggaagcccctgccggaacacgctcacaagtgaaggcctccgagaagattttacaagtcagagccgcatccgcgccagccaagggcactccagggaagggggcaacacctgccccacccggtaaagcgggtgcggtggcgtcccagactaaggctggcaagcctgaggaagacagcgagtccagtagtgaggaatctagtgactccgaagaggaaactcctgcggctaaagccctgctccaagcaaaagcaagtggtaagaccagccaggtgggagctgcttccgcaccagcgaaagagtcccccagaaaaggggctgcacctgcacctccgggaaagaccggacccgcagttgccaaggcccaggcaggaaaacgggaagaggactcacaaagctcatccgaagaatcggacagcgaagaggaagcgccagcacaggccaagccctccggaaaagccccacaagtgcgtgccgcaagtgcccctgccaaggaatctcccagaaagggagctgcccctgcgcctcctcgtaagacaggccctgctgccgcacaggtgcaggtaggtaagcaagaggaggactcccggtcttcatctgaagagagcgactcagacagagaagcactggccgctatgaatgctgcccaggtaaaaccgctagggaagtcgccgcaggtgaaaccagctagtaccatgggcatgggtcccttgggaaagggggctggcccagtgccaccagggaaagtgggcccagcaactccgagcgcacaggttggcaagtgggaggaagactccgagtcttcctccgaggaaagctctgacagctcagatggggaggtgccaacagcagtggcacccgcacaggagaaatcgctggggaatattctgcaagcaaaaccaacaagctctcctgccaagggaccaccccaaaaagccggacctgtagcagtgcaggttaaagccgagaaacctatggataattccgagtccagtgaagaatcttcggacagcgccgactccgaagaagcacccgcagctatgaccgctgcacaggcaaaaccagccctcaagatcccacagacgaaggcatgcccaaaaaaaactaatactacagcctctgccaaagtggccccagtccgggtgggaactcaggcgccaagaaaagctggcacggcgacctctcctgcgggatctagccctgctgtggccggtggcactcagaggccagctgaagactcctcctcgtctgaagaaagcgacagcgaggaggaaaaaaccggcctcgccgtcacagtggggcaagctaagtccgtcggcaagggcctgcaagtgaaggcggcatccgtgcccgtgaaaggcagcctcggacagggcactgcacctgtcctccccggaaagaccggccctacagtgacccaggtaaaggccgagaagcaagaggactcagagtcatcagaggaggaaagtgacagcgaggaggcagcggcttcgccggctcaggtgaaaacaagcgttaaaaagacccaagctaaagctaatcctgcagccgcaagagcgccaagcgcaaagggcactatatcggctccaggcaaggtggtgacagctgctgctcaggcaaaacaacggagcccgtccaaagtgaaacctcccgtgaggaatccacagaacagcactgtattagccagggggccagcttcggtcccatccgtcggcaaggctgttgccactgccgctcaggcacaaacaggacccgaggaggactctggcagctccgaagaggagagcgattccgaggaggaggccgagacactggcgcaggtgaaaccaagcggaaagactcatcagattcgagctgctttagccccagccaaggaaagcccaagaaagggcgcagcccctacgccgcctggtaagactgggccttcagccgcacaggccggaaaacaagatgattccggatcatcctctgaggagagcgatagtgacggcgaagctcctgccgcagttacatccgcccaggtcattaagcctccgctgatctttgtggaccctaatagatctcccgcaggcccagcagcaactccagcgcaggctcaggccgcatcgaccccgaggaaagctcgggcatccgaaagtaccgccaggtcgagctctagcgaatctgaagatgaggacgtgattcctgcaactcaatgcctgacccccggaattcggactaatgtggtgactatgcccaccgcacaccctcgcatcgccccaaaggcttctatggctggcgcttcaagctcaaaagagtccagtcggatcagtgatggcaagaaacaggagggaccagccacacaggtgagtaagaaaaatccagcttctctgcccctgacccaggccgctcttaaagtgctggctcagaaggctagcgaggcccagccgcctgtcgctcgcacacaaccatcatccggcgtcgactccgccgtgggaaccctgcccgctacctcacctcagtccaccagcgttcaggctaagggcactaacaagttgcgcaaaccgaaattgccggaagtacagcaggcgaccaaagctccagaatcctcagacgacagcgaagacagtagcgatagctcgagcggtagcgaggaggacggagaggggcctcagggggctaaaagtgcacacaccttaggaccaacaccttctcgtacagagactctggtggaagagactgcagcagagtcttcagaagacgatgtcgtggctccctcccagtcactacttagtggctatatgacgcccggactcacccctgctaatagtcaagcttccaaagccacgcccaagctggactcgtctccctcagtttccagcactctcgctgctaaagacgatccagacgggaagcaagaagccaagccccagcaggctgcgggaatgttgagtccaaagaccggcggaaaagaagcggcttccggcacgacacctcaaaagtctaggaagccaaagaaaggagctggaaatcctcaggcctctactttggcccttcagtctaacatcacccaatgtcttcttggccaaccctggcctcttaatgaggcacaggttcaggcatcggtggtaaaggtgttgaccgaacttcttgaacaggaacgcaagaaagtggtggacactacgaaggagagttctcgcaaggggtgggagagtaggaaacggaaactctctggtgatcagcccgctgcacgcacacctcggagcaaaaaaaagaagaaattgggtgccggagagggcggagaggcatcagtctcaccagagaaaaccagcacgacaagtaaagggaaggctaagagggataaagcatctggtgatgtcaaagaaaagaagggcaaaggatcccttggatctcagggggctaaagatgaacccgaggaagaactgcagaaaggcatgggtaccgttgagggaggcgaccagtccaacccaaagagcaagaaggaaaagaagaagagcgacaaaagaaaaaaggataaagagaagaaggagaagaaaaagaaggctaagaaagcctccactaaagatagtgaatctccttctcagaaaaaaaagaagaagaagaagaaaaccgcggagcagacagtctag

SEQ ID NO: 50621 - DNA, 4467 bp, Artificial Sequence
  derived and/or modified sequence
atggccgaggccaggaagcggcgggagctacttcccctgatctaccaccatctgctgcgggctggctatgtgcgtgcggcgcgggaagtgaaggagcagagcggccagaagtgtttcctggctcagcccgtaacccttctggacatctatacacactggcaacaaacctcagagcttggtcggaagcggaaggcagaggaagatgcggcactgcaagctaagaaaacccgtgtgtcagaccccatcagcacctcggagagctcggaagaggaggaagaagcagaagccgaaaccgccaaagccaccccaagactagcatctaccaactcctcagtcctgggggcggacttgccatcaagcatgaaagaaaaagccaaggcagagacagagaaagctggcaagactgggaattccatgccacaccctgccactgggaagacggtggccaaccttctttctgggaagtctcccaggaagtcagcagagccctcagcaaatactacgttggtctcagaaactgaggaggagggcagcgtcccggcctttggagctgctgccaagcctgggatggtgtcagcgggccaggccgacagctccagcgaggacacctccagctccagtgatgagacagacgtggaggggaaaccctcagtaaaaccagcccaggtcaaagcctcatcagtttctactaaggagtctccagcaagaaaggcggccccagcccctgggaaggtgggggatgtgacaccccaggtcaaaggaggggccctgcccccagccaagagggccaagaagccagaagaggagtcagagagtagtgaggagggatctgaaagtgaggaggaggcccctgcagggacacgaagccaggtaaaggcctctgaaaaaattctccaggtcagagctgcctcagcccctgccaaggggacccctgggaaaggggctaccccagcaccccctgggaaggcaggggctgtagcctcccagaccaaggcagggaagccagaggaggactcagagagcagcagcgaggagtcatctgacagtgaggaggagacgccagctgccaaggccctgcttcaggcgaaggcctcaggaaaaacctctcaggtcggagctgcctcagcccctgccaaggagtcccccaggaaaggagctgccccagcgccccctgggaagacagggcctgcagttgccaaggcccaggcggggaagcgggaggaggactcgcagagcagcagcgaggaatcggacagtgaggaggaggcgcctgctcaggcgaagccttcagggaaggccccccaggtcagagccgcctcggcccctgccaaggagtcccccaggaaaggggctgccccagcacctcctaggaaaacagggcctgcagccgcccaggtccaggtggggaagcaggaggaggactcaagaagcagcagcgaggagtcagacagtgacagagaggcactggcagccatgaatgcagctcaggtgaagcccttggggaaaagcccccaggtgaaacctgcctctaccatgggcatggggcccttggggaaaggcgccggcccagtgccacccgggaaggtggggcctgcaaccccctcagcccaggtggggaagtgggaggaggactcagagagcagtagtgaggagtcatcagacagcagtgatggagaggtgcccacagctgtggccccggctcaggaaaagtccttggggaacatcctccaggccaaacccacctccagtcctgccaaggggccccctcagaaggcagggcctgtagccgtccaggtcaaggctgaaaagcccatggacaactcggagagcagcgaggagtcatcggacagtgcggacagtgaggaggcaccagcagccatgactgcagctcaggcaaaaccagctctgaaaattcctcagaccaaggcctgcccaaagaaaaccaataccactgcatctgccaaggtcgcccctgtgcgagtgggcacccaagccccccggaaagcaggaactgcgacttctccagcaggctcatccccagctgtggctgggggcacccagagaccagcagaggattcttcaagcagtgaggaatcagatagtgaggaagagaagacaggtcttgcagtaaccgtgggacaggcaaagtctgtggggaaaggcctccaggtgaaagcagcctcagtgcctgtcaaggggtccttggggcaagggactgctccagtactccctgggaagacggggcctacagtcacccaggtgaaagctgaaaagcaggaagactctgagagcagtgaggaggaatcagacagtgaggaagcagctgcatctccagcacaggtgaaaacctcagtaaagaaaacccaggccaaagccaacccagctgccgccagagcaccttcagcaaaagggacaatttcagcccctggaaaagttgtcactgcagctgctcaagccaagcagaggtctccatccaaggtgaagccaccagtgagaaacccccagaacagtaccgtcttggcgaggggcccagcatctgtgccatctgtggggaaggccgtggctacagcagctcaggcccagacagggccagaggaggactcagggagcagtgaggaggagtcagacagtgaggaggaggcggagacgctggctcaggtgaagccttcagggaagacccaccagatcagagctgccttggctcctgccaaggagtcccccaggaaaggggctgccccaacacctcctgggaagacagggccttcggctgcccaggcagggaagcaggatgactcagggagcagcagcgaggaatcagacagtgatggggaggcaccggcagctgtgacctctgcccaggtgattaaaccccctctgatttttgtcgaccctaatcgtagtccagctggcccagctgctacacccgcacaagcccaggctgcaagcaccccgaggaaggcccgagcctcggagagcacagccaggagctcctcctccgagagcgaggatgaggacgtgatccccgctacacagtgcttgactcctggcatcagaaccaatgtggtgaccatgcccactgcccacccaagaatagcccccaaagccagcatggctggggccagcagcagcaaggagtccagtcggatatcagatggcaagaaacaggagggaccagccactcaggtgtcaaagaagaacccagcttccctcccactgacccaggctgccctgaaggtcctcgcccagaaagccagtgaggctcagcctcctgttgccaggacccagccttcaagtggggttgacagtgctgtgggaacactccctgcaacaagtccccagagcacctccgtccaggccaaagggaccaacaagctcagaaaacctaagcttcctgaggtccagcaggccaccaaagcccctgagagctcagatgacagtgaggacagcagcgacagttcttcagggagtgaggaagatggtgaagggccccagggggccaagtcagcccacacgctgggtcccaccccctccaggacagagaccctggtggaggagaccgcagcagagtccagcgaggatgatgtggtggcgccatcccagtctctcctctcaggttatatgacccctggactaaccccagccaattcccaggcctcaaaagccactcccaagctagactccagcccctcagtttcctctactctggccgccaaagatgacccagatggcaagcaggaggcaaagccccaacaggcagcaggcatgttgtcccctaaaacaggtggaaaagaggctgcttcaggcaccacacctcagaagtcccggaagcccaagaaaggggctgggaacccccaagcctcaaccctggcgctgcaaagcaacatcacccagtgcctcctgggccaaccctggcccctgaatgaggcccaggtgcaggcctcagtggtgaaggtcctgactgagctgctggaacaggaaagaaagaaggtggtggacaccaccaaggagagcagcaggaagggctgggagagccgcaagcggaagctatcgggagaccagccagctgccaggacccccaggagcaagaagaagaagaagctgggggccggggaaggtggggaggcctctgtttccccagaaaagacctccacgacttccaaggggaaagcaaagagagacaaagcaagtggtgatgtcaaggagaagaaagggaaggggtctcttggctcccaaggggccaaggacgagccagaagaggagcttcagaaggggatggggacggttgaaggtggagatcaaagcaacccaaagagcaagaaggagaagaagaaatccgacaagagaaaaaaagacaaagaaaaaaaagaaaagaagaagaaagcaaaaaaggcctcaaccaaagattctgagtcaccgtcccagaagaaaaagaagaaaaagaagaagacagcagagcagactgtatga

SEQ ID NO: 50622 - protein, 1451 aa, Artificial Sequence
  derived and/or modified sequence
MAEARKRRELLPLIYHHLLRAGYVRAAREVKEQSGQKCFLAQPVTLLDIYTHWQQTSELGRKRKAEEDAALQAKKTRVSDPISTSESSEEEEEAEAETAKATPRLASTNSSVLGADLPSSMKEKAKAETEKAGKTGNSMPHPATGKTVANLLSGKSPRKSAEPSANTTLVSETEEEGSVPAFGAAAKPGMVSAGQADSSSEDTSSSSDETDVEGKPSVKPAQVKASSVSTKESPARKAAPAPGKVGDVTPQVKGGALPPAKRAKKPEEESESSEEGSESEEEAPAGTRSQVKASEKILQVRAASAPAKGTPGKGATPAPPGKAGAVASQTKAGKPEEDSESSSEESSDSEEETPAAKALLQAKASGKTSQVGAASAPAKESPRKGAAPAPPGKTGPAVAKAQAGKREEDSQSSSEESDSEEEAPAQAKPSGKAPQVRAASAPAKESPRKGAAPAPPRKTGPAAAQVQVGKQEEDSRSSSEESDSDREALAAMNAAQVKPLGKSPQVKPASTMGMGPLGKGAGPVPPGKVGPATPSAQVGKWEEDSESSSEESSDSSDGEVPTAVAPAQEKSLGNILQAKPTSSPAKGPPQKAGPVAVQVKAEKPMDNSESSEESSDSADSEEAPAAMTAAQAKPALKIPQTKACPKKTNTTASAKVAPVRVGTQAPRKAGTATSPAGSSPAVAGGTQRPAEDSSSSEESDSEEEKTGLAVTVGQAKSVGKGLQVKAASVPVKGSLGQGTAPVLPGKTGPTVTQVKAEKQEDSESSEEESDSEEAAASPAQVKTSVKKTQAKANPAAARAPSAKGTISAPGKVVTAAAQAKQRSPSKVKPPVRNPQNSTVLARGPASVPSVGKAVATAAQAQTGPEEDSGSSEEESDSEEEAETLAQVKPSGKTHQIRAALAPAKESPRKGAAPTPPGKTGPSAAQAGKQDDSGSSSEESDSDGEAPAAVTSAQVIKPPLIFVDPNRSPAGPAATPAQAQAASTPRKARASESTARSSSSESEDEDVIPATQCLTPGIRTNVVTMPTAHPRIAPKASMAGASSSKESSRISDGKKQEGPATQVDSAVGTLPATSPQSTSVQAKGTNKLRKPKLPEVQQATKAPESSDDSEDSSDSSSGSEEDGEGPQGAKSAHTLVGPTPSRTETLVEETAAESSEDDVVAPSQSLLSGYMTPGLTPANSQASKATPKLDSSPSVSSTLAAKDDPDGKQEAKPQQAAGMLSPKTGGKEAASGTTPQKSRKPKKGAGNPQASTLALQSNITQCLLGQPWPLNEAQVQASVVKVLTELLEQERKKVVDTTKESSRKGWESRKRKLSGDQPAARTPRSKKKKKLGAGEGGEASVSPEKTSTTSKGKAKRDKASGDVKEKKGKGSLGSQGAKDEPEEELQKGMGTVEGGDQSNPKSKKEKKKSDKRKKDKEKKEKKKKAKKASTKDSESPSQKKKKKKKKTAEQTV

SEQ ID NO: 50623 - DNA, 4356 bp, Artificial Sequence
  derived and/or modified sequence
atggccgaggccagaaagagaagagagctgctgcccctgatctaccaccacctgctgagagccggctacgtgagagccgccagagaggtgaaggagcagagcggccagaagtgcttcctggcccagcccgtgaccctgctggacatctacacccactggcagcagaccagcgagctgggcagaaagagaaaggccgaggaggacgccgccctgcaggccaagaagaccagagtgagcgaccccatcagcaccagcgagagcagcgaggaggaggaggaggccgaggccgagaccgccaaggccacccccagactggccagcaccaacagcagcgtgctgggcgccgacctgcccagcagcatgaaggagaaggccaaggccgagaccgagaaggccggcaagaccggcaacagcatgccccaccccgccaccggcaagaccgtggccaacctgctgagcggcaagagccccagaaagagcgccgagcccagcgccaacaccaccctggtgagcgagaccgaggaggagggcagcgtgcccgccttcggcgccgccgccaagcccggcatggtgagcgccggccaggccgacagcagcagcgaggacaccagcagcagcagcgacgagaccgacgtggagggcaagcccagcgtgaagcccgcccaggtgaaggccagcagcgtgagcaccaaggagagccccgccagaaaggccgcccccgcccccggcaaggtgggcgacgtgaccccccaggtgaagggcggcgccctgccccccgccaagagagccaagaagcccgaggaggagagcgagagcagcgaggagggcagcgagagcgaggaggaggcccccgccggcaccagaagccaggtgaaggccagcgagaagatcctgcaggtgagagccgccagcgcccccgccaagggcacccccggcaagggcgccacccccgccccccccggcaaggccggcgccgtggccagccagaccaaggccggcaagcccgaggaggacagcgagagcagcagcgaggagagcagcgacagcgaggaggagacccccgccgccaaggccctgctgcaggccaaggccagcggcaagaccagccaggtgggcgccgccagcgcccccgccaaggagagccccagaaagggcgccgcccccgccccccccggcaagaccggccccgccgtggccaaggcccaggccggcaagagagaggaggacagccagagcagcagcgaggagagcgacagcgaggaggaggcccccgcccaggccaagcccagcggcaaggccccccaggtgagagccgccagcgcccccgccaaggagagccccagaaagggcgccgcccccgccccccccagaaagaccggccccgccgccgcccaggtgcaggtgggcaagcaggaggaggacagcagaagcagcagcgaggagagcgacagcgacagagaggccctggccgccatgaacgccgcccaggtgaagcccctgggcaagagcccccaggtgaagcccgccagcaccatgggcatgggccccctgggcaagggcgccggccccgtgccccccggcaaggtgggccccgccacccccagcgcccaggtgggcaagtgggaggaggacagcgagagcagcagcgaggagagcagcgacagcagcgacggcgaggtgcccaccgccgtggcccccgcccaggagaagagcctgggcaacatcctgcaggccaagcccaccagcagccccgccaagggccccccccagaaggccggccccgtggccgtgcaggtgaaggccgagaagcccatggacaacagcgagagcagcgaggagagcagcgacagcgccgacagcgaggaggcccccgccgccatgaccgccgcccaggccaagcccgccctgaagatcccccagaccaaggcctgccccaagaagaccaacaccaccgccagcgccaaggtggcccccgtgagagtgggcacccaggcccccagaaaggccggcaccgccaccagccccgccggcagcagccccgccgtggccggcggcacccagagacccgccgaggacagcagcagcagcgaggagagcgacagcgaggaggagaagaccggcctggccgtgaccgtgggccaggccaagagcgtgggcaagggcctgcaggtgaaggccgccagcgtgcccgtgaagggcagcctgggccagggcaccgcccccgtgctgcccggcaagaccggccccaccgtgacccaggtgaaggccgagaagcaggaggacagcgagagcagcgaggaggagagcgacagcgaggaggccgccgccagccccgcccaggtgaagaccagcgtgaagaagacccaggccaaggccaaccccgccgccgccagagcccccagcgccaagggcaccatcagcgcccccggcaaggtggtgaccgccgccgcccaggccaagcagagaagccccagcaaggtgaagccccccgtgagaaacccccagaacagcaccgtgctggccagaggccccgccagcgtgcccagcgtgggcaaggccgtggccaccgccgcccaggcccagaccggccccgaggaggacagcggcagcagcgaggaggagagcgacagcgaggaggaggccgagaccctggcccaggtgaagcccagcggcaagacccaccagatcagagccgccctggcccccgccaaggagagccccagaaagggcgccgcccccaccccccccggcaagaccggccccagcgccgcccaggccggcaagcaggacgacagcggcagcagcagcgaggagagcgacagcgacggcgaggcccccgccgccgtgaccagcgcccaggtgatcaagccccccctgatcttcgtggaccccaacagaagccccgccggccccgccgccacccccgcccaggcccaggccgccagcacccccagaaaggccagagccagcgagagcaccgccagaagcagcagcagcgagagcgaggacgaggacgtgatccccgccacccagtgcctgacccccggcatcagaaccaacgtggtgaccatgcccaccgcccaccccagaatcgcccccaaggccagcatggccggcgccagcagcagcaaggagagcagcagaatcagcgacggcaagaagcaggagggccccgccacccaggtggacagcgccgtgggcaccctgcccgccaccagcccccagagcaccagcgtgcaggccaagggcaccaacaagctgagaaagcccaagctgcccgaggtgcagcaggccaccaaggcccccgagagcagcgacgacagcgaggacagcagcgacagcagcagcggcagcgaggaggacggcgagggcccccagggcgccaagagcgcccacaccctggtgggccccacccccagcagaaccgagaccctggtggaggagaccgccgccgagagcagcgaggacgacgtggtggcccccagccagagcctgctgagcggctacatgacccccggcctgacccccgccaacagccaggccagcaaggccacccccaagctggacagcagccccagcgtgagcagcaccctggccgccaaggacgaccccgacggcaagcaggaggccaagccccagcaggccgccggcatgctgagccccaagaccggcggcaaggaggccgccagcggcaccaccccccagaagagcagaaagcccaagaagggcgccggcaacccccaggccagcaccctggccctgcagagcaacatcacccagtgcctgctgggccagccctggcccctgaacgaggcccaggtgcaggccagcgtggtgaaggtgctgaccgagctgctggagcaggagagaaagaaggtggtggacaccaccaaggagagcagcagaaagggctgggagagcagaaagagaaagctgagcggcgaccagcccgccgccagaacccccagaagcaagaagaagaagaagctgggcgccggcgagggcggcgaggccagcgtgagccccgagaagaccagcaccaccagcaagggcaaggccaagagagacaaggccagcggcgacgtgaaggagaagaagggcaagggcagcctgggcagccagggcgccaaggacgagcccgaggaggagctgcagaagggcatgggcaccgtggagggcggcgaccagagcaaccccaagagcaagaaggagaagaagaagagcgacaagagaaagaaggacaaggagaagaaggagaagaagaagaaggccaagaaggccagcaccaaggacagcgagagccccagccagaagaagaagaagaagaagaagaagaccgccgagcagaccgtgtag

SEQ ID NO: 50624 - DNA, 4356 bp, Artificial Sequence
  derived and/or modified sequence
atggccgaggcccgcaagcggagggaactgttgccattgatttatcatcatctgctccgtgccggatatgtgagggcggcacgggaagttaaggagcagtccggccagaagtgttttttggcccagccagtcacactactcgacatctatactcactggcaacaaacttctgaactgggccgaaaacggaaagccgaagaggacgctgccctgcaggctaagaagaccagagttagcgatccaatcagcacaagcgagtcctcagaagaagaggaagaggctgaggccgagacagctaaggctacccccagactggcctccactaattcaagtgtacttggggcggatctgccttctagtatgaaggaaaaagccaaggcagagactgagaaagcagggaaaactgggaatagcatgccccatccagcaaccggcaagacagtggccaatctactgagtggcaaatcgccaagaaaatcagcagagccaagtgcaaataccacccttgtgtcggagacagaggaagaggggtctgtgcccgccttcggagccgcggcaaaacctggaatggtcagcgccgggcaagcagacagttcctccgaagacacatcatctagctctgacgagacagacgttgaaggcaaacctagcgtgaagccggcccaggtgaaagcgtcttcggtttccacaaaggagtctccggccagaaaagccgcccctgctcctggcaaggttggggacgtcacaccccaggtgaaggggggtgcactgcccccagccaagagagctaaaaagcccgaagaggaatctgaatcttcggaagagggtagtgaatctgaagaggaagcccctgcagggaccagaagccaggttaaggcttcagagaagattctgcaggtgcgggccgcctctgctccggccaagggtacccccgggaagggcgctaccccggccccccctgggaaggcaggtgccgtcgcttcacagacgaaggctggtaagcctgaagaggacagtgaaagttcttctgaggaaagctctgattccgaggaggagacccctgctgccaaggccttgctgcaggcgaaggcctccggaaagaccagccaggttggcgcagcgagcgcccccgcaaaagagagcccccgcaagggggccgcaccagcccctccaggaaagactggacctgctgtggctaaggcccaggctgggaagagagaagaagattcccaaagcagcagtgaggaaagtgatagtgaggaagaagctccggcccaggccaaaccctccggcaaggccccccaagttagagctgcgtccgcccctgccaaggaatcccctcggaagggcgccgctcccgcccctccacgtaaaacagggcctgccgccgcacaagtgcaggtggggaagcaggaagaggacagccggtcctctagcgaggagtccgactcagaccgagaagccttggcagctatgaacgctgcccaagtcaaaccattgggcaaaagcccacaggtgaagcccgcgagtaccatgggtatgggccccctgggcaaaggagcaggaccagttccgcccgggaaggtaggacctgccacaccctcagcccaagtgggtaaatgggaagaagattccgaatcctcttccgaggaaagctccgattcatcagacggcgaagtgcctaccgcagtggctcccgctcaggagaagtctctcgggaatatcctacaagccaagccgacatcctctcctgctaaagggcctccacagaaggctggcccagttgctgtgcaggtgaaagctgagaagcctatggacaatagtgagtcaagtgaagaatcttcagactctgccgactctgaggaggcacctgcggccatgactgctgcccaggccaagccagctttgaaaattccccagacgaaggcctgtcctaaaaagactaacaccaccgcatccgctaaagtggcccccgtccgcgtgggtacccaggccccgcgaaaagccggtacagcgactagtccagcaggttcttcccccgccgtcgccggcggcactcagaggcccgcggaagactcctcctctagcgaggaatccgacagcgaagaagagaagactggactggctgtgaccgtcggacaggccaagtcagtgggtaaaggcctacaggtgaaagctgcaagtgtccccgttaaagggagtcttggacaaggcacagcccctgtgcttcctggtaaaaccggacctacggtcacccaagtcaaggccgagaaacaggaagattcagagagtagtgaggaggaatccgacagtgaggaagccgcagcctcacccgcacaggtcaagacgtccgttaaaaagactcaggccaaggccaatccggcagctgctagggccccaagtgccaaagggactatatcagccccaggaaaagttgtgactgccgctgcacaggcgaaacaacggtcaccatccaaggttaagccaccggtgcgtaacccccagaatagcaccgtgctggcccgagggcctgctagcgtccccagtgtgggaaaagccgttgctactgcagctcaggctcaaaccgggcctgaagaggactcaggcagcagcgaagaagagtctgattccgaggaggaagccgagactctggcacaggtcaagccatccggaaaaacgcatcagatacgagcagccctggcccccgccaaagaatcccctcgcaagggcgccgccccaactccccctggaaagactggccccagcgccgcccaggcaggaaaacaggatgactccggctcgtcgtccgaggagtcagattctgacggcgaagcgcctgcggctgtgacttctgcccaagtgatcaagccacctctgattttcgtcgatccaaatcggtctcctgcgggccccgccgccaccccggcccaagcccaggccgcaagtaccccaagaaaggcccgagcgtctgagtcgactgctcgaagctcctcgagtgagtcagaagacgaggatgtgatcccagcaacacagtgtttgacacccgggatacggaccaacgtggtgacaatgcccactgctcacccccgaatcgcccctaaggcaagtatggcgggtgccagcagctccaaggaatcgtcccgtatctccgacggcaagaagcaggagggaccagcgacacaggttgacagcgctgtgggaacgctgcccgccacatcccctcagagtactagcgtccaggctaaggggaccaacaagctgagaaaacccaaactcccagaggttcagcaggcaactaaggccccagagtccagcgatgattctgaagattcttccgacagttcatcagggtccgaggaggacggcgagggaccacagggggcaaagtcggcacacacacttgtcggtccaaccccatcccggaccgaaaccctggtagaggaaactgccgccgaaagcagcgaggatgacgtcgtcgccccatcgcagtccctgctttcaggatatatgactcctggtttgactccagccaacagccaggcgagtaaagcaacccctaagctagactcgtccccgagcgtgagtagcaccctggccgcaaaagacgatccggatgggaagcaggaggccaagccccagcaggcagctggcatgctaagccccaaaacaggaggcaaagaagcagcctctggaaccacaccgcagaagtcacggaaacctaaaaaaggtgcgggaaaccctcaggcgtctacattggctctgcagagcaacattacccagtgtttattgggccagccctggccactgaacgaggcccaagtgcaagccagcgtggtgaaggtactcaccgagttgctggaacaggagcggaagaaggtcgtggatactaccaaggagtcatctcgcaaaggctgggagagtcggaaaagaaagctgtccggagaccagcccgcggctcgcacccctagatccaagaaaaaaaagaaactgggagctggggagggcggcgaagcctctgtaagccccgaaaagaccagcacaacttcaaaaggtaaggcaaaacgggataaggcttccggcgatgtgaaagagaagaaagggaagggttcattgggatctcagggcgctaaggacgagccggaggaggagttgcagaagggaatggggaccgttgaggggggtgatcagtcaaatcctaagtctaaaaaggagaagaagaaatcggataaacggaaaaaggacaaggagaaaaaagaaaaaaagaagaaggcaaaaaaagcttccaccaaagattccgagagtcccagccagaaaaaaaagaaaaaaaaaaagaaaacggccgagcagaccgtgtag

SEQ ID NO: 50625 - DNA, 4356 bp, Artificial Sequence
  derived and/or modified sequence
atggccgaggccaggaagagaagagagctgctgcccctcatctaccaccacctgctgcgggccggctacgtgcgggccgcccgggaggtgaaggagcagagcggccagaagtgcttcctggcccagcctgtgaccctgctggacatctacacccactggcagcagaccagcgagctgggcaggaagaggaaggccgaggaggatgctgccctgcaggccaagaagaccagggtgtctgaccccatcagcaccagcgagagcagcgaggaggaggaggaggccgaggccgagacagccaaggccaccccccggctggccagcaccaacagctctgtgctgggcgctgacctgcccagctccatgaaggagaaggccaaggccgagacagagaaggccggcaagacaggcaacagcatgccccacccagccaccgggaagacagtggccaacctgctgagcggcaagagccccaggaagtctgctgagcccagcgccaacaccaccctggtgtctgaaacagaggaggagggctctgtgcctgccttcggggctgctgccaagccaggcatggtgtctgctggccaggccgacagcagcagcgaggacaccagcagcagcagtgatgaaacagatgtggagggcaagcccagcgtgaagccagcccaggtgaaggccagctctgtgtccaccaaggagagccctgccaggaaggccgccccagcccctgggaaggtgggagatgtgaccccccaggtgaagggcggggccctgcccccagccaagagggccaagaagccagaggaggagagcgagagcagcgaggagggcagcgagagcgaggaggaggccccagctggcaccaggagccaggtgaaggccagcgagaagatcctgcaggtgcgggccgccagcgccccagccaagggcaccccaggaaaaggagccaccccagcccctcctgggaaggccggggctgtggccagccagaccaaggccggcaagccagaagaagattctgagagcagcagcgaggagagcagtgacagcgaggaggagaccccagctgccaaggccctgctgcaggccaaggccagcggcaagaccagccaggtgggcgccgccagcgccccagccaaggagagccccaggaagggggccgccccagcccctcctgggaagacaggccctgctgtggccaaggcccaggccggcaagcgggaggaggacagccagagcagcagcgaggagagtgacagcgaggaggaggccccagcccaggccaagcccagcggcaaggccccccaggtgcgggccgccagcgccccagccaaggagagccccaggaaaggagctgccccagccccacccaggaagacaggccctgctgctgcccaggtgcaggtgggcaagcaggaggaggacagccgcagcagcagcgaggagagtgacagcgaccgggaggccctggccgccatgaatgctgcccaggtgaagcccctgggcaagagcccccaggtgaagccagccagcaccatgggcatgggccccctgggcaaaggagctggccctgtgcccccaggcaaggtgggccctgccaccccatctgcccaggtgggcaagtgggaggaggacagcgagagcagcagcgaggagagcagtgacagcagtgatggagaggtgcccacagctgtggccccagcccaggagaagagcctgggcaacatcctgcaggccaagcccaccagcagccctgccaagggccccccccagaaggccggccctgtggccgtgcaggtgaaggccgagaagcccatggacaacagcgagagcagcgaggagagcagtgacagcgctgacagcgaggaggccccagctgccatgacagctgcccaggccaagccagccctgaagatcccccagaccaaggcctgccccaagaagaccaacaccacagccagcgccaaggtggcccctgtgcgggtgggcacccaggcccccaggaaggccggcacagccaccagccctgctggcagcagccctgctgtggccggcggcacccagaggcctgctgaggacagcagcagcagcgaggagagtgacagcgaggaggagaagacaggcctggccgtgacagtgggccaggccaagtctgtgggcaagggcctgcaggtgaaggccgcctctgtgcctgtgaagggcagcctgggccagggcacagcccctgtgctgcccgggaagacaggccccaccgtgacccaggtgaaggccgagaagcaggaggacagcgagagcagcgaggaggagagtgacagcgaggaggccgccgccagccctgcccaggtgaagacctctgtgaagaagacccaggccaaggccaacccagctgctgcccgggcccccagcgccaagggcaccatcagcgcccctgggaaggtggtgacagctgctgcccaggccaagcagaggagccccagcaaggtgaagccccctgtgaggaacccccagaacagcacagtgctggcccggggccctgcctctgtgcccagcgtgggcaaggctgtggccacagctgcccaggcccagacaggccctgaggaggacagcggcagcagcgaggaggagagtgacagcgaggaggaggccgagaccctggcccaggtgaagcccagcggcaagacccaccagatccgggccgccctggccccagccaaggagagccccaggaaaggagctgcccccaccccacctgggaagacaggccccagcgctgcccaggccggcaagcaggatgacagcggcagcagcagcgaggagagtgacagtgatggagaggccccagctgctgtgaccagcgcccaggtgatcaagcccccactcatctttgtggaccccaacagaagccctgctggccctgctgccaccccagcccaggcccaggccgccagcacccccaggaaggcccgggccagcgagagcacagcccggagcagcagcagcgagagtgaagatgaagatgtgatcccagccacccagtgcctgaccccaggcatccgcaccaacgtggtgaccatgcccacagcccaccccagaattgcccccaaggcctccatggccggggccagcagcagcaaggagagcagccgcatcagtgatggcaagaagcaggagggccctgccacccaggtggacagcgctgtgggcaccctgcctgccaccagcccccagagcacctctgtgcaggccaagggcaccaacaagctgaggaagcccaagctgcctgaggtgcagcaggccaccaaggcccctgagagcagtgatgacagcgaggacagcagtgacagcagcagcggcagcgaggaggatggagagggcccccagggcgccaagagcgcccacaccctggtgggccccacccccagcaggacagagaccctggtggaggagacagctgctgagagcagtgaagatgatgtggtggcccccagccagagcctgctgagcggctacatgaccccaggcctgaccccagccaacagccaggccagcaaggccacccccaagctggacagcagccccagcgtgagcagcaccctggccgccaaggatgatcctgatggcaagcaggaggccaagccccagcaggccgccggcatgctgagccccaagacaggaggcaaggaggccgccagcggcaccaccccccagaagagcaggaagcccaagaagggggccggcaacccccaggccagcaccctggccctgcagagcaacatcacccagtgcctgctgggccagccctggcccctgaatgaggcccaggtgcaggcctctgtggtgaaggtgctgacagagctgctggagcaggagaggaagaaggtggtggacaccaccaaggagagcagcaggaagggctgggagagcaggaagaggaagctgagcggggaccagcctgctgcccggacccccaggagcaagaagaagaagaagctgggcgctggggagggcggggaggcctctgtgtccccagagaagaccagcaccaccagcaagggcaaggccaagagggacaaggccagcggagatgtgaaggagaagaagggcaagggcagcctgggcagccagggcgccaaggatgagcctgaggaggagctgcagaagggcatgggcaccgtggagggcggggaccagagcaaccccaagagcaagaaggagaagaagaagagtgacaagaggaagaaggacaaggagaagaaggagaagaagaagaaggccaagaaggccagcaccaaggacagcgagagccccagccagaagaagaagaagaagaagaagaagacagctgagcagacagtgtag

SEQ ID NO: 50626 - DNA, 4356 bp, Artificial Sequence
  derived and/or modified sequence
atggccgaggcccggaagcggcgggagctgctgcccctgatctaccaccacctactacgggccggatacgtccgggccgcacgggaagtcaaggaacaatcaggtcagaaatgtttcctcgcgcaaccagtgacccttctggatatatacacccactggcagcagacatcggagctgggtaggaaaagaaaagcagaggaggatgccgcactccaagctaagaaaacccgggtgtcggaccccatcagcacaagcgagtcaagcgaggaggaagaagaggcagaggcagagactgcgaaggcaactccgaggcttgcctccactaatagctctgtcctaggtgcggatctgcccagtagcatgaaggaaaaagccaaagcagaaacggagaaggcagggaaaactggcaattcgatgccgcatccagccacagggaagacagtagcgaaccttctgtccggcaaatcacctaggaagagcgccgaaccgtccgctaacacaactctggtgtctgagacggaggaagaggggtccgtgcctgccttcggagcagctgccaagcccgggatggtgagtgccgggcaggctgattccagcagcgaggatacttcatcatcttctgacgagaccgatgttgaaggaaagccaagcgtgaagccggcacaggtcaaagcatctagtgtatccacaaaagaatctcccgctcgaaaggccgccccagcgcctggcaaggtgggggacgtgactccccaagttaagggtggcgccctgccccctgctaagagggcgaagaagcccgaggaggaatccgagtcatccgaagagggatccgagtctgaagaagaggccccagcaggaaccagatcccaggtgaaggcaagtgagaagatacttcaggtccgggccgcatccgcaccggctaaaggaacacctggcaagggagctacgccggcgcctccggggaaggcgggtgccgtggcaagccagacaaaggcaggaaagcccgaggaagactcagaatcttcatcagaggaaagttctgactccgaagaagaaacccctgcagcgaaagctctgttgcaggccaaagcctccgggaaaacaagccaggtgggtgcagcttcagcccctgctaaggagagcccacggaagggagctgcccctgcacctcccgggaagaccggacctgctgtcgccaaggcccaggcaggcaagagggaggaggacagtcagtcctcaagtgaggaatccgattctgaagaagaagcccctgcccaggctaagccgagtgggaaagcccctcaggtgagggccgcgtccgcacctgccaaggaatctcctcgcaagggcgcagcacccgccccaccccggaagaccggcccagccgccgcccaggtccaggtggggaaacaggaggaagactctagatccagctctgaggagagtgactcggacagggaggctctggctgcaatgaatgccgctcaggtgaagcccctcggaaagagcccacaggtgaagccagcttcaaccatggggatggggccgctgggaaagggggcgggccccgttccaccaggtaaggttggtcctgctaccccctctgctcaggtggggaaatgggaggaggatagtgagagctcttctgaggagtcaagcgacagcagcgacggagaggtgccaaccgccgtggctcccgcacaggaaaaatccctgggtaacatcctccaagccaaaccgacgagctcccccgctaagggcccccctcaaaaagctggcccggtagccgtccaagtgaaggcagagaaacctatggataactccgagtctagcgaggagagcagcgatagcgctgattccgaggaagcaccagccgccatgacggccgctcaggctaaaccggctctgaaaattccacagacaaaggcctgtcctaagaaaacaaacaccacagcctccgccaaggtcgctcccgtgcgagtgggcacgcaggctccgcggaaagctggtaccgctactagtcccgccggttcatctcccgcggttgccgggggcactcagcgtccggcagaagactctagttctagcgaagaatctgactccgaagaggagaaaaccggcctggctgtgacggtgggccaggctaaaagcgtgggtaaggggctgcaggttaaagccgcctctgtgcctgtgaaggggtccctaggtcaggggacagccccagtcctgcctggcaagaccggcccaactgtgacccaggtgaaggcagagaaacaggaagactccgagagctctgaggaagagtccgactccgaggaggccgccgccagcccggcgcaagtcaagacctcggtgaaaaagacccaggctaaagccaacccggccgcagcccgggccccttccgccaagggaactatatcagctcctggtaaagtcgtgacagccgctgcccaagccaaacaaaggtcaccatctaaagttaagccacctgtgagaaaccctcagaacagcaccgttttggccagggggcccgcctccgttccctccgtgggaaaagccgtggcaactgccgcccaggcccaaaccggaccagaagaggactccggctctagcgaggaggaatccgatagcgaggaagaagccgagacactggcccaagttaagccatctggcaagacccaccagattcgcgccgccttggcccccgccaaggaatctcccaggaaaggcgcggctcccacaccgcccggtaagaccggaccttccgctgctcaggctgggaagcaggacgattcaggcagtagctccgaagaatccgactcggatggggaggctcccgctgcagttacgtctgcccaagtgattaagccaccattaatctttgttgaccccaacagatcccccgccgggccagcagccacaccggcgcaggctcaggctgcctccacccctagaaaggcccgagcgtccgagagtacagcgcgaagctccagcagcgaatcagaggatgaggacgtgatcccagcaacacaatgccttacccctggcattcggaccaatgtagttaccatgcccacagcccaccctagaattgccccgaaagcttccatggctggtgcttcctcttccaaggagagttcaaggatatccgacggcaagaagcaagagggtcctgcaacccaggtggactccgcagtaggaacgctgcccgccacaagcccccaatctactagcgtgcaggctaaaggaacgaacaagctcaggaagcctaagctgcctgaagtgcagcaggcaacgaaggctcccgaaagctccgacgattctgaggactcaagcgattcaagttcaggcagtgaggaggatggagaagggcctcagggtgccaaatctgcccacacactggtgggacctacgccctcgagaacggagacattagttgaggagaccgccgccgaaagcagcgaggatgatgtggtcgccccatcacagtcattgttgagtggatacatgacccccgggctgaccccagccaatagtcaggcaagcaaagcaacccctaaactggactcttcccccagcgtctcaagtacactggcagcaaaggacgaccccgacggcaagcaggaagccaagcctcagcaggccgctggaatgctgtcacccaagacagggggtaaagaagctgccagtggaacgacccctcaaaagtctaggaagccgaaaaagggggcggggaatccgcaggcctctaccctagcgctccagtcaaatatcacacagtgtcttcttgggcagccttggccactgaatgaagcgcaagtacaggcttccgtcgtgaaggtactcaccgaattgttagagcaggaaaggaagaaagtcgtggacactaccaaggaaagcagcagaaaagggtgggagagccggaagaggaagttgagcggggatcaaccagctgccagaaccccgcgttcaaaaaagaaaaagaagttaggcgccggggagggtggcgaagcaagcgtgagtccagagaaaacctctactacatcaaaggggaaagcaaaacgggataaggccagtggcgatgttaaagagaagaagggcaaaggaagcctcggctcccaaggagccaaagatgaacctgaagaagaactccagaaaggcatgggaactgttgagggtggcgatcaaagcaatccgaagtcgaaaaaagagaagaagaagtctgataagcgcaagaaggacaaagagaagaaggaaaagaaaaagaaagcgaaaaaggctagcactaaggactccgagtcacccagtcagaaaaagaagaagaaaaagaaaaagacagccgaacaaacggtgtag

SEQ ID NO: 50627 - DNA, 4356 bp, Artificial Sequence
  derived and/or modified sequence
atggccgaagctcgcaagaggcgcgaactcttgcctctgatttaccaccatctgttgagggctgggtatgtgcgcgctgcgcgagaggtgaaggaacaatccggccagaagtgcttcctcgcccaaccggtgacacttttagacatatacacacactggcagcagaccagtgagcttgggagaaagaggaaggctgaagaggacgcagccttgcaggctaaaaagacgcgagtctccgacccaataagtaccagcgaaagcagcgaggaggaagaagaggcagaagccgagacagccaaagccaccccccgactcgcttcaactaactcaagtgtgctcggagccgacctgccctctagcatgaaagagaaagcgaaggccgagactgagaaggcaggaaaaaccggcaactccatgccacacccagccaccgggaagactgtggcgaacctcctgtctggaaagagcccaagaaaatccgcggaaccatcggcaaacacaacacttgtgtctgaaactgaggaagagggaagcgtccccgcttttggcgctgccgcaaaaccagggatggtcagcgcgggtcaggccgatagctccagcgaggatacttcctctagcagtgacgagacagacgtcgagggcaaaccttctgtcaagccagcccaggtgaaggcttctagcgtaagcactaaagagtctcctgctcggaaagcagccccagcgcctggtaaagtgggagacgtaacaccccaggttaaggggggagcactgccacccgctaagcgcgctaagaaaccagaggaagaaagcgagtcctccgaggaaggctcggaatctgaggaagaagcgcctgccggaactcggtcacaagttaaggcaagcgagaaaatcctgcaggtgcgggcagcatctgccccagccaaggggacccctggtaaaggtgccactcctgccccaccgggaaaggccggagcagtggcgtcacagaccaaagcaggcaagccagaggaagattccgagtcctccagcgaagagagcagtgactccgaggaggaaacaccagccgctaaggcccttttacaggcaaaggcgtccgggaaaacatcccaggttggagcagcttccgctccggctaaggaatccccacgtaaaggggctgctcccgcacccccaggcaagactggacccgctgtcgccaaggcgcaagcaggcaaaagagaagaggacagccagtcaagctccgaggagagcgattccgaggaggaagctccagcccaggccaagccatcaggtaaggcgccacaggtgagggctgcgtcagctcccgctaaggaatccccccgaaagggagcagctcccgcacctcctcgaaaaaccggccctgcggcagcccaggtccaagtagggaagcaagaagaagactctcggtcgtcaagtgaagaatctgattctgatcgcgaggcactggctgccatgaatgcagcccaggtaaaaccactgggaaagagtcctcaggtcaagccggctagcactatgggcatgggtcctctcggaaaaggtgccggtccagtgcctcccggaaaagttggacccgctaccccctccgcccaagtcggaaagtgggaagaagactccgagtccagttctgaggaatcatccgatagttccgacggtgaagtccccaccgccgtggctcccgctcaggagaagtcactcgggaacatcctccaggccaaacccacgtcaagtcctgcgaagggccctcctcagaaggcaggacctgtggccgttcaggtcaaggctgaaaagcctatggataattcagaaagcagtgaggagtcttcagattctgccgacagtgaggaagcccctgctgccatgacagcggctcaggcaaaacccgctcttaaaattcctcaaacgaaggcttgtcccaaaaaaaccaacacaaccgcgtctgcaaaggtggctcccgtgcgcgttggcacgcaggctccgagaaaagccggaactgctactagccccgctggttccagtcctgccgtggctgggggtactcagaggcctgccgaagattccagctcatccgaagagtcggactctgaagaggagaaaacaggcctggccgttacggtcggccaggctaagagtgtgggtaaaggtttacaagtgaaggccgcatccgtgccagtgaaggggtctcttggccaaggtaccgcacccgtactgcctggtaagaccggacctaccgttactcaggtgaaggccgaaaaacaggaagacagcgaaagctctgaggaggagagtgacagcgaggaggctgctgcttccccagcacaggtgaagacctctgtgaagaaaacacaagccaaggccaatcctgctgcagcacgcgcaccttcagccaagggtactatatccgcaccagggaaagtcgttacagctgccgctcaggctaaacagcgaagcccaagcaaagtgaagccccctgtcaggaatccccagaattcaaccgtattggccaggggacccgcatctgtcccctctgtcggcaaagccgtcgctactgctgcgcaggcccagacaggaccagaggaagatagtgggtcctccgaggaggagtccgactcagaagaagaggctgagacactcgcccaggtgaaacctagcgggaagacgcatcagattcgggctgctctcgcccctgcgaaagagtctcctaggaagggtgccgctccgacccccccaggaaagaccgggccatctgctgcccaagcaggaaagcaagacgatagtggttccagttctgaggaaagcgactcagacggcgaagctcctgctgctgtgactagcgcccaggtgataaaaccgccattaatatttgtggatcccaataggagcccagccggacctgcagccacccctgcacaggcgcaagctgcctcgactccacgcaaggcccgagcctccgagagcaccgctaggtcttcttcatctgaatcagaagatgaggatgttatcccagccactcagtgcttgacaccaggcatccgcactaatgtggtcactatgccaacagcccaccccagaatcgccccaaaagcctctatggccggagcttcgtcttctaaggaaagttctcgcattagtgatggaaaaaaacaagaaggtccagcaactcaagtggacagtgccgtgggtacactgcccgcaaccagtccgcagtctaccagcgtgcaggctaaaggcaccaataagctgcggaagcctaagttgcctgaggtgcaacaagccactaaagcacccgagtcaagtgacgactccgaggacagttctgacagttccagtggatccgaagaagatggagagggtccccagggggcaaaatctgctcatactctggtcggaccgaccccttcacggaccgaaaccctggttgaagaaacagccgctgaaagctcagaggacgatgtcgtagccccttcccagagcttgctcagcgggtatatgaccccagggctgaccccagctaattcccaagctagcaaggccaccccgaagctagattcctcacccagcgtctccagtactttggccgctaaagatgacccagatggcaagcaggaagcaaaaccccaacaggctgcgggaatgctgtccccgaagacggggggtaaggaagctgccagcggtaccactccccagaaaagcagaaagcctaaaaaaggggctgggaacccacaagcaagcaccctcgcattacagagtaatattacccagtgcctgctgggccaaccttggcccctgaacgaagctcaagtacaggcctctgtcgtgaaagttctgacagagctcttagagcaggagagaaaaaaagtcgttgataccaccaaagagtcgagcaggaagggctgggagtccaggaagagaaagctgtctggcgatcagccagccgcaagaacgccacgcagtaaaaaaaaaaagaaactgggagccggagaggggggtgaagcctcagtgtccccagagaagactagtaccacgtctaaaggaaaggcgaaacgcgataaagcctcaggagacgtgaaggaaaagaaaggcaagggatccctgggtagtcaaggggcaaaggacgaaccggaagaggaactgcagaagggtatggggactgtggagggcggtgaccagtctaatcccaaatctaagaaagagaagaagaaatccgacaaacgtaagaaggacaaggagaagaaagaaaaaaaaaagaaagccaagaaggcatccacaaaagattctgaatcgccctcacagaaaaagaagaaaaagaagaagaagacggccgagcaaactgtctag

SEQ ID NO: 50628 - DNA, 4644 bp, Artificial Sequence
  derived and/or modified sequence
gtgcaggtagccggccggccgggggtcgcgggtatggccgaggccaggaagcggcgggagctacttcccctgatctaccaccatctgctgcgggctggctatgtgcgtgcggcgcgggaagtgaaggagcagagcggccagaagtgtttcctggctcagcccgtaacccttctggacatctatacacactggcaacaaacctcagagcttggtcggaagcggaaggcagaggaagatgcggcactgcaagctaagaaaacccgtgtgtcagaccccatcagcacctcggagagctcggaagaggaggaagaagcagaagccgaaaccgccaaagccaccccaagactagcatctaccaactcctcagtcctgggggcggacttgccatcaagcatgaaagaaaaagccaaggcagagacagagaaagctggcaagactgggaattccatgccacaccctgccactgggaagacggtggccaaccttctttctgggaagtctcccaggaagtcagcagagccctcagcaaatactacgttggtctcagaaactgaggaggagggcagcgtcccggcctttggagctgctgccaagcctgggatggtgtcagcgggccaggccgacagctccagcgaggacacctccagctccagtgatgagacagacgtggaggggaaaccctcagtaaaaccagcccaggtcaaagcctcatcagtttctactaaggagtctccagcaagaaaggcggccccagcccctgggaaggtgggggatgtgacaccccaggtcaaaggaggggccctgcccccagccaagagggccaagaagccagaagaggagtcagagagtagtgaggagggatctgaaagtgaggaggaggcccctgcagggacacgaagccaggtaaaggcctctgaaaaaattctccaggtcagagctgcctcagcccctgccaaggggacccctgggaaaggggctaccccagcaccccctgggaaggcaggggctgtagcctcccagaccaaggcagggaagccagaggaggactcagagagcagcagcgaggagtcatctgacagtgaggaggagacgccagctgccaaggccctgcttcaggcgaaggcctcaggaaaaacctctcaggtcggagctgcctcagcccctgccaaggagtcccccaggaaaggagctgccccagcgccccctgggaagacagggcctgcagttgccaaggcccaggcggggaagcgggaggaggactcgcagagcagcagcgaggaatcggacagtgaggaggaggcgcctgctcaggcgaagccttcagggaaggccccccaggtcagagccgcctcggcccctgccaaggagtcccccaggaaaggggctgccccagcacctcctaggaaaacagggcctgcagccgcccaggtccaggtggggaagcaggaggaggactcaagaagcagcagcgaggagtcagacagtgacagagaggcactggcagccatgaatgcagctcaggtgaagcccttggggaaaagcccccaggtgaaacctgcctctaccatgggcatggggcccttggggaaaggcgccggcccagtgccacccgggaaggtggggcctgcaaccccctcagcccaggtggggaagtgggaggaggactcagagagcagtagtgaggagtcatcagacagcagtgatggagaggtgcccacagctgtggccccggctcaggaaaagtccttggggaacatcctccaggccaaacccacctccagtcctgccaaggggccccctcagaaggcagggcctgtagccgtccaggtcaaggctgaaaagcccatggacaactcggagagcagcgaggagtcatcggacagtgcggacagtgaggaggcaccagcagccatgactgcagctcaggcaaaaccagctctgaaaattcctcagaccaaggcctgcccaaagaaaaccaataccactgcatctgccaaggtcgcccctgtgcgagtgggcacccaagccccccggaaagcaggaactgcgacttctccagcaggctcatccccagctgtggctgggggcacccagagaccagcagaggattcttcaagcagtgaggaatcagatagtgaggaagagaagacaggtcttgcagtaaccgtgggacaggcaaagtctgtggggaaaggcctccaggtgaaagcagcctcagtgcctgtcaaggggtccttggggcaagggactgctccagtactccctgggaagacggggcctacagtcacccaggtgaaagctgaaaagcaggaagactctgagagcagtgaggaggaatcagacagtgaggaagcagctgcatctccagcacaggtgaaaacctcagtaaagaaaacccaggccaaagccaacccagctgccgccagagcaccttcagcaaaagggacaatttcagcccctggaaaagttgtcactgcagctgctcaagccaagcagaggtctccatccaaggtgaagccaccagtgagaaacccccagaacagtaccgtcttggcgaggggcccagcatctgtgccatctgtggggaaggccgtggctacagcagctcaggcccagacagggccagaggaggactcagggagcagtgaggaggagtcagacagtgaggaggaggcggagacgctggctcaggtgaagccttcagggaagacccaccagatcagagctgccttggctcctgccaaggagtcccccaggaaaggggctgccccaacacctcctgggaagacagggccttcggctgcccaggcagggaagcaggatgactcagggagcagcagcgaggaatcagacagtgatggggaggcaccggcagctgtgacctctgcccaggtgattaaaccccctctgatttttgtcgaccctaatcgtagtccagctggcccagctgctacacccgcacaagcccaggctgcaagcaccccgaggaaggcccgagcctcggagagcacagccaggagctcctcctccgagagcgaggatgaggacgtgatccccgctacacagtgcttgactcctggcatcagaaccaatgtggtgaccatgcccactgcccacccaagaatagcccccaaagccagcatggctggggccagcagcagcaaggagtccagtcggatatcagatggcaagaaacaggagggaccagccactcaggttgacagtgctgtgggaacactccctgcaacaagtccccagagcacctccgtccaggccaaagggaccaacaagctcagaaaacctaagcttcctgaggtccagcaggccaccaaagcccctgagagctcagatgacagtgaggacagcagcgacagttcttcagggagtgaggaagatggtgaagggccccagggggccaagtcagcccacacgctggtaggtcccaccccctccaggacagagaccctggtggaggagaccgcagcagagtccagcgaggatgatgtggtggcgccatcccagtctctcctctcaggttatatgacccctggactaaccccagccaattcccaggcctcaaaagccactcccaagctagactccagcccctcagtttcctctactctggccgccaaagatgacccagatggcaagcaggaggcaaagccccaacaggcagcaggcatgttgtcccctaaaacaggtggaaaagaggctgcttcaggcaccacacctcagaagtcccggaagcccaagaaaggggctgggaacccccaagcctcaaccctggcgctgcaaagcaacatcacccagtgcctcctgggccaaccctggcccctgaatgaggcccaggtgcaggcctcagtggtgaaggtcctgactgagctgctggaacaggaaagaaagaaggtggtggacaccaccaaggagagcagcaggaagggctgggagagccgcaagcggaagctatcgggagaccagccagctgccaggacccccaggagcaagaagaagaagaagctgggggccggggaaggtggggaggcctctgtttccccagaaaagacctccacgacttccaaggggaaagcaaagagagacaaagcaagtggtgatgtcaaggagaagaaagggaaggggtctcttggctcccaaggggccaaggacgagccagaagaggagcttcagaaggggatggggacggttgaaggtggagatcaaagcaacccaaagagcaagaaggagaagaagaaatccgacaagagaaaaaaagacaaagaaaaaaaagaaaagaagaagaaagcaaaaaaggcctcaaccaaagattctgagtcaccgtcccagaagaaaaagaagaaaaagaagaagacagcagagcagactgtatgacgagcaccagcaccaggcacagggatttcctagccgagcagtggccatccccatgcctctgacctccaccgacctctgcccaccatgggttggaactaaactgttaccttccctcgctccacagaagaagacagccagcttcaggggtccctgtgctggccaagccagtgagcctgcggggaggctggtccaaggagaaagtggaccagctcccatgacctcaccccactcccccaacacaggacgcttcatata

SEQ ID NO: 50629 - protein, 1412 aa, Artificial Sequence
  derived and/or modified sequence
MAEARKRRELLPLIYHHLLRAGYVRAAREVKEQSGQKCFLAQPVTLLDIYTHWQQTSELGRKRKAEEDAALQAKKTRVSDPISTSESSEEEEEAEAETAKATPRLASTNSSVLGADLPSSMKEKAKAETEKAGKTGNSMPHPATGKTVANLLSGKSPRKSAEPSANTTLVSETEEEGSVPAFGAAAKPGMVSAGQADSSSEDTSSSSDETDVEVKASEKILQVRAASAPAKGTPGKGATPAPPGKAGAVASQTKAGKPEEDSESSSEESSDSEEETPAAKALLQAKASGKTSQVGAASAPAKESPRKGAAPAPPGKTGPAVAKAQAGKREEDSQSSSEESDSEEEAPAQAKPSGKAPQVRAASAPAKESPRKGAAPAPPRKTGPAAAQVQVGKQEEDSRSSSEESDSDREALAAMNAAQVKPLGKSPQVKPASTMGMGPLGKGAGPVPPGKVGPATPSAQVGKWEEDSESSSEESSDSSDGEVPTAVAPAQEKSLGNILQAKPTSSPAKGPPQKAGPVAVQVKAEKPMDNSESSEESSDSADSEEAPAAMTAAQAKPALKIPQTKACPKKTNTTASAKVAPVRVGTQAPRKAGTATSPAGSSPAVAGGTQRPAEDSSSSEESDSEEEKTGLAVTVGQAKSVGKGLQVKAASVPVKGSLGQGTAPVLPGKTGPTVTQVKAEKQEDSESSEEESDSEEAAASPAQVKTSVKKTQAKANPAAARAPSAKGTISAPGKVVTAAAQAKQRSPSKVKPPVRNPQNSTVLARGPASVPSVGKAVATAAQAQTGPEEDSGSSEEESDSEEEAETLAQVKPSGKTHQIRAALAPAKESPRKGAAPTPPGKTGPSAAQAGKQDDSGSSSEESDSDGEAPAAVTSAQVIKPPLIFVDPNRSPAGPAATPAQAQAASTPRKARASESTARSSSSESEDEDVIPATQCLTPGIRTNVVTMPTAHPRIAPKASMAGASSSKESSRISDGKKQEGPATQVSKKNPASLPLTQAALKVLAQKASEAQPPVARTQPSSGVDSAVGTLPATSPQSTSVQAKGTNKLRKPKLPEVQQATKAPESSDDSEDSSDSSSGSEEDGEGPQGAKSAHTLVGPTPSRTETLVEETAAESSEDDVVAPSQSLLSGYMTPGLTPANSQASKATPKLDSSPSVSSTLAAKDDPDGKQEAKPQQAAGMLSPKTGGKEAASGTTPQKSRKPKKGAGNPQASTLALQSNITQCLLGQPWPLNEAQVQASVVKVLTELLEQERKKVVDTTKESSRKGWESRKRKLSGDQPAARTPRSKKKKKLGAGEGGEASVSPEKTSTTSKGKAKRDKASGDVKEKKGKGSLGSQGAKDEPEEELQKGMGTVEGGDQSNPKSKKEKKKSDKRKKDKEKKEKKKKAKKASTKDSESPSQKKKKKKKKTAEQTV

SEQ ID NO: 50630 - DNA, 4239 bp, Artificial Sequence
  derived and/or modified sequence
atggccgaggccagaaagagaagagagctgctgcccctgatctaccaccacctgctgagagccggctacgtgagagccgccagagaggtgaaggagcagagcggccagaagtgcttcctggcccagcccgtgaccctgctggacatctacacccactggcagcagaccagcgagctgggcagaaagagaaaggccgaggaggacgccgccctgcaggccaagaagaccagagtgagcgaccccatcagcaccagcgagagcagcgaggaggaggaggaggccgaggccgagaccgccaaggccacccccagactggccagcaccaacagcagcgtgctgggcgccgacctgcccagcagcatgaaggagaaggccaaggccgagaccgagaaggccggcaagaccggcaacagcatgccccaccccgccaccggcaagaccgtggccaacctgctgagcggcaagagccccagaaagagcgccgagcccagcgccaacaccaccctggtgagcgagaccgaggaggagggcagcgtgcccgccttcggcgccgccgccaagcccggcatggtgagcgccggccaggccgacagcagcagcgaggacaccagcagcagcagcgacgagaccgacgtggaggtgaaggccagcgagaagatcctgcaggtgagagccgccagcgcccccgccaagggcacccccggcaagggcgccacccccgccccccccggcaaggccggcgccgtggccagccagaccaaggccggcaagcccgaggaggacagcgagagcagcagcgaggagagcagcgacagcgaggaggagacccccgccgccaaggccctgctgcaggccaaggccagcggcaagaccagccaggtgggcgccgccagcgcccccgccaaggagagccccagaaagggcgccgcccccgccccccccggcaagaccggccccgccgtggccaaggcccaggccggcaagagagaggaggacagccagagcagcagcgaggagagcgacagcgaggaggaggcccccgcccaggccaagcccagcggcaaggccccccaggtgagagccgccagcgcccccgccaaggagagccccagaaagggcgccgcccccgccccccccagaaagaccggccccgccgccgcccaggtgcaggtgggcaagcaggaggaggacagcagaagcagcagcgaggagagcgacagcgacagagaggccctggccgccatgaacgccgcccaggtgaagcccctgggcaagagcccccaggtgaagcccgccagcaccatgggcatgggccccctgggcaagggcgccggccccgtgccccccggcaaggtgggccccgccacccccagcgcccaggtgggcaagtgggaggaggacagcgagagcagcagcgaggagagcagcgacagcagcgacggcgaggtgcccaccgccgtggcccccgcccaggagaagagcctgggcaacatcctgcaggccaagcccaccagcagccccgccaagggccccccccagaaggccggccccgtggccgtgcaggtgaaggccgagaagcccatggacaacagcgagagcagcgaggagagcagcgacagcgccgacagcgaggaggcccccgccgccatgaccgccgcccaggccaagcccgccctgaagatcccccagaccaaggcctgccccaagaagaccaacaccaccgccagcgccaaggtggcccccgtgagagtgggcacccaggcccccagaaaggccggcaccgccaccagccccgccggcagcagccccgccgtggccggcggcacccagagacccgccgaggacagcagcagcagcgaggagagcgacagcgaggaggagaagaccggcctggccgtgaccgtgggccaggccaagagcgtgggcaagggcctgcaggtgaaggccgccagcgtgcccgtgaagggcagcctgggccagggcaccgcccccgtgctgcccggcaagaccggccccaccgtgacccaggtgaaggccgagaagcaggaggacagcgagagcagcgaggaggagagcgacagcgaggaggccgccgccagccccgcccaggtgaagaccagcgtgaagaagacccaggccaaggccaaccccgccgccgccagagcccccagcgccaagggcaccatcagcgcccccggcaaggtggtgaccgccgccgcccaggccaagcagagaagccccagcaaggtgaagccccccgtgagaaacccccagaacagcaccgtgctggccagaggccccgccagcgtgcccagcgtgggcaaggccgtggccaccgccgcccaggcccagaccggccccgaggaggacagcggcagcagcgaggaggagagcgacagcgaggaggaggccgagaccctggcccaggtgaagcccagcggcaagacccaccagatcagagccgccctggcccccgccaaggagagccccagaaagggcgccgcccccaccccccccggcaagaccggccccagcgccgcccaggccggcaagcaggacgacagcggcagcagcagcgaggagagcgacagcgacggcgaggcccccgccgccgtgaccagcgcccaggtgatcaagccccccctgatcttcgtggaccccaacagaagccccgccggccccgccgccacccccgcccaggcccaggccgccagcacccccagaaaggccagagccagcgagagcaccgccagaagcagcagcagcgagagcgaggacgaggacgtgatccccgccacccagtgcctgacccccggcatcagaaccaacgtggtgaccatgcccaccgcccaccccagaatcgcccccaaggccagcatggccggcgccagcagcagcaaggagagcagcagaatcagcgacggcaagaagcaggagggccccgccacccaggtgagcaagaagaaccccgccagcctgcccctgacccaggccgccctgaaggtgctggcccagaaggccagcgaggcccagccccccgtggccagaacccagcccagcagcggcgtggacagcgccgtgggcaccctgcccgccaccagcccccagagcaccagcgtgcaggccaagggcaccaacaagctgagaaagcccaagctgcccgaggtgcagcaggccaccaaggcccccgagagcagcgacgacagcgaggacagcagcgacagcagcagcggcagcgaggaggacggcgagggcccccagggcgccaagagcgcccacaccctggtgggccccacccccagcagaaccgagaccctggtggaggagaccgccgccgagagcagcgaggacgacgtggtggcccccagccagagcctgctgagcggctacatgacccccggcctgacccccgccaacagccaggccagcaaggccacccccaagctggacagcagccccagcgtgagcagcaccctggccgccaaggacgaccccgacggcaagcaggaggccaagccccagcaggccgccggcatgctgagccccaagaccggcggcaaggaggccgccagcggcaccaccccccagaagagcagaaagcccaagaagggcgccggcaacccccaggccagcaccctggccctgcagagcaacatcacccagtgcctgctgggccagccctggcccctgaacgaggcccaggtgcaggccagcgtggtgaaggtgctgaccgagctgctggagcaggagagaaagaaggtggtggacaccaccaaggagagcagcagaaagggctgggagagcagaaagagaaagctgagcggcgaccagcccgccgccagaacccccagaagcaagaagaagaagaagctgggcgccggcgagggcggcgaggccagcgtgagccccgagaagaccagcaccaccagcaagggcaaggccaagagagacaaggccagcggcgacgtgaaggagaagaagggcaagggcagcctgggcagccagggcgccaaggacgagcccgaggaggagctgcagaagggcatgggcaccgtggagggcggcgaccagagcaaccccaagagcaagaaggagaagaagaagagcgacaagagaaagaaggacaaggagaagaaggagaagaagaagaaggccaagaaggccagcaccaaggacagcgagagccccagccagaagaagaagaagaagaagaagaagaccgccgagcagaccgtgtag

SEQ ID NO: 50631 - DNA, 4239 bp, Artificial Sequence
  derived and/or modified sequence
atggctgaggcgcgtaaaagacgggagctgctccctttgatctaccatcacctcttaagggccgggtatgtgagggcagcccgcgaggtcaaggagcagtcaggacagaagtgttttctggcacagccagttaccctattggatatctacacccattggcagcagacatccgaactgggacgcaagagaaaggcagaggaggatgccgcccttcaggccaaaaagacacgtgtttcggatccaatttcgactagcgagtcctcagaggaggaggaagaagccgaggccgaaacggccaaagcaacacctcgcctggcttcgaccaattcaagtgtgctcggagctgacctcccctcctccatgaaggaaaaggccaaagcagaaactgagaaggctggaaaaacaggcaactccatgccccatccagcgacaggaaagaccgtggccaatcttctctcgggtaaatccccacgaaaatctgctgagccctccgcaaataccacgcttgtgtccgagacagaggaagaaggctccgtaccagcattcggtgctgccgcaaaacccggtatggtttccgcagggcaggccgactcctcgtccgaagatacgagctcttcctccgacgagactgacgtcgaggtgaaagcctccgagaaaatcctgcaggtgcgtgcagcctcagctcctgccaaaggaactccagggaagggggcgaccccggccccgccgggtaaagctggcgcagtggcttcccaaactaaagccggaaaaccagaagaggacagcgaatcctctagtgaggaaagttcagactctgaggaagagaccccagccgctaaggccttgctgcaggccaaggcatcgggaaaaacatctcaggttggtgccgcatcagcccctgccaaagaaagcccgcgtaagggcgccgcaccagcccccccgggcaaaacaggccctgccgttgctaaagcgcaggcaggaaagagagaggaggacagccagtcctcgagtgaggaatcggatagcgaagaagaagcccctgcccaagcaaaaccatccggcaaggcgccccaggttagggctgcatcagcgcccgccaaagagagcccccgcaaaggagccgccccagccccgcctcgcaaaactgggccggccgccgcgcaggtacaggtcggcaaacaggaagaagacagccggtcttcttcggaagaaagcgatagcgatagggaggctctcgccgctatgaacgctgcccaggtcaaacccctgggcaaatcaccgcaggtgaaaccagcttcgacgatggggatgggcccgttggggaaaggcgcgggccctgttcctcccggcaaagtgggtcccgccaccccatccgcccaggtgggtaagtgggaggaagactccgaaagctctagcgaagagtctagtgacagctctgatggagaggtacctacagctgtggcccctgcccaagagaaatccctgggtaacatcttacaggccaagcccacctctagcccagccaagggccccccccagaaggccggaccagtagccgtgcaggttaaggcggagaaacccatggataacagtgagagttctgaagagtccagcgattctgcggattccgaagaggccccagctgctatgactgccgctcaagccaagccagccttgaaaattccccagaccaaggcctgtcctaaaaagaccaatacaaccgccagcgctaaggttgcccccgttcgtgtggggactcaggctcctagaaaggctggcactgcaactagccctgcagggtcctcgcctgccgtggctggaggaacccagagacctgctgaggattcttcatcatccgaggaatccgactccgaagaggaaaaaaccggattagcagtgaccgtgggtcaagcgaagagcgttggaaagggattgcaagtgaaggcggccagcgtgccagtgaaagggtccctggggcaagggacagccccggttctacctggaaagactggccctacagtgacacaagtgaaggccgaaaagcaggaagactcagaatcttcggaggaggagtctgactctgaggaagctgccgcttcgcctgcacaggtcaagacatcggtgaagaagactcaagcaaaagccaacccggcagctgctagagccccgtccgccaagggtacaataagcgcacctgggaaagtggtcaccgcggccgcacaggctaaacagcgctcacctagcaaggtgaaaccacccgtgcggaatcctcagaatagtaccgtgttagcgagggggccggcaagcgtaccttccgtgggcaaagccgtggcgactgcagctcaggcacaaaccggccctgaagaggactccggcagtagcgaagaggagtcagattcagaggaggaggccgaaacattggcacaggtgaagccatcaggcaagacgcaccagattcgagccgctctggctccagccaaggaaagtccacgcaaaggggcagcccctaccccccctggcaaaaccggcccctccgctgctcaagcagggaagcaggacgactcgggatccagctctgaggaatcggactctgatggggaagcccccgccgctgtgactagcgctcaagtgatcaagccccctctgatcttcgtagatccaaaccggagcccagcgggcccagcagctactcctgcccaggcccaggcggcctcaacccctagaaaagcaagggccagtgagtccactgctcggtcatcctcaagcgagagtgaggatgaagatgtgataccggccacccagtgcttgacacccggcattcgcaccaatgtggtgacaatgccaaccgcccacccacggatcgcccccaaagcctcaatggccggagcatcatcaagcaaggaatctagccggatctccgatggaaagaaacaggaaggcccagctacacaggtgagcaagaagaaccccgcgagcctgcccctgactcaggctgccctaaaggtgcttgctcaaaaagcttctgaagcgcagcctcccgtcgcgcggacacagccaagttctggagtggattccgctgtgggtaccctgcctgcaacttctcctcaaagcacaagcgtgcaagccaagggaacaaacaagctcagaaagcccaaactgcctgaggttcaacaggctacgaaagcccccgaatcctccgacgactcggaagactcctctgacagctcttccggcagtgaagaggacggtgagggcccacagggggctaaaagtgcccacacactggttggtcctacgccttccagaactgaaaccctggtggaagaaaccgcagcagaatcatctgaggacgacgtggttgcaccgagtcaatccttgctgagcggatacatgaccccagggttaactccagctaatagccaggcaagcaaggcaactcctaagctggatagctccccgtccgtcagcagtactctcgccgccaaggatgatcctgacggtaagcaggaggctaagccacaacaggccgccggaatgctgagtcccaaaactggcggaaaggaagctgcttcaggcacaaccccccagaagtctcggaagcccaaaaaaggtgctggcaatccccaagcttctacattggcgcttcagagcaatattacccaatgccttctcggacagccgtggcctttaaatgaagctcaagtgcaagcgtcagtagtgaaagtgctgacggagttactagaacaggagaggaaaaaggttgtagataccacgaaagagtcaagcaggaagggttgggaatctagaaagcggaaactttccggcgaccagcccgccgcacgcacaccaagatcgaaaaaaaagaaaaagctgggtgccggtgaagggggtgaggcctccgtaagccccgagaaaacatcgacaacaagtaagggtaaggcaaaacgggataaggctagcggcgacgtaaaggaaaaaaagggcaaagggtccctagggagccagggcgccaaggatgaacctgaggaggaacttcagaaaggcatgggcaccgttgaggggggcgaccaatctaatcccaagagcaaaaaagaaaaaaagaaatctgataagcggaagaaggataaggagaagaaagagaaaaagaaaaaggctaaaaaggcaagtactaaagactcagagtctccctcgcaaaagaagaagaagaagaagaaaaaaaccgcagagcagactgtctag
